United States Patent Application Publication US 2005/0266459 A1 - sequence listing, part 4

SEQ ID NO: 56 - DNA, 159695 bp, Homo sapiens
gaattcaaaataggttgataaaaaggggtgataaaaaggcaaagaggaatttggaatcagtatggtagagctctctttatttagtactttggtctgagtatttatttttacatttggtttctgtggagtactcctacttttagttaagagtacttttcagaattgaaaggcataatgtctcctattatgatagtttcagaatttaaaggcataatgtcttttttattatgatagatctggttatgggcctgttatttgtgtgttggagcagaccagaaagggctgaaacctggaatcagacttgtccttgaggtggacagatgctggtatgggggaggtgatgtgaagcagctaaaccctcatagatagtgtatgagtttcctagggttgttgtaacaaaatactggagagtgatgggttaaaacaacagaaatccattcttgtgcagttggagggatactgttcaacccagtacagatagtgtccagagagtaagcagcaaacggctttgcaaacagcagagggaagaccacccagagtacagggaatgaagctgatagaggacactctaggagcaggctgtgatcagagactcaggcagctcacggccttttgatcagcacataggaagctctttgttccaagctgatctccactctctatgggaccctggcaagagcaagctgaaatatttgagaccgggcaaataagcagtttgccaagaaagagaacaaggcaagtcctcaggactgggatcacgaaaagcctgggtctcaggaataaagtaaagctcagatacgagagtggggccaagtaggtcagggccagtcatgcagcaactgtgactcactactgctgagtcccagagagttggctagagcatctaaaacccctccttcccagggataggcatggagcccaggcagcagtgagccttcagattggggtccagttggctgtagatgaagcgtggtaggggagaaataaattcaaggcttcattgctgtagttcaaaaacaaactttgagccagctaggtggctcatgcctgtaattccagcactttgggaggctgaggcgggtggatcacctgaggccaggagttcaagaccagcctggccaacatgatgagaccctgtctctactaaaaatgcaaaaattagccagtcatggtggtgcatgtctgtaatcccagctactcagtaggctgaggcagaagaatggcttgaaccctggaggcagaggttgcagtgagcgaagattgtgccgtgagacttcatctcaaaaaaaaaaagaaaaaattatgaagggttacattcatcgcagaattgtttatgatataattaggaattggtctatgacaaactccagagggcctccaaaatgaatgaaagacaaaatgcactgaataagggttctaggttagaaatataagtgcaagtgtggcaggccaggtctcactaatgcaggcctccattacaactgtcccagcactgactgagtggctaggttatacactaaaagctgattgagccagtgcccttataccaaggctggaatgtaacaaagagcccaccaagagttttgcctaggcttttccagggccttgaagcatgacaagataacgaaggaattcttctcaggacccttttaggatgaaacaaattttttgggggtctgaagaaagcacaaacaatttctttggagtctaaaggaactccccaaacctttatgatttagcaggatacaagataagggtaatcaccctagcacctagacccatttagattaagtaaacttactgaggctccagaaggtcttcgggactcagaccttagttatagcttaaaagaagttagtcacttacgtttttagataaatgcacacttacacgtagacatatagcttagaaggtgtataggctctggagaactttgtaattttgagttggtctggtgataatttccaggccttttccctgtggctggttacagaaataaaaactcttcctccccagttcatctatatcttgttattgggcctcaagaaatagcagcccaagaggccgggcatggtggctcacggctgtaatcccagcactttgggaggctgaggcgggcggatcacctgaggtcagtagttcgagatcagcctgaccaacatggtgaaaccctatctctactaaaaatacaaaaaattagctgggggtggtggcaggcacccgtaatcccagctactctgcaggctgaggcaggagaattgcttgaacccgggaggcagaggctgcagtgagccaagatcactcattgcattccagcctgggcaacaagagtgaaactccatctcaagaagaaaaaaaaaaaaaaaaagaaaagaagtagcagcctgaccctcagtttagtctgggaacacaaagaagacaaggacaagcacaagcgcaaacacacacacacacacacacacacacacacacacacgccaactgtaaatgaatgcggctagaaggatggaggcagataggtgaggaagccattgacttgtaccagcattggggttctctgttcttatgaactgtctaggatataattcttacagaatcagtccaccttaaaggtgaagtggaaaacagacaggtatggatcactcagagtcctaagatgttatggcaggctggctttcaattatgttaaagaagtaatgaaagtcccagagaagcattgtcaaacaatgaatctaaaaagaaagggtcaaaaatcagcctctctgatgagagtagatggactgacctacaagtgtttcctaggaagaacagtagctttcattttacaaatgacttttaatattattacatttttattccctttatcgaaagcactcagtattacccagagaacccattctctctctctctctttttttttttttttttggagacaagagttttgctcttgttgcccaggctggagtgcaatggcgcgatctcggctcactgcaacctctgcctctctggttccagtgattctcctgcctcagcctcctgagtagctgggaattataagtgcccgccaccacacctggctaattttgtatttttagtagagacggggtttctccacattggtcaggctggtctcaaacttccgacctcaggtgatccgcccatctcagcctcccaaagtgctgggattacaggcgtgagccactgtgcccagcctgagagcccattcttatttatcccttgccagggcaccttaacacttgccagagacagaaactgacaaagtcttttttgtttgttttgtttttgagacggagtttcactcttgttgcccaggctggagtactatggcacaatcttggctcactgcaacctccacctcccgggttcaagtgatttttctgcctcagcctcctgagtaggtgggattacagacatgcgccaccacgcctggctaatattttgtatttagtagagacggggtttcaccatgttggtcaggctggtctcaaactcctgacctcggccttccaaagtgctgggattacaggcatgagccactgtgcctggctcagagtttgtttttgaattgtagcaatgaagccttgaatttatttctccctaccaagcctcatgtatggccaactggaccccaacctgaaggctcactgctgcctgggctccatgcctatccctgggaaggaggggttttagatactctagccagctctctgggagtcagcagtagtcagtgacagttgcctgtgacctttggaaaaggctttttctcaatttgttgttaactttgttaatgaattttttttttttgagacggaatcttgctgtattggcaggctggagtgcagtggcgtaatctcagctcactgcgacctccacctcccggattcaagcaattctcctgcctcagcctcccgagtagctgggactacaggtgcgtgccaccacgcccggctaatttttgtatttttagtagagacggggtttcaccatgttggccaggatggtcttgatctcttgacctcgtgatccacctgcctcagcctcccaaagtgctgggattacaggcgtgagccaccacatccggccaatgatgttttgttatacagaaatatcaaacgttaattttgtcatatattactctttatagttgttggctttgctgtcatgtctagaaagattctaaaaataatcactcatactttctttaagtactcttatggttttgtattttcttttttttttttttttttgagacggagtctcgttctgtcgcccaggctagagtgctgcagtgacacgatctgggctcaccgcaacctccgcctcctgagttcaagcagttctcctgcctcagcctccctagtaggtgggactacaggtgcccgccaccatgcccagctaatttttgtatttttagtagaaacaaggtttccctgtgtcagccaggatggtcttgaactcctgacctcgtgatccacctgccttggcctcccaaagtgctgggattacaggtgtgagccaccacgcccagcctggttttgtattttcatttaatctgggtggaattaattttggtatgttctatgaattacagttcaatcaatttctctcaaataattaacctgttatcttagcatcattaaacaatgtgatttctgctgtgagaaactgttgtattgcttcctctgaattgggaaagaggatgtgtgtggtaagtgtgtaaagagatattctatcatgtattagcatttagccaagtccctgatcttttctttgatgacttggtggccataatttctgagtatactaggttgtatacatttgccttcttagtctcttttagtcctaaaagaggtatttaccttagaaagtggctttcactagttttcctcaaagattgtgaattctgttttgtggatgacctgtttttaaccatagcctatgtactgtcaccaaatatgcttttctgctgcttcattttgtcaactgataattgctctgaaattataaactaataattgtttcagcagtataaaaatagactacagtgtatacttactgtccatttaatactacagattccaaagctgtatgacatttttgttttctactgttatgttctttgtgctctagcccttctctgatatgtggataatttagaggcaatgatagtatttaatatgcccgattttttctttaaggcaagaaattgtttttttttttttttttttgtgatggagtctcgctctgtcacccaggttggagtgcagtggcacgatctcggctcactgcaacctccgtctcctgggttcaagtgattctcctgcctcagcctcctgagtagctgggattacaggtgcctgccaccacgactgactaatttttgtatttttagtagagacagtgtttcaccacgttggccaggctggtcttgaactcctgatctcaggtgatctgcccgctttgacctcccaaagtgctgggacttcaggtgtgagccaccacgcccagccaagaaattgattttttttagttaataatgtttaccaagtattgtagttgggtgaagtcttcaagcttaaaagtaaacctccagcatgttattacctaaggaatttgtgtcaaggctgattgaacctgaatctcttaaatgctttgtttttgtagagaggaaaatatgatgttcccaagtggctctctcccagtagcattctgcttcttcaacaaatgctgcaggtaaactttatttttaaataatagaagtctattgtaattgtttggttcaacttttaagatatctgtggtgctacatcatttcctattagcttgaaaaaaatcccactcatatctaccttgaaaatatcctctattagatcctttcttaattatgttgtaaacctagtttattttagacacctaccatatgttatagctggtatggtttttcttactttgcgaattttctgttttctctaactagttcttgttccactctcttttattccaaaattattgattgattgattgattgatggagatagagtctcactccttagaagaccctcaggttggagtgcagtggcgtgatcttggctcactgcaaccttcgccttctgggttcaagtgctttttctgcttctgccttccgagtaggtgggattacaggtgtgaaccaccatgcctggctaatttttgtatttttagtagagacagagttttcccatgttggccaggctggtctcgaactcctgacctcaaggtatctgcctgcctcagccttccaaagtgctgggattataggcgtgagcctctacacctggccccagctcttttttttttttttttttatttagatggagtctccctctgttgcccaggctggagtgcagtggcgtgatcttggctcactgcaacctttgcctcccaggttcaagtaattctcctgcctcagcctcctgagtagctagtactacaggcgtgtgccactatgcctggctagtttttgtatttttagtagagacgaggtttcactatgttagccaggctggtctcgaactcctgacctcacgttttctgcctgcctcgacctctcaaaatccaaagtgctgggattacaggtgtgagccactggcttttgtttttttgagacagagttttgctttgttgctcaggctggagtgcaacggtgcgatcttggctcaccacaacctccgcttcctgggttcccaggttcaagtggttctcgtgcctcagcctcccaagtagctgggattacaggcatgtgccaccattcctggccaatttttgtacttttagtagagatggggtttcaccatgttgtccaggctggtcttgaacttctgacctcaggtgatccacccgccttggcctcccaaagtactgggattacaggtgtgagccaccgcacccagcctggcctctttttttaaaaaaaaattttatagacagggttttactctgtcgcccaggctggagtgcagtcatatgatcttggcccactacagccttgacccccaggctcaagtgttagttctacttcagcctcccaagtaactgggaccactggtatacaccaccacacctgactaattttttgtgttctttctttagttttcttttttttttggttgtttttaaattttatttatcacttcattccttataattactttcagcaaactgtattttttgtagagatggggtttcgctacgttgcccaggctggtttcgaactcctgagctcaagcgttctgcctgtcttgatctcccaaagtgctgggattacaggtatgagccacggcatcccgccttttcccaactcttgctcattaagtatgttagtagatactgaataaatacttgaatgagttgatgtactattgaatgggccctgttacctagtgcagtggttctcaaacttcagcagatatcaaaattaccccgggcttgttaaaatacagattgctggcctccagccccagagtgtgtaattcaatagatctgaggcaggactgaaattttgcatttctaacaagctcccagaagatgctgatgctgcaggtcttggggccacactttgagaaccacagatttattggaatgagcctctgagggtgaaagataggagtgctgaagcctaggtaagcactctaccaattaatcaatgtatcacctaatctgatctataaaatgggggttctgagcctggcctcactgctatgtagtgttataaggacaaaatgagattgataggaaacactttgaaaatatgagtatcttcttagtgcaatttttttttcattatgtattcagaatatcttctggttttttcatctattaagtcatctccatcttttattcaaaatttacctcaggctcactcaccttgattaagtagggccagaccaccaaatctccgtaatgagattgaaaatgccttactctttcttctagactccaaaataacgttaatctttgttgattaatttttctctccttacatttgaaaattacaaatggaaaggtgtgcttttcaacttgttctgtgtgattgtaagctcattggaggtagagattgcatattcagtatgaatgccctgcattgtggctgcttgaatgtttaattggtgaatatttcccgtgaataggttttccagcaaaagactattacatcatacaatagattgaacttcacgaataatgtccataccaatgaagttcatgtttgttaaacatttatcttctaagcctgtgttggttgctatagttttcttgcctctgttgcctttttaaaagaatttcttccaaggccattttaaagtctttgacagcatttttgtgatgataaagtttacatctgttctgatgcatttttagttttcaggaggaaaggtgttctatgttctctatttgaaatgttaatctctagctactttttaatggccactaggtggacccaaagaaacggatttctatgaaaaatctattgaaccatccctggatcatgcaagattacaactatcctgttgagtggcaaagcaagaatcctgtaagtaaaatgaaatccagtagaatttttttttgactttgtgtggtctttgggtgaattcagaacctacaatgatgtggtctaaatatacaagaaaatatattaatcagattggtgtttgggagacttgtaacctaatggacagtggttccttaaccccatctgcaaatgagaattacctgggaccttaaaaagaaatgcctgctccccatcccagaacacttaatgggagtttttaaaagctcccaggtgtttctcatgtgcagtcagtcacagtgctctgggaatcttggacaagttacttaactttgcagaacctatttattcatctgtaaaaagtaggttaaaccagttctacttcccagagaagttatgagggtacagtagttctcaaactttttagtttgaggatccctttatactcttaatatttatttattcattaaaaactaatatgataaaactattgcatattaacacaaatatttttatgaagaataaccatttacaaaataaatttagcaaaaagaatgacattgttttacaactttgcaaatttctttaaagtctggcttaatagaagacacctgtatagccacctgcttctgtgttcagtctgttttgataggttgttttgattgaagccaaggaataaaatgcagcctcacacagatatgcaataggaaaaggaagaaaaattctaatagccattcagacagtttctgatagcccattaaaacttgacaaatggtagtttcttaaagggtaattgcatgtggaatctgaagccatatcaatgaaattttgtactgtattccataaaatccattgttctgtccattggatcttttcctcacataacatgatgcattggttatttggaaaacactggtttgctgagttatgcaaatcttccaaacgttaacacatttcgttatacaacattaaatcacattccttaaaatcactactgatctcagtagaaaagtctttaactattggaaagcactcaagatcatggtggcaaataaaagttttctaaattctaatttttgcttaaaagctaaaattctatcattgacaacaaatatgtcattctccttgaactgacaaattcccttggttcatttttgagaaaatgtctgctgaacatttaagtctaaataactatagttagtccgtgttctttctcatcaaaatggtgttctttgaaaaaaatggctaattaggccaggcacggtggctcacacctgtaatcccagcactttgggaggctgaggcaggcgtattacttgaggtcaggagttccagaccagcctggccaacatggtaaaaccccatctttactaaaaatgcaaaaaattagctggcatggtagtgcctataatcccaggttctcaggaggctgaggcagaagaattgcttgaactcgggaggcagaggttgcagtgagctaagagcgccaccgcactccagccttgggtgacagagcgagactctgtttcaaaaagaaaagaggctgggtgcagtggctcacatctgtaatcccagcactttgggatcccaggcgggtagattatgaggtcaggagttcgagaccagcctgaccaatatggtgaaactctgtctctactaaaaatacaaaaattagctgggcgtggtggcacacacctgtaatcccagctactcaggaggctgaggcaggagaatagcttgaacccgggaggagagtgagactccatctcaaaagaaaaagaaaaagaaaaaaatggctaattgagctcataattcagtcatacaggtgcttttcctcgagacagctatcaaactttggtattgtagaagtacattatgctacttcctatttagtcacacagagtattaaaaacgtactcagaaatgtaataaaattaatatattttactggtttatcaaggaaattcttaattgaaactggcttcttttcgaactatgggtatatgacaaagaatacaatattttagtacagtttggtgccactgcattgattcatactaaggtgccagcaatttatttatttaattttaatttttttttttttgagtgggaatctcgctattatcgcccagacgggagtgcaatggcacgatcttggctgactacaacctccgcctcccagtttcaagcaattctcctgcctcagccacccgattagttgggattacagccgcctgctacaacgtttggctaatttttgtatttttagtagagatgggatttcaccatgttggccaggctggtcttgaactcctgacctcaggtggtccgcctgccttggcctcccaaaatgctgagattacaggcatgagccactgcacctagctgccagcaattttatcactgcatttgtaccatccatacaaatgtcaacactttgaaaaatgaaaaataatattattataaaaatagtttgaccttggagactctcaggcatctgcagaccgtgctttgagaactggtctaatatgcgtatatgtaaaaaaacataaacaacaccaagtgttatttaagtttaaacaatttaaaaaatactatttctacattgtttttaaaaaatgcttttttttttttttttgagatggagtctcgctctgatgcccaggctggagtgcaatggcgcagtctcagctcaccacaacctccgcctcctgggttcaagtgattctcttgcctcagactcccgagtagctgggactacaggcatgtgccaccatgcctggctaatttttatatttttagtagagacggggtttcactgtgttggccaggctggtcttgaactcctgacctgcctgccctggcctctcaaagtgctgggattacaggcgtgagccactgtgcctggccttaaaaatgctttttttcaaacaaatggccacttggtaaaaatgtggatattactataggacttggatattttgtgtattagttattgctgcattaaaaactaccctgaaatttagtggcttaaaacaataatttggctgggcacggtggctcacgcctgtaatcctagcactttgggaggccgaggcaggtggatcacctgaggttgggagtttgagaccagcctgaccaacatggagaaacccgtttctagtaaaaatacaaaatcagctgggcgtggtggtgcatgcctgtaatcccaactactcgggaggctgaggcaggagaatcacttgaacctgggaggcggaggttgcagtgagccaagattgcgccattgcactccagcctgggcaacatgagcgaaactccgcctcaaaaaataaattaattaaaaaaaaacagtaataatttacagttctgtggaccagatatttgggctgggttcagctgggctgttcttatgtaggccttacctggggtcgtggctacagtcatcttgtaactgggctgaatggtccaagcctcactagaaagactggctgtttcctgggccacatgtgtccatcaggctaacctggacttttttatgtagcaactggatttctttctttctttctttctttctttctttctttctttctttctttctttctttctgtctgtctttctttctttctgtctttctttctttctgtctttcttgtctttcttgtctttcttgtctttcttaccgagtctcactctgtcacccaggctggagcagtggcacgatctctgctcactgcaagctctgcctcccgggttcatgccattcccctccctcggcctcccgagtagctgggactacaggtgcctgccaccacccggctaattttttgtgtttttggtagagacggggtttcaccatggtagccaggatggtctcgatctcctgaccttgttatccgcctgcctcggcctcccaaagtgctgggattacaggcatgagccactgcacccggccagcaactagatttcaaaagaagaaagaggataagccctagtgctctagcatttttcaagcttctgcttgcattgtacttactaatgttccactggccaaagcaagccatgtgacaaagcccagagccactatggaaggtgtatctttcaaggttgtacaattcttattccctatttatagataagggaacggaaaaatgaaaagcaactatttaagatataaatgtagtgagaagagtggcattgctttacatctttgccaatttctttgaagtctgtcttattagaagacaactcatgtgcttctgcattcagcctgttttgataacatcgttttgattgaaacaaatgaagaaaatacagcctcacacagatatgtaattagaaaaaatagaagtattttaatagtgtttccagataattggggatattctctgatatgtcaccaaaacttttgcagtggactaggacatgtgcatgaatcaacacaacagcttagaggtgtgtctcagatatgccacagcatagaattggtagagctgtggggtatttgctttctggaataatcacaccaatgtaaatatccttcccagtagccagctcgtcttggaaagatagactatacttgctccaagccctttctcactgttctgcccactattaatgggccatgtggcctgagctgaaatcactcctgattctcctatgactgtcaactcctaaaacttctgttatctaaattcccccagccctacatgacatctttaatatctattgagcaaatataacataattctaacagcaaccacaccaagatcctaagaaaagcagaatgtgcaagtgtctgagcagtgtagcagcagaaccagggaagctgtgatgtgccccttgtgaggtggagagagtgggtggtgcaaatgcctgtgttcagccattgggggtcatcatttctccatgtgcggagggctttgcacatcttctcagccatgatcctaataggatagaatacattactgtttgtgttagatgccaaaatgaagaaagtctctgctttctacaaccccaagagtttttttttatttgggacacagtataaagtaaaatatataaagttatgagtgttccaaaagagtatacagtttcccttacatcttttttttgtttgtttttttgaaatggagtttcgttcttgttgcccaggctggagtgcagtggtgtgatctcggctcaccgcagcctcttcctcctgggttcaagcgattttcctgccttagccttccgagtagctgggattacaggcatgcgccaccacgcccagctaattttgtatttttagtagagacggggtttatccatgttggtcaggctggtctttaactcccgacctcaggtgatcggccgacctcagcctcccaaagttctggtgttacagatgtgagccaccatgcccagcctcccttacatcttaatttaataattgctactatttactgagcacgtagagtagaatagtgtactattttagtaagggctctctgtatattatactgtggtaaaatataggtagaactgttaggatagtacctttaagagtcaggcactatcctatgggctttatgttgtgttaactcctttaatccatttaatctgtacgccaatcctccgaagaaggtactattattgcccctttttgcagatgaggcaactgagacacagaatcattaagtaacttgcccatggtcaaacaacgagtaagtgtagaaccaggatttaaacgcacaccgaagggttctggaatggaatggatctgataggctagctgattcaagctcagggcccacgtcctgtgtatttgcagcctttgtggcgagcattgcttatctggtgtctgttgaagtagctactggagcagagtgatggagaggtggcattgtgttatggtaggaaaacctggggctaggaatgaaaaatgccagtcttaggcagatcacagtaacttttctgagtcttcattttatcacctctaatatgggtattctaatgtcaatctgtgtatgtttgggtcatgttttgccatttatagagtaactttacatgttgtatcattaatctcttttgcctgccttgcagagctgttacaggatcaaatgaattatatacaggagaggcataatgaattgttgttgctttttaaaggatttgcttttctctttcagtgttgtgtttcatcaagagtgaactattaaaaaaaattcagatttccttgaatatttaaggtatagatgctgtctgttctgtaactctacgcatgatcgcctcctaccattttcatacatagttctggtacccaagtattgcatcaaatagaaattatagtcagtttcattttctgccctggcgaacaggaaatgtagtaggcacagataatccaaaataattggctagcttttggtatgcagttttgtacttaatttgagtatgtgtggctgaggattcagagcgctttaagtattgatcctctttggaagacacagcttgagattaatcatgttttttagacccttggtatcttttctaccacactcatttcattgtttccagttcaggagcccagcagagatagtagaacctccttcttccatctcctgcctttctcacacatatgccttgtggtaaaggtacaggcaggaggctgcgggagagaggggttcttttacagttaaaaaaatattttttttttacacttaagatgatggagggaacctcaaaaatttattttcttgcttgagcagtgttgacatcaacaagaggataccaggtattaaggtgtctaggcttctgaggttgagaccatcttgaggggaaatctacagttctaggagcggtcatagtcaaagcagcacaatgaaaacttattcttagcactttggactttaacagtaccactagtataaacctttgtggtctctactttgtaacccatgaggttgtgcttataccagtcaataatgcaaggctctctcagtctgtttgagctgctgtgacaaaataccataaattgagtggcttagagagaacagaaatttatttcttgcagttctggaggttgggaagttcaagatcaaggcatcatagagctagagttctggagagtaaaaataaagaaaaaaaagatcaaggcaccagcagatttggtgtttgatgagggcccactttctggttcatagaatggctctttcttgctgtgtcctcacgtggtggaacgggagaaaggggaaaggcctctggagcctcttttctttcttttcttttctgtttctttttcttttttaaagagatagggtctcattcttttacctgggctggagtgcagtggcttgatcatacctcactgtaaccttgaactcttgggctcaagtgatcctcccacctcagcctcctgagtagctaggactacgcatgtgagccatcgcacctggctaatttttgaatatttttttgtagtaatggagtcttgctgtattgcccaggccagtctccaactcctggcttcaagtgatcctcccaccttagcttcccaaagccctgggattacaggcatgagccattgtactttggcctggggcctcttttataagtgtaataaccccatttatgagggcagagcccacttgtgacctactcacctcccaaagacccaacctcctaatactattacactagtgattaggtttcagcgtatgaattgaggggaaaaatttgtctttactgtttcttttcatgatggcagcctttctcttgagcttgttgttacaagtgtgatgttcaaaacaagggaagctcatgatattgccctgccttgtgctgggcagacctctctttcttgttatgtttggttctgaatacttcactttgatgtgtagtatcaacctggagtgtgatctaaagaaagggccagaatagtaaggggagttaatcattaaagtggaggttggcggaactagaaaacggaagacttgcagaggaaaggttgcttataataggaatacgcaaatttctgaaaggctcttttagcacagaggaaatagaattatgactgttggtgaaaataaccagtttttgagggcctactctgttgagatgttgtactaggcgcttgctctatgttgcatatattgcagggcacataccatctctctctagcagatgatgaaactgagactcagaggtgtggtcatgttcaaggccgcatggttattaagtcctgttgcaattaaaactaaggtctgtctaattcccaagcctgttagccatcagtttgtaccaattcccagtggacagagatcacagggagacagacctcaggcagcaggagggagatgctaaccattccagctgttctgtgtaccctggagaggaggcctttaagcagaacataaagcatccctcactcgggctgccataaagagagatttttttttttttttttttttggagatggagtttcactgttgttgcccagcctggagtgcaatggcttgatctcagctccccacaacctccgcctcctgtgttcaagcgattctcctgcctcagcctcctgagtagctgggattacaggcatgcaccaccacgcctggctaattttgtatttttagtagagacggggtttctccatgttggtcaggctggtctccaactcccaacctaagatgatccacccacctcggcctcccaaagtgctgggattacaggcgtgagccaccgcacctggcctaagagagttatgttggaaagatgaactttaaagttgtattcctctgcttctcttcctgtgtaatcttctgagctcccttccaggtccaggccaggctattcctgattcctgcctttttgttctcagtgatccttgcttggttctgagaacccatttccagccctacctttagtgaggtaccatcatgtagggattatttggataatttctgtccttaagcaaaatgaattttgtatagaggctcttacttatattcttttttaaagttgtggtccagcaaaataacgatcgtgtggcatctatggcaccatcgtaaaggctccttgaattgtgctaaacataaacataacctgaggtaccctgtgctctacaagtttgaatcactcttttaccagtctgttgtatagccactgattttagatgcctaggtggctgctctttgatgaaaataccaatgcaggtcttgtggtagggaaggggagtatacagtccctgggctgtacaacagaacttttttttttttttttttttttttttttgagacagagtctcgctctgttgcccaggctggagtgcagtggcacagtgtcagctcactgcagcctccgcctcctgggttcaagtgattcttgtgccacagcctcccaagtggctgggattacagatgctcgccaccatgcctggctaatttttgtatttttagtagagatggggtttcaccatgctggccaggccagtctcaaactcctgacctcaggtgatctgcccgccccagcctcccaaaatgctagaattacaggtgtgaactattgtgcccggcattgtacaaccgaactttaacaacagttgctcagatgatgatggggataaagagttgggaaagagcacatcttcttgaaatgcttgctggaatatgcttacttcttaaaagattatagagaatattgattcttccccaagaaattgacagattcatgttttacataatgatatttgattgtataaagtaattatgctgattttaaaatgtgaaaacattgaatatatttgtaattttttgttaataaagtgcataatttttttttgtagtttattcacctcgatgatgattgcgtaacagaactttctgtacatcacagaaacaacaggcaaacaatggaggatttaatttcactggtaagaaatacagcatgggctgggcgcagtggctcacrcctgtaatccaarcactttgggaggccgaggtgggaggatcacttgaggtcaggagttcgagaccagcctggccaatgtggtgaaaccccatctctactgaaaatacaaaaattagccaggtgtggtggcacgtgcctgtaatcccagctacttgggaggctgaggcacgagaatcacttgaacccgggaggcagaggttgcagtgagctgagatcacaccactgcactccagcctgggcaacaagagctaaactccatctcaaaaaaagaaaaagaaaaaaaatacagcaccaatttgagagtagtatcttttgtttcattgttctttattttatcagtacatgaaaaatagtatagcattttcagacctgtgattttattatgggtacaaatattgcatttaaaaaatatttacatatgatttccacacagtcctgatgtgtgctagatatcttctttaaaaatgaacactccatacttaaaacattgatgaagaagaattacagtgaaaaaataattaagaaacaactggccgggcacggtggctcacgcctgtaatcccagcactttcggaggctgaggtgggcggatcacgaggtcaggagatcgagaccatcctggctaacacagtgaaaccccgtctctactaaaaatacaaaaaattagccgggcgttgtagcagatgcctgtagtctcagctacttgggaggctgaggcaggagaatggtgtgaacctgggaggcggagtttgcagtgagccaagatcacgccactgcactccagcctgggcgacagagtgagactccatctcaaaaaaaaaaaaaaaagaaaagaaacaacaaactagtgcacaaagaatggacagagttctaattttgactactttaaagttctctaacatgcaactgggtttctgctgtggaaatgaggtaaacacaaagcaattttcttttcacctgaaagcaacagcagcgtcacgtcacccctaagtggacaaaccaaataccatgaaagcattatcatgatttctggtgttggattattttggctctttcagatgctcagtctctagatcatacctgtgttttgtgtgtgtgtgtgtgtgtgtgtgtgtgtgtgtgtgtgtgtgttttaagagatcaaggcagtcacagctgtctctaatgtgaagggtgacttgtacctcactttgttcctggcccagtactatgtcttctatcacctgtgatttatgtttgctttatctgttctttaacttgcaaggtggagtccttaagcaatttttttaaaaaattaaacaaagctttgctaaggcacaattcttttcagtaaggagaaaatataaaggaattcttctgaatgacataataagtaaagacacacagaatgtatctggaaatggtagtataatttactttttcatggataatgcctttagggaaatagtaagacttgggaattgctgtaagatttgtgtggtcctcagtctttcattagtgaaaatttgaagtttccatttaagcaacctgaaaaaataaattgtaggacattttctttgggataatctttaatggaagactatactttagatactgaaattttaaaaaatgttattatagaaaaatttacccaccaaagtagagagaatagtataacaacactgagtttccatgttctcatcattcagttccaatagttaataacattttgccaatttaatctatatcctaccactttctcccttcttccctttccagctgggatatttccacgtaaatcccagatagcatgtcagtttatccaggacaaattggtatgagatctacaaactttaaaaatctgaatcttaaaagtaacatacttaagccgggcgcggtggctcatgcctgtaatgtcagcactttgggagtccgaggcgggcggatcatgaggtcaggagattgaggccaacatggtgaaaccgcgtttctactaaaaatacaaaaattagccgggcgtggtggcacgtgcctgtaatcccagctactcgggaagctgaggcaggagaatggcttgaacctgggaggcagaggttgcagtgagccaagatcacgccactgcactccagcctggtgacagagtgagactccgtctcaaaaaaaaaaaaaaaaaaagtaacatatttagagtttcaataatcattgaaaaagtctttaaaatggtatcttttatgacgtctctacctataattttcagacttaaaagtgaaatggaaatacaaattatttgctttccttctggtgcataaaacataacaaagcatagtagaagttgtttcctggtgttacagttctctaaagatcttctcagttattctgaaagttaagcatgaccaacatcaagaatgtagtgaggaaagtaatagtttttcttcctttgtactcttttctcattcttaaatccctgttcatacttcgttgagtcccagggatgagtaggttataggctactcactctagatcagagattctcaccttggctgtatagtggcatttcttgggaactttaattctgatgtttaggtctcaaccccacagatgatgattcagttggtctagggtatagccgaggcatgagaatttttagaaatcttcccagctgactgtggtacgcagccagagtcgagaagcagtgctctagatccttgctgttcaaagtgtggcctaggaccagcagcagcagcatccaggtgctttttagccgcgaagactctcaggcctcacctcagacctactgaatcagaatctgtgtcaaatctccaagtggttcatatggttagtaaagcttcagaagcattggtctagctcagttctcaaccaggagtgattttggcactcagggggcatttggcagtgactagagacatttttggttgtcgtaactggggtttgtgtatgtgtactaatgccatctagcgggtggaggccagggatgctgccaaacatccttcaatgcacagaagagcccctcacaacaaacagttatccaggtcagatgtcaatagtgccaaggttgagaaacccttgtctgggtagctcagagaattcatactggctctacatactttccaatttgaagagcctcaggaaaaccaggtttgagactagccagggtctgttatgtttttctgtgacatcctgagagctctgccttcacttttggggctgattagacaggacagagagagattagttctgtgtgatccatatgctggtatggtgctgctgatctttgtgcagagagagagagaaacaatattactctcaaacattcaacttataagaactcccacttttatattatatacaggagcactctgaaactgctttctctatgcagcggtgagcctcctatgtctcatgattttgagtgatctcattgtattccttttgagattcccaacagtgctttccttactgtcttcctgttcctccagccctgagtggctctggattgtggcagcagccagtcctctgctaggggaccttcactaagggtcacatgtgtgttcgagaacctattcagtccaggacagatccattttccccacccctgtgatgtaaacacccatgtgtgtaaagactgaaggcctcaggaggagggtcagaggaagggtaggggccactcctccgtgtctgtgcccctctgcactagtagctgcctctcctcaacccaggtgccaggacacctctttaacatttaactggggatttaagaatgtttttagttttctagaaatggaactttctcacaggtaaccctatcactttactttcagacatttgactttcaaaagagggaattgcctaaaagataagggaaacctttgtcttagacttgtggattgacatcacctgaaagcataactaatgtgttgatttatctgttattgaacacagaactctcctgtgcatcttataatgagaagtatacagtgacactggccagaaagttatgaaaaagatgctttttttgcctagggaaaaggagggtttagaggatggttgtagaaatcctaggcatgtttaggaaactccatctaaaactcttagcactatccaggaattgtttacaatgcctgggttatgccatgccatcattgataagaaagtggcaacttgtttcttagccattgtctctagtcagtttatgacatctctttcaaaaaggtggctatcgtacatggggctatcatagatgtggggtgggaaaaagtctttaatgtagtttttggaaagtggagagtgattataagtatatattttccaccccaccatagtttcccagccaccttctccatgaagcctcttcttttcttttctttctttctttctttttttttttttgagatggagtctccctctgtcgccaggctgcagtgcagcggcagaatctctgctccctgcaacctccgcctcccgagttcaagcaattctcctgcctcagcctcccatatagctgggattacaggcgcctgccaccacacccagctaatttttgtattttttgtagagacagggttttaccatgttggctgggctggtctcgatctcctaacttcaagtgacccacccgcctcagcctcccaaagtgctaggattaaaacatgtatgagccactgtgcccggccatgaagccttactgtcctttctttgcctcaccctgtttggattaaaggcaacatttcataatttatgacactattttatgcttcccctactagattgattgggccatttatgcaaatttcaaagcatatactatgatcgtggccatctaagttattaactaataaaattcattactaaaaacagagttggtagttgacttttgagtcatgtactttgtgagggggctacatagcatgaaagactattccgtactgttaaaagttaacacttttgtagggcagatagccccatagttttctcagtacattatttagaaactttcattaaacatagtggattgaacagctaagtttacgtcgaacacttcctaaaaccttaacaaaaagggataaaaaggcaaaatatttacaagcagaataaaaggggagacaaagggatgtcattagaagtttggaagatataggttagtggtataagtggtagttgtcagagcattttggagaaagctgaaagctaagtgcttgcagtgagaaaggcatcaagcaaactgatgagagctccagaaaggctcaggaatcagaggtaccaggagcctctgaagtcagggaagtgaagaggaaaaacaggaagatgggttagaaccctagattcctttctctacctgtgctgcataacagcctcctcttccgcatcctggcagaagactggaggtcacaaggcattcttgtaccaaatacagctcagatgcggatgatgaacaattctgaaatggatgcgcaaagtcttcatattgaacagtgcaccaccatctcaaattcccttccctattcaactttgagaacgctgaaaccaggatttgtatcctatttgcagtgatggtggggaaaatattggaagatttatctccagggaaaagctaagataaatatcctactatattagtggttgggagttcaagttcctgtccgttcatcttagagaggagccttcaaggtattgagcagccccatcatacacatagaacctctcatcagctgtgtaacgtaattcttcacttttaagtagaaacagacaaccaaaaatcactagaaatttgaggaaaacttctaacatgaaagtcggagatcaaaacaaatggagtaaggtggggagaggaaagaagaaaaagtagatactgagaaaaaaaaaccccagatatgcagggagcgggagaaaatggctaaaaactgctaattaatattctcagataagagaagtgattttcattcttgacataggaataagatgaataaaaatgaacattccaagagatagctcttgaaaatctaaaatgtgaccacagaaattaaaagctcagtaaaagtgtttgaaaatgaaattcatttgaaatcttttaaaagtagaacctggtgggctaggtgcggcggctcacacctgtaatcccagcactttgggaggccagcgcgggcagatcatgaggtcaggagatcgagaccatcctggctagcacggtgaaaccctgtctctactaaaaatacaaaaaaaatagccgggtgtggtggcgggcgcctgtagtcccagctactcgggagtctgaggcaggagaagggcgtgaacctgggaggcagagcttgcagtgacccaagatcgcgccactgcactccagcctgggcgacagagcaaagtagaacagctaggcacggtggcttacgcctgtaaacccagcactttgggaggctgaggcggcaggtggatcatttgagaccaggagttcgagaccagcctggacaacatggtgaaacctcatctctactaaaaatacaaaaattagccaggcgtggtggcatgtgcctgtaatcccgggtactcgggaccctgaggcgagaggattgcttgaacccaggaggcagaggttgtagtgagccgtgattgcaccattgcactccagcctgggcgatagagcgagactctatctcaaaaaaagggaaaataatgcaagaagaaatattccaggccgggcactatggctcacgcctgtaattctaaaactgagaggccaagatgggaggattggttgaggccaggagttcaagatcagcctgggcaacatagtgagatcctatctctatttaatttaatttaattaaattaattaatttatttatttttgagacagaatctcgctctgtcgcccaggctggagtgcagtggcacgatctctgctcactgcaagctctgtctcccagattcacgtcattctcctgcctcagcttcctgagtagctgggactacaggcgcccactaccacgcccggctaattttttgtatttttagtagagatgggttttcaccatgttagccaggatggtctcgatctcctgacctcgtgatccacccgcctcggcctcccaaagtgctgggattacaggggtgagccaccgcacccggcctctattttattaaaaattaaaaaaaaaatttaagattaaaaacaaaaaagagaaatattccagaactgaagaatatgagttttcaagaatgaagaggcctaacctgggatgaaacagtagatgaaaacagattcacaccaaggcctgttctagtggaatttcataataagattcaggaagttttcaaagataaaaatgaaagttcatacaaaaaggctggagaatcaaaacctaaatgactataggtttttcagtagctgtactagaatcaagaagagtatactaccatcaaaactgcgaagattattatcaacccagaattctctgcttaaccaaatcagaatcaattgtgaagatagaatgtagtcacttatcagacatgcaagatctcaaaaaatttacttcccatgcatgcgccctcaggaagtcactggaggatgtgttccacaaaaatgagagattaaaccaagaaagaagaatacttaggatctaggaaactggggctacattgtaagatagaggtgaaaggaatccctagactgacaattgagtagctggctgagaagccggtccagagtggagcagaggatgcagacatcaggtggaatctctctaagtggggaagcagttagcagatgtgtgtgaacatgttgagaggaggtaaagtgttggaaagggtggagttcaatttgtaaggaataactgacttttatttttatcttcaggaaaaacaaaggtataaaaaaatggaaatgcaagaatagcaccctgtgtggtttagctgcagagctgatattcggccagcatgaccacattggttgttaaaatattagtgtatttatatactgactggtaaataaccactatcttcagtgccctccatgttgccctgttacttccctggacactactccctcccctcttctcacaattaaaagattaataattggaaaggcaggcgtctcccaggaccctactgacctcttggcctctattttgatggttgatgtcagggtaacaattaactattttgaacattatccctacttagttgtgaatgctatttacataatcataataatgcaaatattaacttagctaaacattgtgataaaattatagtaggaggatacagggaggagatgtgtgggaaagggagggagttgcagtagagttaaattcatatttctcatactaggaaatttatacatattatctgaagctgaaaaaaattttaagctatgtaagcatttagtttggaaatacagaattaatagcagaagaaatagctaaaagtgtttgaaagttgttccttagggggagtggaaattgtatgtgtgtggaggtgtggtgcactggttgctgtttttcatcatatgctgtgtaaacctattggcttttaaagttctgaatgttacactgaagaaaaaaattaattaaagatagaacatcatttccacaaacaagtaatcttctaaccaacttgattttcttttcctttagtggcagtatgatcacctcacggctacctatcttctgcttctagccaagaaggctcggggaaaaccagttcgtttaaggctttcttctttctcctgtggacaagccagtgctaccccattcacagacatcaaggtaagtgttactgcctgttgtgtcttgccacgtgccctccctgttcctgagtgtgtataccactgggaaggtaaactttccggtgtcaaggagtcagaggcaagatgttttatgatttcaatatttttgatgagaaaaatgggaagttctgaagttgaactctaattttttttttttttttttttttgagatagagtctcactctgtcatctaggctggagtgcagtggcatgacctcagctcactgcaacctctgcctccgggattcaagcgattcttgtgcctcagcctcccgagtagctggaattgcaggtgtgcatcaccacgcctggccaatttttgtatctttagtagagacggggttttgccatgttggccaggctggtctcaaactcctgacctcaagtgatcagcctgcctcggcctcccaaagtgctgggattataggcatgagccaccgtgcccggcctctaaaattctgaatgttaacatggcattttacaaacctcctcccctgactccttttttttcataatagcaattcctgatggctatagaaaatgtttaagccaggccgggtgtggtggctcacacctgtaatcccagcactttgggaggccaaggcaggtggatcacaaggtcaggagtttgacaccagcctggccaatatggtgaaaccccgtctgtactaaaaatacaaaaattagccaggcgtggtgatgagtgcctgtagtcccagctacttgggaggatgaggcaggagaatcgcttgaacccgagaggcggaggttacagtgagctgagattgcgccattgcactccagcctgggcgacagagcaagactctgtctcaaaaaaaaaaaaaaaaaaaagaaaatgcttaagccacagatgagctaaaaggaaaatagaatttacctataaaccaactacctgtggaggatgtagttaatatttattgtgtctttccagtcttttttttaaagcatacttttacacgcattcaagtacttttaaaggacacattattgaattgcagagaacaaaaaaattgttgggagtaagatctgtgatatggaatatataatactttatatgacatgaaacattttgataaatattttcatatttatgttaagggtttaggtttttgtttcttttaaaattttcatactgaaatggagcatgttgattagtgtttgttataaccaaattatttttctctacttcactgtctttgtctcagttttgtcatggactttaaaaaatttttttgttttattttttgaaacaaagtcttgctttgttgtcctggctggagtacagtggtgtgatcatggctcactgcagccttaaccttccaggctcaagcaatcctcctgcctcagcctccctagtagctgggattacaggtgtgtgccaccacacctggctaatttttaattttctatagaaatggagtccagctatgttgcccaggctggtcttgaacacctgggctcaagcagtcctccctcctttgcctcccaaagtgctgggattattggcatgagtgactgcacctggcctgtcatggacatttaaaatggtgaagaagcttacatacatagaggcaccatgtcattcctaaatgcttgtgttagtccttgttttgtgtgattctttgtatttcccatggcttaaaattcagctatccaaatactttgccagatgggtatggaactttgtaatgtcatcttccctcagattaattcaggttgcaatgtaaataatcttagcactaggaaattgtacctcatcctcagagaaaggtagttggttggccctgtttatgaaatccaagataacacaattgactgtgtggatgaaagtttggtttttttcccctttataggcctcaaaactgtaaaaaaaaaacaaaaaatgttaaaatgccacctcttttatgatcttttgttgaattccccctccctcaaattcctttaatatctatctcatttagatctccttttggtactcatcagtcatgtgctacaggtatagtgggtcttatgtcactgccagaactaacctgcccctctttttccctccctagttggtcagtgcactggctgttgtgtaaagaaatctctgaagggagatatcctgcatggttttctagtctgttgttggagagttttaatggctggtaaatattctgtgcctaggcagctcttttgcacatgggctccttgaatcagccaatccctcatcccacccacactgccaaaccctttaaactttcaggtgcaagtaacacatctgggtccaggaaaatgcaaaaccctgaattttgcatctgctcaaggtaattggagaaagctattagatacgtatacctctatgcttagaaaaatcactttcactaaattttaaaatttacgacacctcagttaaggggcctgagacattttcctgagacattggattgtcttttttttttttttttttttttttgagacagagtcttgctttgttgcccaggctggagtgcagtagtgtggtcttggctcgctgcaacctccgcctcctgggttcaagtgattctcctgcctcattgtcccgagtagctgggattacaggtgtgtgccaccacacctatctaatttttgtatttttagtagagatgggatttcaccatgttggtcaggctggtctcgaactccagacctcagatgatccacctgcctcagcctcccaaagtgctgggaacacaagcgtgaaccaccacacccggcctggattttcttatatctgaattggcctggtctcaattgatctgcttatatgagttgtaagtggaaaagacctggaaatatatttactcttatcttccatctactccctaatgaacatttaactaataatttaattatttgcaaagtcatattattgaatcaattttatggcagatcaagagacattttagtaacaagaagtgaaatagaaatcaaattttgggttcgcttctaatctttatgcaaattattgagacacgaagcaagtcacatagtctggttgtactgttcttccccttgatagaattatcccttttctctggggtgttgtttataagaaagtaagtaatcatgatcgatcaatcaatcaataggtggccctttcagtgaaacagcagtacagactgatccaagaatcacaaataaccacgtcatcatcatcagtgtcattagcattttcaggccccatgctgggctgctgggaaacatatctgtgtaaagtataatacttgttctctaagagtcaagacatatatatacatagataatactgcatcatagtagatgatgggggccagagaagtggccagaggtgtcctggggagctttagaggacaggaatgatcaccatgggatccaaactggaccaacagtcaaggttagaaagatggaaaagaagtggcacaacattcagggcaagataaatggaatcagcaaaagcaggggcacctaattttgcttgatgtattctgttgacagtggctggacttgtgttaaaaaagaagagttcaagtagggggagagagagagagagagagagagagaacgcaagtgagctggaagggtggacaagagccagatagtagagaacctgaaaatgcacatcagaattttagactttgttcaatagttaatgaggagccattgatttgtgagcaagagagagagaaatgaacatgattttgaaaaattaatccagtggtgtatacgattgtttagtcaggggtgatatgtgtgctattagtccctactggagtacccatgacagccgtcattcgtacagcactgtacttctccccaccaagcctagacttagctttaggatttttctcagcctagctctccatgcatccagttccaaatgacagtaattggtaatcctggagaactctgtcatccttggttgagacagtggaaagattagtggtagagacaatattgtctgtttgaatagtctaggtatgagaagatttgtccttgatctaggatagtggcagtgagactttgggaaaaaaaggatgagatataagaaattcaagtaaaattgcttggctagattaacaatatatcgagggaaaaggaaggaaggagaaataaaaactccaagtacacccacagtcttgaattcagggtataattagtatacccttagtttatagaggaggaagaatgaaagaacagaagttattttggtggcgttgttagcgcaagaccccaaatgtcctatccctaggagatccttcataaggctaattttcttcctggtagaaattattcactaccctgtatattcttacaaagaagaaacctatatttcgaagttgtttcccctccatcttctactttgtcagatctttttatttgtaaatttgcagtagagttgtctggtattatagtgattatgtgataatgaaaagtagtatgctatataacataagaatgttgcaagacatattatttgagagtcggaggttttcctttctgataatttgaactgaaattttctgacttcctttttctgtactggatggtcagctccttcaatatagtgtctcctattcatttttgtttccagggccttgccctatgcctggaatacagttttgtgctgcataaagacaacgttggactgcatttatgatggtggtcccataaaattataataccatgtttttactctaccttttctttttttttctttcttttttttttagacagagtctcgctgtattacccaggctggagtgcagtggcacaatttctgcttgttgtaacctccacctggtggactcaagtgatcctcccacctaagcctcccaagtacctgggcctacaggcacatgcctggctaatttctattttttgtagagatggggtttcaccgtgttgcccagactggctccaacgcctgagcttaagtgatccacctgtgtcagccttccaaagtgctgggattacaggcatgagccaccatggggacggcctttttctgtttagatttgtttagatacataaatacttattgttgtgttagagccacctactgtattcagtacagtaacgtgctacacaggtttgtagtgtaggagcaacaggctataacgtacagcctaggtgtggcctaggtgtgtagtaggctctgacgtctcagtttgtgtaagtacattttatgatgttcacacagtgataaaattgcctaatacatttctcagaatgtgtctctgtcgttaagtgacgcgtgactgtattttaaatattgaatcatagtactgtcatctttaagttcttctgtctttcattgagtagtcaaataattggagtctggaagatgtgaccgcaagtgataaaaattatgtggcgggattaatagactatgattggtgtgaagatgatttatcaacaggtgctgctactccccgaacatcacaggttcgtcattcttattactatttaaggcagaatctattgtttcaattataaaaacaaccagactaatgtgaaaccaaggtgtgcttgcaaatttaatgaatgcttaagccactgaaaatgtttatgagcgataactggaatacgaatgaaagggaagtcaattatatccaagttgaagaaagccaagattctattttagagctctttactgctcctttatttcctgtttattattattattttttgagactgagtcttgctctgttggccaggctggagtgcagtggcacgatctcggctcactgcaacctctgcctcccaggttcaagtgattctcatgcctcctgagtagctgggattacaggtgcctgctgcctctcctggctaatttttgtatttttagtagagacagggtttcaccatgttggcagctggtctcgaactcctgacctcaggtgatccacccacctcagccttccaaagtgctgggattacaggcgtgagccactgtgcccggccttcttttttgtttaaaatgaggtataatgaggtatactttacatgtagttaaataggtaaagtcaccttttttagtgtgcaattctatgtgttttgacaaatgcatacagttgtataaccaccaccaaaattaagatataaaacagttccgttactcctcaaaattccctcattccccttgtggctaacttcccctcccaactctcggtggcaattgatctgtttttctttccttttgataatctttttattgtgactttaagtttgttgagctttttagattaatgaagattaagtatagattaatgttttttatcaaatttgggaagttttcaatattttatttgccccactctctttattttatcttctggtactccccttccatgtatattggcacacttgatggtgccctacagtacactgaggccctgttcatttttctttatctattttcattctgtttctcagactaatttcagttaacctgtttcaaagtttcagattctttcttctgcttactgaaagttctgtttaatccctctagtgaattttttgttatggttattgtactcttgaactccagaatttgttttgttcttttaaataattttatctttatttatactctctatttattgtgacattgctcttacactttcccttggttcttcagatgtttccttttgttctttgaacatatttaaaaactgattttcagtctttgcttggtaaggcctacgtctggacttcttcaaggacaatttccattgactgtttttgtttttctcgtgtatatgggccatcctttttgtttgtttgtttgttttttgtttgagacagaggctccgctgtatcgcccaggctggagcgcattgttgggatctctgctcactgcaacctctgcctcccgggttcaagcaattctcctgcctcagcctcctgagtagctgggattacaggcacccgccatcatgcctggctaattttttttttttctattttttttttttttttgagacagagtctcgctctgtcacccaggctggactgcagtggcgctatcttggctcactgcaagctccgcctcctgggttcatgccattctcctgcctcagcttcccgaatagctgggactacaggtgcccgccaccacgcctggctaattttttgtatttttagtagagatggggtttcaccatgttagctaggatggtctcgatctcctgaccttgtgatccgcccgcctcggcctcccaaagtgctgggattacaggcttgagccactgcacctggccttttttttgtgtttttgtaaagatggggtttcaccatattggccaggctggtgttaaactcctgacctcaggtgatctgcctgccttagcctcccaaagtgctgggattacaggcatgagccaccgtgcccggccatacttttttatttctttgcatgtatatgtcttgtaattgttgaaaactagacattttaaataatataatgtggcagctctggtaatcagatttatcccctcctcaggatttgatattattgctgtttgttgttgttggttagtgacttttctgaactaattctgtaaagtcgttaagtcatttaggtcagtgttgggctgcatttatgatggtggtccatgagattataatatcatatttttactataccttttctctgctcaattagcatagtgatcagctaatgcttggcgaggtttccttagatgcctggaatcaattcgtctctcagtctttgtgccggctctgtgtacatctggggtatgcctgcaactttcagccaggcagctgacaactctgcattagatttcatttcctatttgtataaaacctcaaggtcagcttgaggtgagatcttagatccttctaaagtgttttttgttttttatttttatttttttgagatggagttttgctcttgttgcccaggctggagtgcaatggcacgatctcagttcactgcgattttcgcctcctgggttcaagcaattctcctgcctcagcctcccatggagctgggattacaggcatgcgccaccacacctggctaattttgtatttttagtagagacgaggtttcaccatgttggtcaggctggtctcgaactgctgacctcaagtgatccacctgcctcagcctcccaaagtgctgggattacaggcgtgagccaccatgcccagccccttctaaagtctttcctgagcaaatgcacagccctgggtatgagcacatcctatacatgtacattgggcttgtagataccctggtatattttggagcttttccaattcactgtggacatcttattctctaacttttttttcagcatttttgttagtttattgtggtcaccagctattacttactgcttcggcagccacaatgtgcaacaattgcctgtaaatttttttttgtttttgagataggatctcattccgtcaaccaggctggagtccagtggtgtgatcatggctcactgcagcctcgacctcctgggcttaagcaattttcttgcctcagcctcccgagtatcggggactataggcatgcaccaccatgcccagctaatttttacaaaattattttgtagagacagggtctcaatattttgcccaggctggtctcaaactcctggactcaagagatccacccgcgttggcctcccaaagtgctgggattacaggcgtgagccactgcgcctggcacctctaaatctttttaacagatgctgctggggaaaaggctgttcatactgggcaggctctgagtaaggtcaaataaagacagctttcaggctgggtgcagtggctcacgcctgtaatcccagcactttggggggctgaggcgggtggatcacctgaggtcgggagttcaagacctacctgaccaacatggagaaaccccgtctctactaaaaatacaaaattagctgcctgtggtggcacatgcctgtaatcccagctactcggaaggctgaggcaggagaattgcttgaacccgggaggtggagtttgcagtgagctgagttcacgccattacactccagcctgggcaacaagagcaaaactccgtctcaaataaaaaacaaacaaagaataaaaaaagacagctttcatagtagggtcttctagggaactactggccaggctaaataatgacagttttctgagcatgaagctttgaaggagctccaacctgttctgccccctccagcggctcctaggttgctggtcttcatcgtgattgtgggctgtgggtttctaagactatcatagagctggagagagaagaatggggataggtagggcaaattcaaacacctcaaactcactgtttctacttagctgttttctatgaataaatgctgcgatctttggctaatacacagagttctgaaacaaaagaggtatactttgtttatggatagggagatttgaaggtatagatttcagtttttcccaaaatgaattttaaatttaatgtaatctcaacttttcagtggatgtaaaataagtcaaaatgattctaaaatgtatgtggaaatacaaaggggcaagaataactaaatcattcctaaagaataagaagatgggaggaaactggtcaacctgataaaagaactattataaaattaaagaaagtaagatttccttaataaataaaacaatgaaacaaataaaacaatgaaacctttcataccttatatttaggtatgtctctttaaaaataacatagctaggccgggcgcggtggctcacgcctgtaatcccagcactttgggaggccaaggtgggtggatcatgaggtcaggagattgagaccatcctggctaacacaatgaaactccatctctactaaaaaatacaaaaaattagctgggcatggtggcgggcacctctagtcccagttacttgggaggctgaggcaggagaatggcatgaacccgggaggcggagcttgcagtgagccgagattgcaccactgcactccagcctaggtgacagagcgagactccgtctcaaaaaaaaaaaaaaaaaaaacaaaacaaacaaagaaaaaaacatagctagatttggtatgcaaactgaaaatcttgtcttttgaattgagcgcttacccaacttatttttattatggatttagttattatatatctttctttttttatgtttcctatgtgtctttttctgtatttcccccttatttcttgattttttatgttaatttccccccacattttattggtttctatttgatttctattcttttaatatttactctaaatttttaacatttaatttaacgaaatataaagtgaatctgtatctttttttttttttttttaagatggaatcttgctctgttgcccaggcttgagtgcaatggcgtgatctcaggctcactgcaacctcttcctcctgggttcaagtgattctcctgcctcagcctcccaagtagccgggtttacaggcacccgccaccatgtctggctaatttttgtatttttagtagagacagggtttcaccatgttggccaggctggtctcgaactcctgacctcaggtgatccacctgcctcggcctcccaaagtgctagaattacaggcgtgagcccctgcaccctgctgtgaatctgtatgtttaatttccttctaaacaatatgaaggccttagaacacttaatctctgattacccctcctggattccatgctattgatgtgtccagtgtattagctcttgaatgtttttaactttttattttgaaatatttatggattcacaggatgttattgaagatattattccactttcttcttgcttctattgttgctattgaaaaaccaacctcagtctagtgcctttttagtctgtcttttctctctggctccttttaggaccttctctttgcttttggtgttctgcagtttcactgttagggctactgcgttgcacacctccagggaacacaccatctgtgtggtgtctctgtggatagtgtcctctggagttgtataatctggtaaatagagatgtggatttcttttatgtatccagttcatgattcatcatgctttctatgtatggggatttgtatttttaatcaatttttgaaaatttcttgaataatatactgctttttctttttctccttttccttgtttctttttttttttctttttgagacagagtttctctcttcttgcccaggctggagtgcaatggcacgatctcagcttactgcaacctctgcttcccaggttcaagcgattttcctacctcagcctcccgagtagctgggattacaggtgcctgtccccatgcccagctaatttttgtattattagtagagacagagtttcaccatgttggccaggctggtcttgtactcctgacctcaggtgatcacatgacttggcctcccaaagtgctgggattacaggtgtgagccagcgcacccagcctgcttttctttaaaacaatatttatataaatttatagagtacaagtacaattttcttagatgcatagtggtcaagtgagaggttttaaggtgtcagctgaataatgtacatcgcaccccttaagtaatttctcatcaccaacccccttccatctcctcacccttccaagtctacattttctatcattccactctctacatccacgtgtacacccttttttagcacccacttatgagtgagaacatgcaatatttgtcattctgtgtctggcttgtttcacttaaggtaacctccacttccatccaccttgttgcaaaagataggatttcattcttttttatggttgaatagtattctatctgtgtgtctgtctgtctatctatctcacatttcctttatgcagtcatctgttgatggacacttgggttgattttgtatctttgctattgtgaataagtactgagataaatatacaagtgcaggtatgtttttgatgtattgatttcttttcctttgggaaaagaagtagagggaattgctgcttttgcattgtccatactatgtatatctggaacttagaatagccttatgttagacattttatttcattttctgtttccttcaaccatctttcacgtatcgtatgtctttttctgtcttggctacattcagagttatttcggatttatatttctattaaaatatctctatttcttttattctgttatttgacatgtgcattgcacttttcatttttatcatgtttttatttctagaagtttttattctttttcaaatctatttgaacagttttggtagtcttttgttctttactcatgtttttgtttcactattttaaacatgcaaacatacttatttatgttctgtatttgataattttaatatctgaaatctttatgctcatagtgcttgtgtcttttggaattttttatgtaggtttatttttctttgaactctatgggaattatctgaggcttgggttaagggcttgagttgggttggagtgaagcttttctttcaggtaggagttgtgcgtgcttctaccaggttcctggggcacaacttagcataggactactttaagttaaatttaggcttgaggtttctgggaccatgcaggttgtattaatttggacctttatttatctgaagactggcctgtgtttacttacaaattattaaaagaaacttcatttttctcctccctcagaaccaagaccaagacaccctttttcttgcctattccctttgaagagcagatttatatttaactcagcctttaattttagctatagcccttcctggctttacatgggagctttggttctaactcaccaccttgcagaggcccaaggcttctgtggctgtagaaacacatgctataggttatcagaggcagaagatagctgcccttagggcagcagagagtttcagccttggttactcctttggattcattctcatgtttttagtttggcctctcaggattttacttactctcttgcaagctcaaccataaatttaaaaggattaaaaagtattttttatccaatatttctgttagagtagtttaacatgttttttctgccctaattgctgactaaactttttttttggtacatgtcagaggcaagccgtgactatctaggtatggaaagcatttcttagtgattgatttgtggccattcacaatattgcctaggatctgagtatgtgtatacactcagcctgtatcatgttgaaaattactgtcaatagaacagactaaagtgatctacatgtattaaagaaaactatatattttcaaatttcctaatgtcaataatatccttttgataattcattttaataaaaatagtacaaggtagtttgcaaatgatcaaggaatgttgtaaagaaattgacttttcttcttcagtgtgctttatctagtaactttttttttccagtttaccaagtactggacagaatcaaatggggtggaatctaaatcattaactccagccttatgcagaacacctgcaaataaattaaagaacaaagaaaatgtatatactcctaagtctgctgtaaagaatgaagagtactttatgtttcctgagccaaagactccagttaataagaaccagcataagagagaaatactcactacgccaaatcgttacactacaccctcaaaaggtatttgctaagtgaattaagcagtaagaagtttcatttttcttaccatgttaagtaaacatatagcaggtcagaaatgactagcattgctttcaggaatttctaggagaagtgaagctgttttttatcatgtcatttgcattagttaaaatgaaagcatatttgtcaatttcaatttattctcaaatgataccaagtttttcctctttttcacgtttataaaattgaatcatagcatcctaggatatcaaagctgaaaggcaagttagagctcatttaatccaactccctttttcacagctaagaaacctgagactcagaaggagtgaagtgatttgcccaaggtcatatacccaggtttagacctttcatgcccatttaccccgacttatgactcaagctgacgcctccgctgagcctttacttatctggatctccagttgtggtgtctggtcctgttctgccctatggtattactgcctgtcctcagcaggcagggtgaatccatgatgcccttccagatatctgtctttgtccagttatcacaacttcctcatttcccttggtttcctcttcaatttagtcatgagcagttatttaaaccatttcctttatgatacttcactgttttggttgctggcctcatctggacacattctatttgatcagactgcctcttagaatacagtgcctagaactaaactgagttttctagactaggtctcactagggtagagtggtaagtgtcatgacagtagagactctctgccttgtttattgcagcatggcatggtctgtagtaggggccatacctgtctggtacatagtacacagtactagacctgatgcctagtacataataggggccatatttatgtaatgaattaataaattagagcccaaaggaattttatttacagtgatcctgtttatgtcactttaaaaaatgttacctaaactttattagcctttttccccccaccaattgtgaccttctcaagtttcaagattctaacaaacctaaactctggagcattgccatgtgaactgctgggaaaccacatcctgccattgtgcttctagtgtactaatggagctcatagccagtttgaggggttaacttcttgtctataaagatattacggaagactttgccagaatatttgctagaagtcccatttttatgttaacgtcattttccatttcatcaactcaaataacactttccgccaaaatgtgaggccagtttggtgtcctgatgatgtctgtgtttgtgtgtgtgtgtgtgtgtgtgtgtgtgtgtgtgtgtgtgtgtgtgtgtgtgtgatggtgtgtgtgtgggggggtgcggtggcgctgcctgtggttgttatgagaattcagtgagatagcctctaccctgcaatggtagctgctattgcattctttcccaatgaaagggtctctttctgttctgttgtttctcttactgtaaatacagtaccctttgtgactcatgagattgggcagggagataaaacggacctcagctcaccttagctcattcaacgatcttttttttcccctttttttcttttttttttaatttctttgagttggagtcttgctctgttgcccaggctggagtgcagtggtgcgatctcggctcactgcaacctctgcctcctgggttcaagcgattctcctgcctcagcctccctagtagctgggattacaggcgcctgctaccacgctcagctaattttcgtatttttagtgaagacagggcttcaccatattggtcaggctggtctcaaactcctgacctcaggtgatctgccctcttcagcctcccaaatttctgggattataggcgtgggccattgtgcccggcccagggcttttttatttaaaaaaaattttaatgccataatcccttccattattgacattttttactttttgtgtaactctgaaggttttgcaatatgggtagtttggaatttattttataatcttgaaatattatcagttgacatatgttgtcatgacgagaaagattgtgttggtcaaagctattattggttgtttctttttaaacacgagccacttaaggaagcaagtggctgaagccatgattgttagcttccactggcactttgcatttttctttcttttcttttttctcttctctcctcttctcttctcttttcttcttttttttgagacagagtttcactcttgttgcccaggctggagtgcagtggcatgatcttgcctcactgcaaccttcgcctcccaggttcaagagattctcctgcctcagcctcctgagtagctgggattacaggtgcgcaccaccatgcccggttaattttttgtatttttagtagagatggggtttcaacatgttgggcaggctgctctcgaaactcttgacctcaggtgatccacctgcctcggcctcccaaagtgctgggattacgggggtgagcccaccatgcccagacctgcattttactttcattgtgagttatttttgacataaacataaatttcattttcgtcactcctacacaatgcaggcattggcagtttgttgaagggcagttctgtatggtgatagatactgtctgtatacaaagatgaaaactgtttttataaatatttctgattgctcttattttcttgttcttgtggaaagtgagaatgtagccaaatagtcataaacaaaaccaagcccctaatctcttttaaaattttgatattatatctttgtttttatagtgtgaatattatctctaaagggtataaaacttttagatcatgagctaatcagtataaccagattcgttagtacaaatttgtcataaactatctggaatgcaaataccctacttagaataaaacacaaaattctggaacagggaatataaaaaataatcaaagcttacatctctttttttttccgagatgaagtcttgctctgtctcccaggctggagtgcaatggcgcgatctcggctcactgcaacatctgcctactgggttcaagggattcttctgcctcagcctcccaagtggctgggattacaggcgtgcgccaccacgcccagctaatttttttgtatctttagtagagatggcatttgaccatgttggccaggctggtctcgaactcctgacctcatgatccgccctcctcggcctcccaaggtgctgggattacaggcatgagccactgtgcctggccaaagcttacatctctttaataacttatgtcaagctttcacaggggtctgttctttttgcctaacatgagttgaatcgggctatgaattcaattaacaccttttaatactagatcaattaaaagcataaattgggcccttgtataaatacagattgacttttatttttagaaaaagaatcagtaattatgagatttgtatttatatgatctgtttagatttatcatatgatgtttataataaaattaaaagcatggcctaaatttgcagtgaagaaaaaaaagaagagccacacatacaaagcaaaatgattttgtttttattataaatcacatggaaacatttcttgaaagaattagagccttcgacatcacaggtcaagtgattatactgtttctgagtcaatgaataatgtgatacctgcattattattaataatagaaatttcagaaccatagtatgtgctgcatatggattgtgtttgttctgtttctaatagctagaaaccagtgcctgaaagaaactccaattaaaataccagtaaattcaacaggaacagacaagttaatgacaggtgtcattagccctgagaggcggtaagtgtttggtttttttagactctaatctttagtatatgtaaccagatttcctttttcatgtattaatagacctgattaaggtaaatcatcacatagattctgttggagagtaggaatatctgtttatgtgtggatgacctgtggccattcctggacctgtagccactgccttcctcatggggtagaatcatgaaactgatcagcagtaggacggcaccttaagtacaacaggctgggaagacagtggtcctcaccccagccaactagttacctctctgaggcccatcttacccttctcttctgccagtaaaatacagatatcctctaacagattgtagtcctcccaaatcgtaaagatactgttgtttcaaagaaaatcctctgtatgaaaagttctgcagcataggtaactcttcaagttgctattcttttatagcaatttcttaaaggcattgtctattttcaagacaattggagaattagaatgtggacagggtattagatgatattatggaattattattaatttattgatgaagaaactgaggagatcaggaataaaatgatttatcaaagctatatagtacaaagctggagccagaacccaggtcttctcattcctaatcttatggtttttctcccacagtctggaagtgctggagaactacctagaaagccaactaacaccacagtagtttctattgaaaaatgcattcaggttccaaaatatttacataactgaccatttttagaacattatccgttagtatttggtaactgcttagcttctcaataatgtgtatatatgtggttgaactagtttccttaattttatttaacatttttcagtgcaatggtactatggtttttttaaatctcagtgtcagtgcttgaaatacttaactatctccaaccagaaaaatttcagaacaaaaggataaaatatgcctaataaacagccatatgtaacgtaaacttctcagcacactttatggtgttgtctttatggaagacaacatccttattcattggagatgtatactgaagtgtttcagagtaaagtgtcatgatatgttcagatgagttactttcagatggcttagcaaataagtaaatttaatgtattatctacatacattaaatttatgtgtatatatagatatatacattgatgtatatatatcagtgtatatctatatacatatgtacattaatatattatctatatccaaatagaaagcaaatgtggcaaaatatgaacaattgttgaatctaggaggatataccggtgttcattgtactcttctttgaacttttctatatatatgaaaaaaggatatatatatccttttttaaaaaggaaggggataaatagttttgctgagtggcagttgcctggtagaagtgtgacagctcctgtccagggggagatggctttggtgcttcctgaggaagagagaggtgatctggccctggcatacctgagtgaggcatcctaatgtgtatgaagggacaaaagttcacccttgtggaccccacaggccggaggcccagctctacttgtgccttgttttatgttttgtttcaggtgccgctcagtggaattggatctcaaccaagcacatatggaggagactccaaaaagaaagggagccaaagtgtttgggagccttgaaagggggttggataaggttatcactgtgctcaccaggagcaaaaggaagggttctgccagagacgggcccagaagactaaaggtaagcaggctggaattctttcatatggagcagaagctgactgctaatggactgccttttttttttaaggtgctgaatgaattgattagtgttttttatttgagtatttattcacttagttaatatatgttttttgagcaactaaaatctgcatgttactgtgcagtcagtaaatagatacagtcactcccttcaaggagcaaacagctatcattcaaatattcaagaacaggtggagggattagtcacaggggcaacatggaggtgaggaagcagggggcacagatggagagctgagagctgccttaaggagggggacttgagctcagttgtgtccctgattcatggatactttgtaggccctcatgaaatatttgaatgcatgggaagataattggaactttgagtgtggtgtgtgtcaggaaaatagtgagtgacaagcggggaaggtaggccggaagggcctcaaggcctggctaagaaggtgtggatcttatttaatagacccagtatgctttaaaagggttaatgtgtcactggtgtggacaatatatttagtcaaggaaggaaaggaaaaataagctgttagttgatataaagtactttttattctcttggattctctctgagcattcattcaaacatctgatgaatacatgtttgtttggtggaaggggagtaattaagaggtaaagggacgaatgagacagcccattccttgaggaactcttaggctggctgtgaaaacaggctgggatgttgttctgaaacactgggctcagtgctatagtaaaaacacattccaagaggtgtgggcccaagcaggggagaagatggtagtgtgcccatcatttggggactgggtctatgtttagtttttgcactgagactctcgtaatgagcaaatctgggcggtttgagggaaggaaaatgctgagcttttgggcagaagggtgttttagaggagaatgttctgtgatctcatttctgttctgtcttaaagtggaagaagataggagttatccactagcagtcattaccttgaacttttgtagtgtgctgagacgttacatatggctgtgtattaggcatattttatccttttgttctgaaatttctctggttggagatagttaagtatttcaagcaccgacactgagatttaaaaaaaccatagtaccattgcactgaaaaatgttaaataaaattaaggaaactagttcaaccacatatatacacattattgagaagctaagcagttaccaaatactaacggataatgttctaaaaatggtcagttatgtaaatattttggaacctgaatgcatttttcaatagaaactactgtggtgttagttggctttctaggtagttctccagtacttccagaatgtaggagaaaaaccacaggattgggaatgagaagacctgggttctggctccagctttgtgctgtatagctttgataaatcattttattcctgatctcctcagtgtcttcatttgtaaaatctggaaataatgcctaccctggcaacctcacacggctgagatgtagaaacaagactctacatatgggatgctacatggcatattaaatgctttatgagtataaggtgacatgtttccaatgtcaaggattactatcagtgttgagcattttaccacccatgtatagacccatggtcctaattagcacagtcctaagattgaaaactttaactttagatcattaacactttttaatgcttttaagtttttgcaaaactgaaggactttctttgggaaattaaccttattttttttcacctacttcaaatactgtactaaaaactatacacttaccggaagagttgcaaggatagtagaaataataccttagttttttaagatagcaaatcatatgtagttatgtcctcttttaggaagcagtctataaaaaatccaaaatttaagtagataaattaggattcattctttattttaccaaagcagtaatatattgtgatttgaaggtgttcagtttattattaatatcatcttaacagagccaatttagtttggtgaaaagagtgctggatcaggaaccaagaaagagagggtcccttcgttaacactcagtttcacgacatttgctctatgggtgtattgggtgcactattatttatctggtattttcattatgttgactctcctttaacaaatggatttatagagatataactgacatataataaacttgcacatattttattttattttatttgttgttaattttttgaggcagagtcttgctctgctgcccaggctgtggtgcaatggcatgatcatagctcactgcagcctcaaccttctgggctcaagtcatcctcctgcctcagcttcctgagtagctgggatgcgtgctaccacacttggctaattcttaattttttttgcagagacagggtctcactatgttacccaggctggtcttgaactcctgagcccaagtaatcctcctgccttggcttcccaaagtgctgggattacagtcatgagccactacacccggccaactgtgcatattttaaagtacaattaatatgctttggcattatatataacatctgtgaaaccattgccacaatcaagataattttttaaaactcaaatttatttaaaaggaaacctttatatcattagggtttttttgttgttgttgttaattatgttttcgaaatcagttgggaacaaatacatatttaaaaatatttatccatgtgccacccagaattaccttgtctatcttgtatcacactatgagaagcactaccttaagaaatttgtatctcttctttgggccataggttcttattttgaaaagtaagatagttggatacttttcttcctaggcattttgttatttatacaatgaactcaaacctgaaagatatagaaactatggttttgtttgacagtgaaggtacttaccaggaagggagggatttttgtgtgtccaggacccactaaaacagtgcctaccacatagtaaacattcaaaagtagttgttgaatgaatgaaggataaatatcaattaggaatgaaattatctctgagaattaggctctcagtcaatgagaaaaaataatatgacatcacttttttaaaggaatacctgttacatttatttcctcatagaactgtcataaaatcagctcctggaactctataatattctttaaataatccagaaagagttaaggaaacatatccaactaggtacaaagcaaactttgtatggtgtttgtttatctttccgtggtatacatttcaggactgttaatgtctcttaaaatagtgtgggaaggggaaaataggcaaagctcaaacagttagatgggtgctctttaatatttatttctttaaaaggattggtaggagaggaagatgaaagtatgaaaaggaagctatgggtgtgtttactaataaccataacttctccaagctctcccagtgggccattaactcactaagagttgactgtaaattcctttgatattttttaggaaatagttccatttgaaacagtactatattgaggagttttggaactcttgatctggtgtgatggtctttgtgttgatgtaaaaatttacttctcatctcttctttttcttttcttagcttcactataacgtgactacaactagattagtgaatccagatcaactgttgaatgaaataatgtctattcttccaaagaagcatgttgactttgtacaaaaggggtaagaagcacatttacaagctgttgcatttattagtatcttttggactttgagaaaataggagttggttgggcgcggtggctcacgcctgtaatcccagcactttgggaggctgaggtgggcagatcacttgaggccaagagttcaagttcagcctggccaacatggagaagccctgtctctactgaaaatacaaacaattagctgggcatggtggcacatgcctgtagttccagctacgtgggaggctgaggcatgagaatcacttgaacctgggtggaggctgcaatgagctgagatcacaccactgcactccagcataggtaacagagcgagactctgtctcaaaaaaaagagaaaatagaagttgatctcctcacccctgtgctttagaaaaaatgtatttctcccacctcattcccaaaagcttttgaggtagtgttattgcttataatttattctcttttgtttggttcaagctataaaagttttagaagcacagatattgtcccactttatttcaaaataggaaaattcaaaattcttctggctttcttgtagatcctctattttcctttgattgtctgctttacaataatatttataaattataatctaaatttgtgagacatttcaaatgaatcagggatttatacagaatccttctcttcatgactggctgttttacagggctgggttttcagtgctttaggaagttttttcaccttacctctctcccgctgttgaaggaactgccatcaaagcctccttggttatgatctcctggtctcaatagccaggcctcttctggtcacccaagatggccgtatttctaagcatttccattcaattatttccctttaaaatttctttattaaagcaaccagaagagacatgcatggatttaaacatgtaaatagaatagtcaatatagagtaagatttgaagaaacaatcttgtgcagatataatttttagtttttagttatctgtaaatgttggcaagcattccttctgtgaaccctggcattcctctcaggcttcattagaacacatctctcccactctgatctcttcttcatgcttggggctatgagcctctgggcatacctctgtcacaggtctctcaatgatctattatctaacatgtgactaaattgttctatgcctcatcttcttgtcaagaatcttaacttcagggtgctccttttggcatttttgatgttgactgcttatttttgagagatcaagcctctttcccaaaacacatgactaagttagtaagaaaaagaatattttggtacataacagtatgaaacagaaaaaagtacataactgaaacaatgtaacttctccacacatctgtggaacagcacttaatcaggaacccttaagtatttagggaattgaaacttaaaatcagtcctatttattgaagattggtaagacaaacaaaactctaaaatagaatgtaaactaattaaatattattacatgaattaaatttatacagctttgcaggatcatacgtatgtcttaagatgtgtttcaggcttcattttgactgggcctttccattctcagagtagataatgcggcagttctatctataaatgccgtacgtttcagttatgggaatataccatttccttgggctttttcttctgcttttctttctgccataaagtgatgtgatgatcgtcataagaggttatctctcattactaattagaaaaacctcaaaaacacacgtgcctttctgacaggttactggcttcagctttatttatatgaaagacaagtttctgacaaggctcacacacatgaaatattatctttcttgcgctttcctttgttgtgaatgttgtggaaatgcccaatgtttgcggattacacgttgaaaggattgcataaagaatgccagatttcttgagcatgaatggcatgtatagctatgaaacaggggcttttctttggagcaagggagacttgtaataaagccttttcatgcttattcttaggatcctagttcagtttctgggaaaacaccagtcatactctattactaaagcatagctaggtcatttggaaactgtaaacagtaatacattgcttaatatgaaataatggttcatttcctccactggcctcctagaggcttagaaaactcttatacagaatatggttctcctactaactagcttcttatcttgtttttcacagttatacactgaagtgtcaaacacagtcagattttgggaaagtgacaatgcaatttgaattagaagtgtgccagcttcaaaaacccgatgtggtgggtatcaggaggcagcggcttaagggcgatgcctgggtttacaaaagattagtggaagacatcctatctagctgcaaggtataattgatggattcttccatcctgccggatgagtgtgggtgtgatacagcctacataaagactgttatgatcgctttgattttaaagttcattggaactaccaacttgtttctaaagagctatcttaagaccaatatctctttgtttttaaacaaaagatattattttgtgtatgaatctaaatcaagcccatctgtcattatgttactgtcttttttaatcatgtggttttgtatattaataattgttgactttcttagattcacttccatatgtgaatgtaagctcttaactatgtctctttgtaatgtgtaatttctttctgaaataaaaccatttgtgaatatagcaggcttctcttttttgtatttgattttgatccaaataaaacctcaaatggcttcctgactattaagtagagactatttggagtatgttttatctgttatcaaatatgccttgggcagaaaaacagataagaattcatttgcataattttttcctgtctgatttaagtaggatttattgagatcgttaactgtcacagctgtggttaccagagttaaacaacacatttaatatgttgaataaaagagtattgactttaagtatgtttggtcaacaaatgataagtatccgaactatgaaccccccctgaaatgttactttatggtaatttccctaagtctcaatgttggccccaaatttgtatttttatttcattttattggtctccaaaggctagaactcaagttatattggtatggatttcaccaattaaactagttggagaaaaaatagcactccttctggtcagtagtgaagggaatgttttgtcattcatttattcaataaatgtttactaagtgcttacaagcattaggtcctcaggctgaagctgctactgtctagtaaacccaaggatttactaactgtatttgtagcatagcgggacccacccactttgcatggaattagaaatgaattcttggaagaaacagcatttgtcattgaaggatatataggagttcagcagaaagagaagagtgaggagtatgactttttttctttctttctttcttttttttttgagacgcagtctcactctgtcacccaggctggagtgcagtagcgtgatctcagctcactgcagcctcgacctcctgggctcaagcagtcttcccggttcagcctcccaagtagctggtactacaagcgtgcgccaccacacccagcaaatttttttactttttgtacagacagggtctcactatgctgcccaggctgatctcaaaactcttgatctcaagcagtcctcccacttcagccctccagagtgctgggattacaggcatgagccaccaccccagcttgggacatgacatttttgagagaacaatatgtgcaaagacagggaattataaaatgtcattatgtgtttggggtagaagcagaaggtagtggaagcgggaaatgacagtagatgaggattgaaagtttagatggaaataagtcatgaaagtacttgaatgccccattaaaataagtgttttggcaaaggagagctgtcaaagggtttttaatattttaacaacagctttgttacgatgtaattcatatatcataagatttacccctttaaagtgtgtacaattcagtgggggtttaagagtgtattcaggtcgggcgccatggcttatccctgtaatctcagcactttgagaggccgaggtgggtggatcacctgaggtcaggagtttgagaccagcctggccaacatggtgaaaccccgtctctactaagaacacaaaaaagtagctaggtatggtggcatgtggctgtaatcccacctacttgggaggcagagacaggagaatcacttgaatctgagaggtggaagttgcagtgagccgagattgtgccactgcactccagcctgggtgacagagtgaaactccatctcaaaaaaataaataaaataaaagtatattcatagttgtgcaaccatcaccacaatgtaattttagaacatttttatcatgtcaaaaagaagccccatacctgttaccggtcactccccataccccaccccccagcccctggccaccacttacctactttctgtttctatgaatttgactggtgtatgtcatataaatggaatcatgcaatgtaagacctttggggtttagttatttttacgtagcataacattttcaagatttataatgtagcatatatcagtacttcatttgataactgaataatattccactgtatggatatgtgacattttatttatcacttgatagacgtttggattgtttccacttggctattatgaatgctgctgtgaatgcttatatacaagttttgtgtggacatgttttcatttctcttgtatatatacctaggagcagaattgctgggtcatttaacattttgaggaactatcaaactgtttttccaaagccactgcaccattttatgatcctgccagtgatgtacgagggttctaacttttccacattctgtcaaacacttgttatctgtttttttaattttagtcatcctagtgggtgtaaagtggtatggcattgtggttttgattgtcttttccgtgatgattaatgatgtagagcagtttttaatatgcttttggccatttgtatatctttcttggagaaatgtctgttcagatcctttgcacattttaaattgggttatgtttttattgttgaattgtaagagttctttatatattctaggtatgtctgttaccagctatatgataatatatataatatatgatatgcaaatgttttttccattatgtgggctttttaactttcttgatagtgtattttgaagaacaaaagttttcaattttctgaagtccaatttacctatttttataaaatatagaggtatgattaatcttctatccctatgggaagtggcgtggtttgaaacaatgattctcaaaagtttttgaccctagccacagcaagaaacaagtacacatgatggaagcacttgtagtgtgttagtagtatctatctcatttgcttttaatttacgtttccctaatgactttgggatccatcacatataaacatatatgaagcactgcttagccttactgtaagtgacaacatattctattttctcttataaacatctagtctgacaattgtaatctttaaattagagttctttagcacatttactttaaaatccttttgggggatcaggtttattgagatataatttacatatggtggaatttaccctttttagatgtacactttgatgagttttgatgaatatatgtagttgtgtaactaccaccatagttgagattagaatgtttccatcaccctaaaaagtttcatcttgctcttttatattataggcaatcctttcttctcccaggcccttgcaatcactgataggacttccatctctatagttttgttttttttccagagtattatataggtggaatcgtttactacatgggagttgggtataacttcttttcatttagcatgatgattttgagacttatccatgtggttgtctatattagtagctcattttttattgttgaataatagtttgaataatattgttgacagtagtcaattggatataccaaaatgtgtttattcaccagttgaaggacttttgagtttttacttttgggcttttatgctgctgtaatcatccgtgtgcaggttttgatgtatgcatgtgttttctttttttttttttttttttgagacggagtcttgctctgtcacccatactggagtgcagtggcgcaatctcggctcactgcaagctccgcctcctgggttcacgccattctcctgcctcagcctcccgagtagctgggactacaggcgcctgccaccacgcccagctaatttttttttatttttagtagagacggggtttcactgtgttagccaggatggtctcgatctcctgacctcgtgatccacccgcctcggcctcccaaagtgctgggattacaggcgtgagccactgcgcccggccatgtgttttcatttcacttaggtaactatccaggaatggaattaatggatcctgtggtcagtgtgtttgtagaaggaactaccaacagttattagcacatatgagaggtttttttgtttgttttgttttctttttgagacggattctccctctgttgcccaggctgcagttcagtggcgcgatctgggctcactgcaaccttcgcctcctgggttcaagtgattctcctccctcagcatcccaagtagctgggactacaggcacgtgccaccacacccagctaatttttgcatttttagtagaggcagggtttcatcatgttggccaggctggtctcaaactcctgatctcaagtaatctgcccactttggcctcccaaagtgctggcattacaggaatggagccaccgcgcccagcctgatttctttttttaggtcatgtcaggaaagatattgattcttttgattcgtgaacatggtttttggtcgtctttaatttgtctcatcagtgcctccatgtgtttttgatgcctttgaactggtatttttaaaatttcaatttctaattgttcattatagaaacacaattgggttttatatattggcattgtattttgcaactttcctaaactcactagtaattctagtagctttttttggtagattcttaaggattttctgtgtaaatagtcatgtcatttgtgaataaagccatttttttttccttttcaaattttgtgccttttatttcttattcttaccatatcacattggcaaagacctccagtatgatattgaataaaagtggtgagagaaaacattcctgccttgttcatgattttatggggaaagaataattcttttaccattaggtatgatgttaactgggtttttcatagatgtttgccatcagttcaatgaagagcccttcttttcctagtttgtttagatttttgttcatgaatgaatgctgaattttgtcatatcctttttctgtatcaagacgattacatgggttttctcttaaatttgtttatatagtgaattacaaccaatttatttttaatataattatatagttgaatttacagctaccattttactatttgtttttcttttaatccacccattttatactcatctttctctccttgccttcctttagttcaaatactttatattattttattattcaccatctattaacatgttatacatttgtttgctcccttgttagtggccatactagattttaatatgcatgttagtttattatagtctaccatagcattttccaaacaaagcaaacattttccaatagtttaaatacattactcctttctgcaatttgcattattgttgtctgcattttaaatttcaaaagacattgcagttactgtgttttacaattagtattcatttagatttacccacttcattgcccttgatttcttcctgcatttctatgtttttatcttgggtcttttttttgctaaacttggcataaagaacccccttttatatgcgttttagtgcaggtctgctggtggtaaattctcattttgtttgaagacatttttattttactttcatgttaaaaagattttccccctaggaatagaattccagatgggcaagtttgctttcctgcctgttctttcagcattttaaagatgtcattgcattgtcttctggtttcaatcatttcttttgagaaatcagctgtcagtttcattgttgcttctttgaaggtaatgtttcttttcctctggctgcttaaaaaattatttttatttgtttttgattttgactttgactttgatgtacatttttttgtttgttttgttttctggaatttatgccggttggagttagttgagagacttgaatctttatgtagatgtcttaccagttttgaaaaattctctactgttatctcttcaaatactgcttctgctctagtctttccttctgaggctccacttacatgtaagttaaaccttttccttgtgtctcacatacttttattcccttttgtatgttttccactctttgtgtgcttcagtttacttactaacatgtcttctagctcattaactttgtcttcttgttgtgtgtaatctgcagtcatacttatgtattgattgtttttatttttttaatggagtctttctagacactgaaaaagattatttcttttttaaaattgtaaacattttgatttttgaaatgtttttaagagatggattttcactatgttgcccaggctggtctttaatcctgggctcaatgagttaaatccagctaaccatttttggctgcagggctcaagtgatcctcctgcttcagcctcttaagtagctgggattgcaggtgtgcaccactgcacctggcttatattgattcgtcagtgtagctattgtgtttttaactttaaaatttttatttgattaaaacataattctccagtgcaatttttcttcttttcgtctcttcattttgtcttgttttcttggacataaatctcagcaatttttaaaatgtccttgtctaataaaactctagtttcagaatcacctgtgggtaaatttttattgtatattttttccctttgtttttcaacacgtttcttagaatgtctagtaatttttattgaatgctagatactgtgtattaaaaactgttaaagcttcagatgatatcttcctcaaggagaattcagtgtttctctgtcatgcagagagggtcaagggtgatcaaattaattccatcagtactgaactgatgttttcagttgaaccagggctttcaactgagagcctgctgtatttaccaagatccatgctcccaacaggtcctgaaagatatctaagttttgcgtcctcaacactacaagattgtggaaaactgctttggttagtttttggtttaatcttttacttccagctttgcacagcttcagaatgtcttggggagactgactatgtgtttgaggctccccaagtctccagttttgttactgtagccctgtacaaacatacaaagctctgctgtttctctgatccttggcagtgcccctctgtctggataaagcctggggtcacctctctgcaggtctctcctctccagattttggttattcatcctcattgcttcagcagctccctgatgcttttgaacactttttaattttttatttctttaataatttttatttcagtagtttttggggtacaggtggtttttggttacatggatatgttctctagtggtgatttctgagattttggtgcacctgttacccaaacagtgtatactgcaccaaatgtgtagtctcttatccctcacctacctcccaccctgccccctgagtccccaaagttcattatatcattctggtgcttttgcatcttcatatcttagctcccacttacaagtgagaacatgtatttggttttccattcctgagttactttatttagaataatggtctccagctccatccaggttgctgcaaaagacatttcattcctttttgtggctgagtagtattccgtggtgtatatataccacattttctttatccactggttggttgatgggcacttatgttggttccgtatctttgcaattgcaaattgtgctactataaacgtgtgtgcatgtgtctttttcatatgacttcttttcctttaggtagatgcccggtgggattgccgaatcaaatggtagttccacttttagttcttcaatgaatgtccatactgttttccatagtagtttgaacaaacatattttaatccttttttttctaggtctttgcaggagtgttaatctgccacaaactattctattctactttgagggagaagtctattttattcttaaatatgcagattaaagcttactcagtttatttcatgacacattgactagttgcaacctgcagtttatgaaatgcataaaggataaatgtgtgagacaaatccaggagatgggtagaattatcagattttaggaagtgtttagttgtcaaaggggaaggagatggtggaatgaagaatgcgctgatttttctgactcagacatccaggtggataggcaagccatttaccaagatggagtgataaaacaggagaaagatctattttagagaattgagattaagtttacttttgtacacattgagtttgagatacctatatgacatccaagtggaaatttctgatatgcagaaagaatcacttatttggaacccaagagagagatgggagctggagctgtgactttgttgctcattagtagataggtagaagttttcacaccaattttgtacattttttagttaatcacatcaattcagctgacaaatgctattttactacccatcaggctggatcaagtaaaaacaggtactctgctagttaggctaaacattttctttctttctttctttttttttttttttttctttttcttagacagagtctctgtcacccaggctggagtgcagtggtgcgatctcggctcactgcaacctccacctcccggattcaagcaattctcatgcctcagcctccagagtagctgggattacaggtgcacaccaccatgtctggctaatttttgtatttttttttttttagtagagatggggtttcaccatgttggccaggctggtctcgaactgacctcaggtgatccccctgcctcggcctcccaaagtgctgggattataggtgtgagccaccacacccggcctaaatcttttctttaaggaaaataaaacatcagtggttgccatatcatctaaaagctaccatttagttctaattctatagaaccactaggaaaattaaaggaatgtagacatgagttaggcaaatgaggccggactagttcccgagaggcaaatatgatcaggttgctggcactaaactaaatctgcagagtggtaagtcggcctcatcatccactggccagccacacctaggcttctttgtagggcatttaggaatcttacatccagaggaaggcagtatgaagagatgataagggaacttatggttgaagaaattaagtgtttggaacctgagaaaactcagggcattaccctcaaacatctaaatgactgtcacgtgtgggagattatgagacttgttttagcaggctgtattggggttctctagagggacagaactagtacgagagagatatatatatctcctatttattaagtattaagtttattatttattaagtatttaagtttattaagtattaacttttaattattaacttaattaactcaattaagtattgagtttattaagcattaactcacacaatcacaaggtcctacaataggctgtctgcaggctgaggagcaaggacagtcagtctgagtccccaaactgaagaacttgggagtctgatgttcaagggcaggaagcatccagcacgggagaaagaggtacgctgggaggctaggccagtgtagtcttttcatgtttttctgcctgctttatattccagccaccctggcagctgattagatggtgcccacccagattaagtgtgggtctgcctttcctaacccactgtctcaaatgttaatatcctttggcaacaccctcacagacacacccaggatcaatactttgtgtctgtcaatccaatcaagctgacagtcagtattaaccatcacacaggctaagtaagtccagtgagaagttggaggtagaggttgcatcttactcatctttgtgtttccagcatgtagtagagtctggaacacatcagaggctcagcagatgctcataaagttgaatcacattgaacttgagctaacactaaaaagctttcagagacactcaaaactacctgacaagagacagggctgcttatacagtggtttccttgttgttggagttgttcagacattggacaaccattcatgggatgttgtcatagaagggatttaagtattgaactaaatcccattgtcttaaaagcttcctttaaccttagcatctgtgatccagtaacaatatggaagataatggatcaattatttgggtgtttgttggccgtaatagggagcaataaaataatgatcacagcagcgatcatatattgagcacccactatgtgccagacactatgctgaaaaatttatatcaaggattggcaaacttggcctgtgggccagcctgtggcttctttttgtgatgttttattggaacatagtcttactcacattgtctgtggctgctttggtgctacagtggcagaattgagtagttttgacagagactgatgactctgtcatcagtataaagtattttactatttgaacctttacagaaaaagtttgctgacccctgatttaggtaaatataacaactctgcatattatacatattaactcattaatctttacgttaactctgtaaggtagatggtgtccctttttacagaagaggaagctcaagctcagggaggcaaagtaataactctcaaggtcaaataacttataagtggtttggattggaaccaggtgtggcaggctccaaagtccatgttctttcttatactagaaatagaaggtctacctctctcctgaaattgtaccatatatgaaagcatgattatatatgatatttattaagacattgcctttttatagcagcaatcttacacaaactgttgaagtataggaaaacttcaccagttcagaccagattactgtgtatttactacagttgagagttatgtgattcttatttgttaaagtaacaagttcagagtgttttcctctgaataagaatagagtctactaagaaaataatcaaaagactttcagcttctaggttcctctgtaatttcatgcattttgaagaactttctgttgttttgtaatatagggcctacagcattatataattttaaaaaatcctattctttgcaatgatttataatgcaaatatttattaataattgtgagactaatctctttacaaactagtgagattttgtgatagtcttaaaaaatgatgtaatttgtttatctgaattaatttatttaggttgtcccataagcttcctgaaaaaaaaaatatttttccaattctttccatcttctccaaagaggattacaggtgtgagctactgagtccatccctgatgatttattaataattatcattgactttgagatatgtatacatacatttgaataaagatatatcctgggacccttcttcaaacaaatagtgaagccgcactgaagagcagatttagcagagaatagcagaaagcaccgcacaaggagtctgaagacttagcttctagttctgactcccacttactatctataaaatctcagatatctacaatctctttagtagagcttacctctttcttaaccatctattttctcatcttcataatgaaataataataatatttatcctgtcaaataagatagtaggtacaatgatcttttagaaaccacgaagataaaaatgatcaagacatctggatatcaggtggtggtattaatagttttgttgttgtgagtttatttgtgttacacaacagatctggggtgcctgttgccaagtgtgggggcagagccaactgcaataaatgtggagtgtgcctctctagactgtggtacagatacagatgcgacttcactgctcttttcctaggtagatggactctagctggggctttttctggctagcccaatactcatccagcaggctctacatcaggatttggggtgaaccttggcagagatttagcttgtttctgagttaaaggaactgaaagaagctgtgggaaaggtatgggagactctggaaaagggattgaaaaaatgaaggtactatgatattaagtcctatgttcattggtattcccagagtgttgggtattgttttgaactgtaaggtgttgtgaggcacctttctttggacagtaagtttattgtaagaactatctttcacagaattcctgttcattaccatggcaaaatctcctgcccccactgccacgtctaacagtatttggagtaatcaaagagtaagcaagagcctgaaggttaatgtattaaaatgatgtgattcagtgcctttgatgtttgactttgtaatgcggcatctggagcacatactataagcaggagggtgaggtgatggcgacggttaacatgcaagtgtgaactgctgaaccctgagaaggtctgtctattctggcatcagtggagatacagatcctcagaacccaggcgacttgatgatgttgttggaaaaatggtaagaagctaaggaaactgcgaataaaatggattagacaggaaaatgagactggaacacagagaatctaggatagtggagattggaagggcctcagaataaggacctggaagaaagagcacaagcctgctctaggaaaaccttgtggccaggtggtggctacacagacatctggttcaaccagaagtcaaaaggcagagtatctcgtattcaaacagaggatccagcaccatcaactgttcagagtgcttctttatcagtcttggatcttcagataaactacagcgagaagccttacccctatgcaggagggcctaggggaagagttcatgcccctgacgggtgaatggtttgaggtatctggaaggtctggtctgggctttaacctggtgcttgctaaaggtggggtccatacctcaaaactgtcatctctagaaatgagtttgattataagggtctggagggaggagaggagcatgttgaggggtgaaagaattcaacagttacttggatgccgtcctcaacccttggatgatcagctattacctgaaagcgttaaagtaacaggaggatcacttgactgtcggtgaatctttcccttagtcctgtactttttgtgccttgggagctgtctgccccgggactgatgtttgaggagtatggagacacagagtggcagggtgaggagaacaaaatgtcaaaattgggtgtaatgctggtttctcacttatcagacacatgacccagaggaagttgctttatccctctaattgctttagtttcatctatatgaaactaatgcctgtgagacagtagttttgtaaagaagaaattagaatgtctagaaatgtcctgtaaatgacctgaattaatgtatatgagtcatagaactttgcacaaaatggatgtttttaaaaatgccctgggagttggcttaacatctaaaaataagttaatgtaatgcaccactttaagagaataagagacaaaaaaccctacatgatcatttcaatagatgtggaaaagaattgacagagtccaacacccttctgtaataaaaataattaacaaactaagaataggagggaacttcctcagcctgaaaacccaaagttaggaccatacttcacggtgaaagattggatgctttcactctatgatcaagtacaatgcaaggatgtctgctcctgccacttctcttcaacattgtactagaagatctagccagggcaattaagctagaaaaagaaatgaaagtcatccatattggaaagaagaagtgaaactatctctatttgcagatgacatgatcttgtatatataaaacactaaggaatacacacatacaaaaacaaactattagaactaataagttcaacaaagctgtgggatataaggtcaatatataaaaatgaattttgtttctatacactaacactgaagaatctgaaaatgaaatttaaaaaacaacaattaagaaagaaaaatacttaggaaaaaagtgtaacacacgtacagtgaaaactacaaaacatcattgaaagaaataagacctaaatggaaagacatcccatgttcatggattggaaaacataatgttgttaagatggcagtgctatccaacctgatccaacagattcaatgcaatccctatcacaatttcagctgtgtgttgtagttgtttttacagaaattgacaagctgattctaaaattaatatgaaaatgcaaagacccacaataaccaaaacaatcttgaaaaggaacaaagttggaggccttacacttctcaatttcaaaatttactacaaagctacaataatcaagatggtgtggtactggcatgaggatatacatataagatcaagagaataaaattgagagtccaaaaataaacacattataattgtattatttttctagttctctcataataaccagaaatttagtggctggagacacagatttattatcttacagttctgtaggtcagaggtctatcacaagtcccaccaggccaaaattaaggcactgacagggctgcattcctttctgtagactctgggtagaatacattttcttgcctttttcaacttctagaagcagcctacattctttgactcattgttcccttcctctattttcaaagttaagagaggcaagtcaagttgttctcacatcacatcactctgactttttctgtagtcacattccctctgactctgaattcttctgtctctctgtttcacttttagtgatgcttatgattacattgggctcatccagatactgcaggattattttcctatattaaggtgggctaaatggcaaccttgattccatctgcaactttaattctcctttgacatgtaacatattacatctgtagattccacgaattaggatgttgtgtgtgtgtagggggtcacattgttctgattattacaatggccagttgcgttttgacaaagatgccacgacaagtcaatagggaaagaatagtcttttcaataaatggtgctagaacgactagatatacacatgtaaaaaaaatgaagttggattccctacctcataccacatataaaaactcaaaatggatcagggacctaaatgtaagaactaaaatgataaaaattcttagaagaaaatgtaggagtaaatgtgaccttgggttaggcaatagttccttagatatgctaccaaaagcacaagcaacaaaagaaaaaagttacatattggacttcaccaaaattaaaaagactttttgcttcaaaggacaccatcaagaaagtgaaaagacaacctacagaatgggagaaaatatttgcgagaactcgtatccatttgcaaaaagacttgtatccaaaatataaaagaattcttaaaactcaacaataagaaaacccaatttaaaaatgggcaaaaggtctgaacagatgcctcaccaaagaagatatacagatggcaaataaacatatgacaagatgaaacatcatttgtcattagagaattttaaatgaagagataccactacacaccgattagaatggctaaaatacatacacacacacacacacacacaccaaacaaataccaaatgctgacaagaatgtggagaagcaggaactctctttcactgctagcagaaacaccaactgttatatccactttggaagacagtttgacagtttcttacaaaattaaacataatcttaccatataacccagtaattaagctcctaggtctttactcaattggtttgaaaatttaagtccactcaaaaacctgcatatgaatgcttagagtggcaatttataattgctaaaaattggaagcaaccaaatgtccttcaataggtgaatggataaacaaattgtacatttatacaaaggaaaattattcagcagtaaaaagaaatgggctatcaagccataaaaagacacagagtaaacttaaatgtatatttctaagtgaaagaaatcagtctgaaaatactacctactgaatgattccaattatttgacattatgaaaaaggcaaaactatataaagacattaaaaagattcgtggttggcccagtgcagtggctcatgcctgtaatcccagcatttagggaggctgaggcaggtggatcatttgaggtcaggagtttgagaccagcctggccaacatggtgaaactccgtctctactaaaaatacaaaacttagctgggcttggtggcagacacctgtaattgcagctactcaggaggctgaggcaggagaattgcttgaacccatgaagcggaggttacagtgagcctagattgtaccattgcactccagcctgagtaacagactgagactctgtctcaaaaaaaaaaaaaaaaaaaaaaaaaaaaagatttgttgttgccaatggtagtaggggggcagggggagggtgttgaataggtgataggtgaagcatagaggatttttagatggtaaaactatttcctatgatactataatggtggatgcatgacaattgttcacaattggatggtgaatacttgcaaggtgaattctttcaccgtgttggcaaagctggtctggaactcctgacctcaggtgattcacctgcctttgcctcccaaactgctgggattatgggcatgagccactccacctggcctccttctccttttccttcttctcctcctcctcctcctcccgctctccgtccttctcctacccctctccttcctcctcctcctccttttcttatccttctccttctcctcctcctcctcctttctcctccttctcctcctcctcctcctttgagatggggtcttgctatgttgccccatgattagctatttgacccaataccatttattgaatattaatttaatttcttcctcctcctcctcctcctcctcctctgagatagggtcttgctatattgccaaggcagatcttgcactcctgggctcaagtgatcctcttgcctcagcctttcaaatagctgggactacaggtgcatgtcacggcacccagcttattcattcttggctcacttctaacttcatttagctcatttatccagtcaacattcattaaatttgaacttcatacttgttgctaggtggtatatggaaaagtaaatatgtattatcctgccatcaagttgcttagggccttagtgaaaagcacaccgggtgccaccaagatgcatacaagtttacacataagattttttggtgggtcctttctacacaattttctctgtaagccacctgtttctcatagcatatgagagaaaggtctggcatatgacctcttattcctactgtgaggcacagtagaattctcgaagaccagctgtggtgttgaatcactgcctatgaggctgtgcacattagtgggaaaagcactagattttggaactcaggcacttggactccagacctggaacaccttgggtaaggcactgcttatttgcaggtttgtttctgtacacgtgcaaacacacacacacctaatttagggttcctgatagctgacatcacaaatgacatcagggcttgatgtgtaatttggaaaggtggagagtttacctatgtaacaaacctgcacaggtacccctgaccctaaaataaaagttaaaaaaaagtttcagcaaggtaaatagctccagcggggtagctacaaatagttccctgtgtgatgtaaaaatactcaaaatacacattccttcccaagatgctctggcctgaacagcacatctcttctacattgaggtgtccattctgctcacctgcttggtgtcctaaattctcaccctcatttggacaatctctctggaaaacttcagtcattcccttgatggagaagaagaacttcatagaagcataatccaaatggtcaaacatacagtgtatagcaaaagatgtaattttaggctgggtgtggtggcttacgcctataatgccagcactttgggaggctgaggccggtggatcacctgaggtcaggagttcgagaccagcctgaccaaaatggcgaaacctactaaaaacacaaaaattagccaggcgtgatggcaggtgcttataatcccatccactcgggaggctgaggcaggagaatagcttgaacccagggggcagaggttgcagtgagccaagatggcgccattgcactccagcctgggtgacaagagtgaaactccatctcaaaaaaaaaaaaaaaaaagaaagatgtaatttcataggagactttcaaagaagtttggtgggccaggcatgctagctcacacctgtaatcccagccctttgggaggccaaggcaggcagatcacttgagcccaggagttcgagaccacagtgaccaacgtggcgaaatcccatctctataaaaaaatacaagaattagccggacatggtggcgtgtccctgtaatccctgctactcaggagcctgaggtgggaggatcacctcagcctgatgaggtcaaggctgcagtgagccgtgattgtgccactgcactccagcctgggtgacagaggagatcctgtctcaaaaaagaaaagaaaaagtttgatggctaacaggaaacttctcacatttgtcctgaatgacataaaccagaggccaaaggtgagagtggtgtacttcagtatttcagtgttagaggtgctaaaaagagctttggggaaggggccatctctcagcatttaatatttttatttaatttttgcattttaatgtatgcttaatgttaaatttgattttgttttgggctagataatagaattagaaagcattgatttgcagaatttcagagcccaaggggccctttagatcaaagtctacttcccttctcctcaccccttctcctgtccctgccatgtccttaactaagaggaggatctttttttagagagagagagatgaaaagaaatcacaggggacaagtccagggtgacaagatccaccatccatcacagctcctaactacaaacagttggagcctttctctttactctgtgagttttttttaattaaccttttttcatttttcctactttagaatttcacattatagtcctttgttcattctcctcttttctcttgataatgaaaatggatataatatgaacttaaactcacttgccctgggtcattgccagtgcttaataaaagtgtattagtatttgtagtaatgataataacccacagataatgatgtcgctaaagaccaaagggtccccttgcatgagaagcccccccttctagtcgccttgctttgccggatttaacggagaccttgactgcttctgatagtcattgtcccttctaaattatcaaggtttcatgaagacaagcattcttcacttaagggttttccagactgtctgatgtgctgggctctgtataaccttgttcctatgtcatcatatgtcatgctgcctcttggaaattgttccctgatgtttgcgaaaatgaactacttacagaaattccctttgtacacacacacacacacacacacacacacacacaccactattggaaatggttacagtcagataagtgggtcagggttgtgaggggatttgaagctgtgttgtgaggagtggtgaaaatagtggaggtggccaggctttgcagggagagactgaggaggagatgggacaggcgtcttcaaaaataggaagatgtgtgcaagaggaatttggcctcttctgggtagacccatatagtattaaaaagaccaaatgcatgggtataataagtctagtttggctcgatagaaggcagactttctttttagctgtctgggaaggaaagatgcttgccctggaagtggcaagttctccgtccctggagtgctcacgcagaagcatcagagtccctccactgggactgctgaggaggggttataaggattaggtggtgttggaactaaattacttggggtcaccttcaaaccctgagaggcaataattctatgaggtccttgacttgagaatctaggacctggattttaggttgtagagtggaaggagtttcttgatagaaagttcaagcgtaggatcaggctttaggaaggagaaattaagccctgaccaatggctcagcatctcccgtggccctattccaatatatgactaggtctaagccttaggcaaactgcagctagacccagcctttgtaaaccatggccctaaaaagtaggtgaagaagttgaagagaaatgagaaaagaaacagtaagtcatcaaagccaagagtggagacctttgaaggagggataattggaagtactggatgctgcagaggacaaagagtctagggaatgagaagagggccttggatatgtcaaggaggagccaggggcagtttctagaatgtggtaggggcagaagcttggcctcaggaagacaagagaatggtggggatgtggagacaagaagctcagaccacatgctcatgaatttggctgcaagaataatagggtagaggctagaccagtaagacctatgaatatcaaaggcagaagggaatgaggatgaaggtgaggagaaattgcttcacattgtagacagaaagtatgttaggtagaggagagaggacttcagtacagtatttacagttgtaaagttctttccaggtccatgatgcagtttgttcttttagatagtgcattagtccattttcacactgctatacagaactacctgagactgggtaatttataaagagggggcttaattgactcacagatctgcatggctggggaggcctcaggaaagttacaatcatggcagaagatgaaggggaagcaaagcacatcttccatggtggcaggagagaaagagagtgggagtgccacacttttaaaacatcagatctcatgagaactcactcactatcatgagaacagcatgggggaaatcgcccccatgatccaattacctcccaccaggtccctccctcaacatgtgggaattacaatttgagatgagatttgggtgaggacacagagccaaaccatatcattctgccctttgcccctccaaaatctcacgtctttcttacatttcaaaacacaatgataccttcccaacagtcccccaaactcttaactaatttcagcattaacccaaaagttcaagtccaaagtctcatctgagacaagggaagtctcttctgcctataagcctgtaaaatcaaaagcaagttagttgcttctgagatacaatgggagtgcaaacattgggtaaatgctcgcattccaaatgggagaaattggccaaaacaaaggggctacaggccccatgcaagtccaaaacccaacagggcagtcattaaatcttaaatatccaaaattctctcctttgactccatgtctcacatccaggacacactgatgcaagaggtgggctcccaaggccttgggcagatccacccctgtggctctgcagggtacagcccctgcggctgatttcacatgctggcattgagtgcctgaggcttttccagttgcatggtgcaagctttcagtggatctaccattctagggtctggaggatggtggtcctcttctcacagctccactaggtagtacccccgtggggactctgtgtgggggctccaacccatatttcccctctgcattgccctagtagaggttccccatgagggctccactgctgcagcagacttctgcctagacatccaggcatttccatacatcctctgaaatctaggcagaggttcccaaaccttaactattatcttctgcacacccacaggcctaacaccacgtggaagctgccaaggcttggggcttggaccctgtgaagcagctgcctaagctgtactttggccccttttagccatggctggaactggagtggctcgaacacagggcaccatgttctgaggctgcacagagcagcggggccctggcccagcacaggaaaccatttttccctcctaggcctccaggcctgtgataaaaggggctgccatgaagatctgagcagcccctcccatcacaggagaagtttccctggagaaaatgccctggagatgttttccccattgtcttggttattaacatttggctccttgttactcatgcaaatttctgcagcaggcttgactttcttccctagaaaatgggtttttcttttctaccacatggttaggctgcaaattttcaaaacttttaccctctacttcccttttaaacataagttccaacttcagaccatctctttgtgaatgcatacgactgtacattttcagaaaaagccaggtcacatcttgaatgctttgctgcttagaagtttcttctgccagataccctaaatcatctctctcaagttcaaagttccacaggtctctagggcaggggcaaaatgccattactgtctttgctaaagcataggtgtgacttttgctccagttcccaataagttactcatctccatctgagaccgcctcagcctggactttattgtccatatcactatcagcatgttggccaaaaccattcaacaagtctctaggaagttccaaactttcccccatcttcctgtcttcttctgagccttccaaactcttccaacctctgcctggtacccagttccaaagtcaattccatattttcaagtattgttatagcagtgccctacttctggtaccaattttctgtatgagtccgttttcacactgctataaagaactacctgagactgagtaatttataaagaaaagaggttcaattgactcacagttctgcatggctggtgagacctcaggaaacttacaatcatggcagaacgtgaagggaagcaaggaacgtcttatgtggtggcaggaggaaggtgggggcaagtgccacacttttaaagtatcagatcttgtgagaactcccttactatcatgagaacagcataggggaaatttgccccccatgattcaatcacttcccaccagatccctcccttgacacatggggattaaaatttgggatgagatttgggtggggacacagagtgaaaccatatcagatagtaccctgcagcctttgggtatcagatgcacagacaggcatctgtttcagatgggacttgttttaaaggtaaggtgagaaatctctaggttttagggtgatcttagagtgtggctgtgcaggaaatgctcagaggtggaatctccaagggcacctttgacttacttgctgactccgtgatcactgtttctcttcacagcctgactctgctgaccgcctcttccatctgcatggctgcctgcctttgattttaccctcttcagattttcccaccattcctaccacatctctcagtctgctcttcagctttttcctctgccttccccttgattccaggctcttactttgacccccttctcttcatactcttcacatttctctggatgatcccggcatctcaatggcttctgttgggtcccaaatctgtatctctggcccagacctctctcctgagtcccaagtccctgtgtgcacaattccatttggatgttccatagtcacctaaaaggcaacatttctagagtcaaactactatccccccaaatctactttctgcatagtctccattttcagggtgatatacatcccaggtttcctgggatggtctcagttgaagcctgttgttcccagcataattattaataattctctcttttactccaaaagtgtcctggtttgtatgatacattgtacggtcactccatccattttggacaatggcatgaccacccattcaaagctcatgccggaaacttcatgtttatcctaaacgccctcttgcttccctcccacattctatactgtttgtctcattcctgtaggctctgagcccctggaggggaggggcagtgtcttgttcactctgatgttccccgtgccaagcatagtcttgcctaagaagatgctcagtagatgctgaataaagggcaagaagatggagttaactgatggaatgagaagccatggaaaattagagggaagggtggtcctgtggcctaacttctcatcctgcagatgaggaaattgaggcctagggtggaaaatgaacttgacccaggtcaatgccagagtcagtattagaccccaggtctccagtaacctctccatggctcttgtgtaggtggtttaagtcttcttcattaagtacagggacagctcagcagtcagttcttattaggcccttgtgtgtatgtgcgtgtgtgcgtgcatgtgtgtgtgtgtgtgtgtgtgtgtctcctgggggttttgtgtgtgccacagaggggaagaatagatgtcctttcttccaacaatgttcaaaggagctgagcaaacctttcaaggcttatataagagacattccaccattttcttttttttttttttttttctgaatcaaggtctcactttatcacccaggctagagtgcagtggcgcgaacacagctcactgcagccttgacttcctgagctcaagtgatcctcccaccttagcctcccaagtagctgggactacaggcacgtgccaccacaccccactaatttttgtattattattattattatttttagagacgaggtcttgctatgttgcccagactggtctcaaactcctgagctcaagagatctgcccatgttggcctcacaaaatgctgggattacaggtgttagccaccatgcctggcctccatcagttttctcttggagatatttttatcttcttagcattgccagaaggattaaaacaaaatctgatctcacagtttctcaggtattgtttttttctgatgttgctgttgtttttaaactaaaagtcagacgccatgaaacatcctcagcgtggcaggtaagtgggaggctatgatataatttattgttcagtcctgacatttgtgttggtggacacaaggaggctatttgactgctttagtagaattctccctgccttcttttagttcgtttccgattcttctcttaggctggtcttggctaataaataatttgattttgaaaaatatctttcccttttctgaaccttgtattctgagttcataaaatgagtaggttagaccatacacttcccagctgcttccagcccacaattctgtcatattaagttcctctccccattgcttggagaagacttagacatcatatccacaggttgagaacccctaatccccaaaccccaaatgctcccaaatctgaaactttttgagctccaaaataatgctcaagggaagtcctcatcggaacatttcagatttcagatttttggattagggatgctcaaccggtatgatgcaaatatttccaaatctgaaaaaatttgaaacacttcttgtcccaagcagtttgagtaagggatactaaacctgtaccatatatatctctaatctctctctctccacatatatatatatactattacatctgtgcttctgctttgttcttggccagaacgaatatctctcctttccttactcttgatacttaaattcatcatttcttaaatgtctaatcctctttcttttctaaacactctaataagcttattatttcaaccatttatatttaacattaaagtttaatcatgaagttgttaaccatagaaaattattaaataagtgagtttggaatgagcgtggaacagctgaaaaaatgagtgaatatttcaaaatgagcactttggaaaagaaatttatgcatagaaaacaatggagaattacaattaagagctctggggatctcaaactgatttgtccagctattacacagtcatttcaatttaaattaaaattgtaactattttctagtctactaaaaatatgaggtgtcacattaagagttttaatggtgcgttctctggggaatgcaaaaatgcaagactgtagcacataaataactctatattgaagagtggataaattctctgccaaaagtgaatatgataaaaacagaaatgacagtggattattttattccctctagtgaagcgcagcccacacattagagccaaaaaacagttcacagggtgtctaattccatatcactttgtcggaggttatgaaaagagcaacacaaaaaagtttagctggttgacgaattcaggcataaatgaggccatatattttgttcccaaagtaaaatattttttagctacagagagtaggttgatgttaatatttgatatccttgattcatagaaaattggattagtcaaggttttaaccactgtagaacacgtttaaggcaatcacacttcaggaggagaaaaaaaaaaaagtcaaaagcaggaggtgtgacttccaggaatagaatagtaggataaacactggtgtgtgtgtaggggtgtgtgcgtgtgtgtgtgtgtgtgtgtgtgtgtgtggtcatgtatgctagaatggttggtaagggtaggtggaagttctgatgatgggacacagaaaatttggaattttattgtaatacaagtgaattaagatgaaagcatcgagacatccaggtaaaagcatctggacatctggagaaaggaaagagttaattgaagaaccaggaacaagagagttattataactaagcttgacagagtttcctgggagccaaaataaaaaaggaaataagtgggtttcataattcttgttgtcatgtcaatatttgcctacttctaagctcttggagaaatttgttgtttagagcaatggttctcaaactttagaatgatctgggaagtttaaaaaattcggatgcatgagccccatccccagaaattgtttaatttgtctagggtggggcatgtacatttatgtatttgaaagactcctcaggtgggtgtgaggcacagccaggcctgtggctcagtggttttatggacaacgaattagtaattgctgttctgcagaagatgcagaaactcttaatatagccaattatcatattgattcttaatacaagaagagtattgatttgtatttcagtggaggtatttctaaaacaattcaaattcaggtttcctgccacaggaaattacaggcatctgtactttcagcaatccattcctgaaaatcagacattttctataaaaatgctgactggagcctattttccattatttcagatgggaataaaatacaatgtcatatgtcaacccaaaacctttaaccaaattttcctaaaaatataattacagcataatcaaatgcctttatatatgttataaactatcacattacaatggaaaaattacaacatcccttctagcattaaatgatcagttgggttgtcaacagatttttgtgtgcagtgacaatgtctcttttagtgccagccccatctgagatgtgacgttcaaaattgtgcatgtcgattctgacagtctactaatcggagttggaatataaggagaattttttcagtcattgttttgttcataatgtcacagtgaggtgtggtggtttttttttttaagatggattctcactttgtcgcacaggctggagtgcaatggcacgatcttggctgactgcaacttccacctaccaggttcaagcgattctcctgcctcagcctcccgagtagcttggattacaggcgcctgccaccgtgcccggctaatttttgtatttttagtagagacagggtttcaccatcttggccaggctggtcttgaactcctgacctcatgatccacctgcctcagcctcccaaactgctgggattacaggcgtgagccaccacacccggccgatatgtggtttttttgtagattcagggtgtacacatgcaggttagttacatggaggtattgtataacactgaggtttgggcttctaatgatcttgtcacctaagtagtgaacgtagtacctgataggtagtttttcaaactttgccttcctccttacctccctgcttttgaaatcccttgtatttattgttcccatctttatgtccatgtgcatccaatgtttagctcccacccataagtgagaacatgtgatatttggttttctgtttctgcattaatttgcttaggataatggcctccagctgcatccatgttactgcaaaggacatgattttgttctttctatggctgcatagtgttccatagtgtatatgcaccacagtttctttatccaatccactgctgataggcacctggattgattccatgtctctgctattgtgtggataatgctacaataaacatatgagtgcaagtgtctttttggtagaagcatttattttcctttgggcatgaacccagtaaatgggactgctgcgtcaaacggtaactctatttttagctctttgagaaatctacagtgagtttttgaagtcataaatataaatttcccctttttgaatatttgctgaaataatatattgaaaggtacatacattctatgaaatttaaactaagatgcattctaccaagaaaatgttacacagaaagacattctgtattttaaaacttcaagatgcatgaccatggttgagagttgaattagtaaggatgttcttcgggctgcagtaatagaacattctcgttaaagtgggtattcatagccagaaatcaatccagagctgctgttaagtccagcagcctaacaatacaaccaaaggctaatgccattcccacctgctttatgttttaccacattcgtggcgttggtgatgtctccgctcatggtcacaggatggctgcagtagctcagagcaccacatctgctgtcaacagagtccaaaagcagaaagggagggagtttgtatttttctgttttcatgctgctgataaagacttacttgagactgggtaattcatagagataaagagatttcatggactcacagttccacatggctgggaaggcctcacaattatggcagaaggcaaaaggcatgtcttacatagtggcagacaagagagaatgagagccaaatgaaaggggtttccccttataaaaccatcagattggctgggtgcagtggctcacacctgtaatcccagcactttgggaagccgaggtgggtggatcacatgaggttaggagttcaagaccagcctagccaacatggcgaaaccctgtctctactaaaaatacaaaaaaatagccgggcatggtggcgggcacctgtaatcccagctactcgggaggctgaggcaggagaattacctgaacctgggaggtggaggttgcactgagcctacatcgtaccattgcactccagccaagtgaaactccgtctcaaaaacaaaaacaaacccatcaggtctcatgagacttattcactacaatgagaacagtatgggagaaactgcccccatgcttcaattatctctcaccgagtccctcccacaacatgggggaattatgggagctacaattcaagatgagatttgggtggggacacagccaaacagtatcagaactcatcctataagcctctccttatatcgggagcaaggtttgtctttctcacaagccttcaagcaaaattctgacatgtccctagcagaaatgggtttcatggccatccacagctataaagaaggctggaaagtagttactgtgcatctataacctctatcatcatgcaaggaagatggaggagaagataggccagtggaaaggtctacagagtccatgctctatcatttatgagctatgtgttcttggctaggtatcttaccttccataagttgatagggttttccaacagagcacttttgcctgcatttgaagatatcacttttaaatgcttgacttgattgagaaagagaatatctttggagattctcagggcaccatggcatataaaaatctctaacaagttttgcagtaaaaagaacagtttaactgtgttaagtgcagtgtttccaaaatgtatttgactacacaaccttttttttttaaaaaattggaaacttgttaatatgctgtggacccaatgttctatggagttcttccagaaacacagctgtgttagattgaaatttcttgaagatggcagctccatctttaagttttcaggagtctcagtagagtttccaactaactgctactccttcaatcataggttcaatctctcttcctctgggaagacctctcctccatccaaacagggtcaatatcctgtcctgaccttggtttggtctgtatcctgtccacgtgtatcctttctatcctgtcctcttttttcataacaccataactgcaataaattattgagtataactataactatatgtcatctatcttgccagatagactgtaaactccctgacggcaagggtaatgtctggttcactgctttgtctccagtgtctaccacagtggctagcatatagtaggtgctcaatacatatttttgaatgaatgtctcacacgtgatggactatagaaatatttgtgtaatggacacattttgttttgttccctagcaccaaaccatcttcttctaggattacccgctaatcccctattttatctatatggtggggtgtttcccactagtaattggtccaggagtggttatttgggacagtaagctgtctcctagggcttttaaaatttgggatagaaggaagcttagatttctttcttctcagtgaatagaaacattaagaggcaaagctcaggcaccattggtcaccatatttctttatctttgaaccagagaactagagaaggcagagagagagagtgagagagagagaggatataaatatccagccagaaaagggaaatgaagagagtgtcctggcaaagtctgtacccctgggttttgcactgggaccctgccatattcctgttcatgggttccacgagcttctcttttatccttataataactctgtcttccgccaggtacggtagctcacacctgtaatcacagcactttgggaggctgaggcggggtagatcacttgaggtcaggagtttgagactagcctgaccaacatgatggaacccccatctctactaaaaatacaaaattagctgggcatggtggtgcatgcctgtaatcccagctactcaggaggctgagaaaggataattgcttgaacccgggaggcggaggttgcagtgagccgagattgcaccattgcactccagccaggacagcaagagtgaaactccgtctcaaaacaaaacaaaacaaaacaaaactccatctatctcattcaagctcattcgagttggtttcctgctacctgtgaatcctaagtaacacaatttgctaaatgaattaattatttggcataagtcagatgggaaaagaaagagaacgtagggtccttgcattcaccattgtgtataaagcagtgagcagagggactgcgttgaattcaaacttggtgaaccaggactcaagcagagcaagccaaattcaagaagaggaaacattcaatctatttatgtacacggtggttttgggggtcaaatgggttaagaagcatgcatgtgcttaaaaactgaaatacaaaaaatttttacaataaacccaaatagacattcttggaggaaaaaagactactaaaatcccaaaccacaggcattaccaagaacctgatggccaacattctgtagctgtcatcgtcccctcgaatgcccagacctcttctgccttccccacgaagagcactcagccccacgctgccaaagcacctggcccatctgcattctgcaggtgtgttcaaagtcattcagcttcttgtttcttgtttgccctacctgaagacactcaggctgtgtgaaggacaccagcaggccactgtagggtgactcttatgattgaataatgcatgaactcagcagtggccgggtgggagcctccccaagtgggtggtgggttgaggacagggtctggcctccatctgtggggacctggctttccagccgtgggatctttcagattgatggctcagtccatatggaagaagtacctttagtatgttttcttaaatgtttcttagctgggctggaaggcagtttggattgacaaattagacaatcgtgcttaacagtttcacaggatgctcatgtcccgttaatctcataggggcctcactatagctctggtgatacagggatcatggttgttatctatcatctgttgacagggaaactgagaccctaagaacatatgacttgcccatgagaagattaatcttctgggttgacttaaaaataatactcctagattaactgaattcacaagatgttctgttcttaaggcaagttggaatttaagaattatttctctagaaaaagtttggtattcttggccaggcgcagtggctcacacctgtaatcccagtactttgggaggccgaggcgggtggatcacctgaggtcaagagttcgagaccagcttggccaacatggcgaaaccccatctctactaaaaatacaaaaattagccaggcatggtggcaggcgcttgtaattccagctacttgggagactgaggttagagaatcacttgaacccgggaggtggaggttgcagtgagccaagatcatgtcactgcactccagcctgggtgacagagcaagactctgtctaaaaaaaaaaaaaaagagagagaaagtgtgatattctaatttccaaacctgtctgaaccaaaataaactagaaagattttaaaaaagacaaaatgctggaatccatttctatagattctgatttaacccggggcaaggtctgggaatctgtattcctagaaatttccccaggggttcctgaggagttgtaagatgtggaaaccactgttggattgaaggaaggcctggtgtgggggtcaggctgcctgcatccggtcttggcatcaccaccaactcctggggcctcactttctccattcatacaataaagagactggtttagaatagatgatctcaaaaaaatctctgcaaatccttacattctatatgatcttttaaaagttgcccatacagggctgggctttgcagagctctggtccctaaaggctctagaacaaagagaaccttgataaaagtgtcggagctgatgttgttggttgtattctcaacatctgttctctcttccccccacctaataaaattccagttttgtgctgatatcccttcctctcccatgcagtcatgtgcttgggaggaaatggacgtgcctttattatataagccaatcagaataattccattttcccagtcgtggtgcttgatcatgggcatgtgacacatttctggccaaagaaaattgagggaaggtttgttaggggcttctgggaaaggagggtcctcgctgttctggagagcttctggaagtgacactctctctatcaatggatgtaaacagggaagccgacagccctgattctcttggcagccatcttgcaaccagctttctgatgcagctcactgttgactgcagtgcagaatgatagcccatcagtcaggatgattcccattggctgcttaacaaacaaaccccaaatctcaatgccttacaacagggtttattacttgatcttgtaaaccccaactaggagtctggaaaaaaacttgcacgaggttctagtgaatggtgttcccccaagactaatatgctcaagttctaatccccagagcttcagaaagtgaggtattggagatacggtctttaaaggggtgattaagttagtatgaggccattagggtaggccctgatccagtctgactggtgtccttctaagaagaggaaattatgacacacaaagagacaccagggacatacacacacagaggaaaagactctgaggacaaagcgagaaggtagccatgtgcaagacaaggcaaaaccaaactgcagacgttttgatctttgggcttctaccctccaggccactagggaagaaatgtgttatttaaaccacacagtctgtggtattttgttatggcagccctggcaaccgaacacgtggtaatttagggcattaccttcctccagatgggtggttctgcaatccccttggaccttggggtcctctggatctggttggcagatgagggaaggcacaatggagacgtgcgtgtgggtggtctctgcacaccaggcttggaggtgatgcccttgtaccaacattctattagttagaactgagtcacatggccacatctacctgcaagggaggctggtgctctggaaggtgtgtgctctggaaaaagaggaaatcggttagtgagtatcctatttccaacagacagagaaagctcttgaatatttgatggcaaggctgaccctccaaatccatctacccaggagtctgctgtacttctgacttccagttatgggatccaatcaatgtcctcattgcagaggccagcttgggctgctgttcccgttcattacagctgaacacatcttaactgatgcaggtgccagctttctctttcctcctcctccccgctggccagaattgctttcatggcaacattgcaggactaggagatgagttaggggcagggctttcgctcggagtgaaaagcagacgttgtcattctaggtaaagaggatctgggcccttctctcctgatgaagtcgtgggacagagagtggtgtcctgtaagatgattcttaaatctgatattataaggccaaacacatagaacttaattgaccaatttaaaaccttatcttctatacctgtatatctctcttctacaaatcccaatatctggcatgtcatagttaacaaatatttgtaaaatgaatgaacaaatgaataaatgaaggctttccttgactgctttcaaccccatcttccacctcatctttattttttcattttttattttattattttattttttgagacaaggtctcgctctgccgccccaggctggagtgcaatggtgtgatctcagctcactgcaacctccacctcctggattcgagcgattctcctgcctcagccactggagtagctgggattacaggcatgtgccaccaccacgcctagctaattttttgtgtttttagtagagatggggtttcaccatgttggccaggctgtcttgaactcctggcctcaagtgatctgcccgcctcagcctcccaaagtgctgggattacaggcgtgaggcactgtacccagcccacctcctcttctattcctccccttcacatgtcctccactcctgccaaatgggttatgtgtgtcctgctcactagggtctttatctttgtctacattctttcctctgcttggagagcctttcctctgtctctttctggcccaatcttgcctgttctcaccccagcgaaggggcctgcttttcatgaacagtgccagagccttcctaccacgctccatctctccttccccatctctgcctcttccctctcctacgccacttgggcagttctgcaggctcttgtggttctttgtgctctttctgcatgtgtctgtttcctgtagtagaatgaaaactccttgagggcaggcatggccagattccccacacatcctacagcctaggaccttgttctttgcagaggagggctcagtgactgcttcttggaattgaaagaagcaggtggactgacatacctcatcctgtagaaaataaccaaatagcctgagctgctgaatgcaatgtttgccatttgagcagatgattccaaatgtcttgcctgctctccttttcctattaatttttttttactgtggtaaaaagtatataacatagaatttgtggttttaaccatttttaaatatacaatttaatggcattaagtacattcacaaagttgtacaaccattatctttgtctgtttccagaactttaaaatcttttcctacagaaactctatattcatcaaatgatgacttcccattctcccctcctcccagctcctggtaaccaccaccccaccttctgtctctatgactttgacaactctagatgcctcatgtaagtggaatcatgcagtatttgttcttttgtgtctgacttattttacttagaataatgttttcaaggttcacccatgtggtagcatatatcagaatttccttcctttttaaggctgtatagtattccagtgtacgtatatactacattttgttcatccatttgtccatttgtacacacttgggttgtgtccgccttttggatattgtgaagaatgctgctataaacactggcatacaagtatctgtttgagtcctgctttcaattcttttgggtaaacacctaggagtggaattgctggatcatacggtaagtcttctgaacttcttagggaagtgccatactgttttccatagcagcgacaccatttcacattcccaccatccctttcctatttttaggccagaattcatcctctgccacagctctccagaatctcccattcatctacactccccaaacagccaccctgtgtacaaagcggatgcgcctgtcccacttattagagaaaagaagttgcattaatagtttaaagtgtggtgttatagctggctctggcagcaggtgattgatggcttccattacaccccattagatattttattcttgttaaatgaagagcagccaactttgtcaagtatttttagttccctctggtcttattggtccgatctattcttcaggatggcctgtaaatggccacatatggctgcgtgtctgcaggacggatggccgtgcagctggtgttcattggccaccaatttaccccggcccccttcattgtgagcctgacagcgccgggaagccttgtagatctaaccaaatatatctattttctaattgtctatttatcaccttctggggatttgtgggcctcccatctgaaggcaaaggggggatggccttgaacaatgatccttgtcaaggctctcgctcgctctaaattagggcctagttgctaaataactaatttagtcctgctatcaagctgaaaaagtgggtattcagcgcaaagtgccagctggggaattgattatgtcttctctcagcgagtgtgataaacctgctgccgagccactgcggaaggccggagacggctccccgggggcggcggcatttcataacggagaattggcagaggggccaggttcactccctgcgtggcagctgaagtctggggcaccaggtctgcccgccacggcgcccatgggagtcttccctcacggcacccccctggttggtggcttctgcttagagctgtggggacgtgcgcatctgtcagagaaggggacgaaggtgagaaccggggaggggagaggaaggtcatcctgacagccccaatttccaattagagtgagattattgaaggtggcccaggctcagggtgggggaagtggcaggaaataaatgggaataggaggtacttaggaaaatgtattagtaacaactcccagattctgagcagagaaggaggggtagctgaaaatagagagttaaggtttactgcttgagaaatctaatcatgacaacaacaacccttatttactcagccctcccctccaccaggcaccgggccagccacctccagacccgggatctcctggaatcctctcaatatccaggcagattggggtttccaccccaatttgtacttggagaaaaggaatttcagaaacttcacctaatcaactcgtctaaggctgaactctgcctggaaatatcttcctcactcaaaatcttttaatgcctccatcattcctttgttcaactgattttcatcacatgctcttctgaatgctaagggctggggcagtgaattgggcagacaaggccctgccttcatggacctggtgttctagtgggggaggcagaccaagccagtggttctcaacacagttggaccctgtggagaaataaaaggaaagaaatttttaaaaatatggatttcaatatgcaaatgtttggtcgtaactacatgagaaagcacggtgaagaactcaggcatttacacttatttatattgagtgtttgaatgtaagaagaaagataatatcctacggaatgttgatgacattttctctttatctttgacattttgaaataagggctaaaaaaagtacattggtaaatatacttagaattgccttcaatgtgacagacacagatgcagaccgatagagggagagaatcagtgactcaaataccatggtatttcttcattttctgaaatgacaaaactctgagttgaaggaagtaaaataatcttaaaaaaaaaaaaaaaagaaaaagaaaaactgagccaggcagggtggcatgcacctgtagatccactactcaggaggttgaaacaggaggatcactagaggctaggagtttaagatcagcatggacagcatagcaagacccgtctctagaaaacaaaacagaacgaaactaaaaaactaaatgttggttacattcctggaaaagtcagtgtaaattgaacacaatccatgccttgcaggatgtctagtatcccagtcgccctctccctcccaatcactgtaacagccaaaatacaactgaacaaacaagaaaataatgacacagtgactacaatgatcaaaacaaaactggctgacaggattgagagaagacaaggggctacagtgcattgagaagtcaaagtttctgaattgtgttacgtggtccatttaaacccagatgctcctggggaggaaaagacataagcatcctttggagtattcatttctccatgataaaaaaaaggaaagtcaggaatctggttggtttggaagcccagaagacttggattggatgctgctctaccagctaccaggtgaccttgggcaacccactttttctttgtgagcctcagttttctcatctgtcaaatgaggagagtgattattacattgttttccctttaagttaataagaaatccaaagcgatgggaacaagtgctttaatcaccataaaattcaaagtggactttgtatttgtaatgggaaaaatgaaaactcaaaagcctccaacaaagggagtggtttttaaaaagcatggcacaaccaattctactgaacattatgtaatcattaaaatgatgtgaaataatagttaatgccatagaaagatgttcatggagtgttaggtcagaaaagcaagttgcaaaataatatggaaaatatgaacgtatgattgtaaccaaaagagtgaacaaatgaaacaccagccaacaacacagaaagaattagaagaatttataccaaaaaaataactgaagtcatctctgggaattagagttgattgtagtggtttttgctcctctgtaaaatgaactgtatcttgtttataataagagaaacaagccatggacataatttttaagatgcttgtcccatgctgacacccttgctatagtcactggcgctgtgtctcggtgggtggctagtttagaactaaagcttatcttctttcttgcaattttgcatgtgcaaagataaacagtgtggtcacttgctgtccagggaaagctgtgtcctcccaaggagagattggttctctttgtatattacattcttgtattagtctgttttcacactgctataaagaaatacctgagactgggtaatttataaacaaaagaggtttaactgactcacagttctgtatggctggggaggcctcaggaaacttgcaatcatgacggaaggggaagaaggcatatcttacatggtggcaggtgagagagagagagagaatgtgaaggaagaactgttaaacacttataaaaccatcagatcgcatgagaactcactcactattatgagaacagcgtgggggaaactgcccccatgatcccttcacctcctctcaggtccctccctcaactcctcgggattacaattcagattacaattcaagatgagatttgggtggggacacagagccaaaccatatcagttctctaccctcagcatatgggtcacctggctccaggttcttactggcagtgtgtaagatatactggtttctgggctaagaactattattttaatccacatgacaccctatgaggcaggcattatcatcccaattttataggcacaaaagtgaagcccagaaggattaaatgacttgctactgatcatgtgtcttctaagtagaagaacaaagatttaaactgggatgtctaactccaaagctagctctgagtcactgggcaaaagtttgtaaccaccagggagactaattattggctgggttttcatgtctctataaatgctgttgaaaaatatctagagctttaatctcctcatggctaaatgcacataaacacccacctcacggcctggctgggagacttagcagggtggcagcagagaagccttggtgcactgtttgtacagacgttgcaccaggtcaacgtggcttcctttccctggctggggactgggtagggattacagcccttaccactgggctctctctctgcccaaactggaatccagtacatggataggtcagtcaggagagattccaatgaaggacactgaggaccctcaagggcagccctccataaacctcaacctgggagaggggctcttgaatttagccaaagacttcaactttcaacttcatccactcacccattatgtcccaaaaaagagggatttaccttccattcacgtccttaccaaatccctcctgttacagaccttactctcaatcacttaattttgacccacaaagcactatttgggaacagtgtattagtccaaagtaacttcaatcgatcctatgtttcaaatgcttataaaggtcacttaccggagcaaaaatggagatgaaaacacgaagcatagatttagtcatttttccttatgattgcaagtgttggatgttgtaaacaagccttttaacgatccctttaaaaaacaatacactaagtggttcgtttgcagagctcgtgaatagcgaatgggtacttggggctaggagtatcatttccagtgacagcatcatccacgatgcaaaacgtcctgtatcttaaatgacttagatggaagtgaagatgatgtgctccggaaagctgtgctagatgattcgagaagtggcttttagtgatgacaaggatactaatgtcaaagatgtacatgaggagtgaatacaattggttcatgaattaaatgtgaacatggaaaaaaagcaatgtttctaaatatacttgtgattagccaaagagtttatattcgtattttaacttctgtttaacacattaatttatgactacattggtgtgttaacgtatttcatgtgagtgaatttaaatgtatgtataactgaaattttaaattaattaaatattttaagtagaactttgattatctcatctatatttttaaaagtttatacatgcaagttgatcaaaagctttgttctggacctttccattgggaaaaggcagatctctctatgcttggggttgtcacatggttaggcatgtttactgtaggcctactatgtaccaggtgtggtactagctgcacagtgagggagcctgggtgaaggggaaaccagctcaaaccaccacctgggtctcctggggcttgtgtgggaagaggcctgattgaaccccttcgtttgcctgacagggagattgctggggcctaaagggaggtaagcacttgcccaaggttacacagaagaaaacccaagttcttcagcaaggaaaagaatgacagcaaacttccaggcatatctggtctggtagccaaagaccatctttctcagatagcaatgtctctacctctgagcctgagcagggtctaaagagaagcaaagaacaaacacatccaaaagagaatatgttttttttttctgtgcagaggatgcctccagttgctggggtaggctagtgttgaaaatggagttgacaacatcaagtggggctaaccatttttgctcaatgcagcctaaaacaattttgaaaatctatgtcccttcttgaacatttaaattgatgtttagaatattttataacaatttaaaataattataaaggaagtaatgtctggcatataataaatatagacattgtgagataaaactcttgcatttctgttttaaatgtgtccaataaaatacagagatcataacaatttgatacccacagtcatccttttaaaaaatacacgaatgagatcttatttaacagtaggaaattgtatttccaatccacttcccccacagaattttatcctaatgtaatgtatttttatgcttgaaagtcttttattgattttcctatcatacttctccacaacaaaaagatgtatataaattgaactttttatttcctatgaatgcaagcctctaagtattaaaaattcttttggattgagttatcatttcaactattagtaatacaaacttgattaaaataagatggatgtactgcaaattttaatgaataattattaaacagttaaattttgttgagaatgtttctcttaataatatggatgggatcagaatcttgtcatacagccaggaaggctgtgcactacaaaactccagaaagtcattcacatcggctatgatgtaaatagcaacccctggagtattgcagtggacaacctgcactgctgtttgtggaggccctggatttggggagtcgtggttataatgattaaaggtgacattgagaacaacatttgtggaatcgtccctttatttgaccccaaaagttttgactcaacaggacaatgcacagtaataagattcagtgtgaaaaagacataaagtacaaagaggagtctctttgtaccataaaagaaggtgattacggatggggaggtgggagtagaaaactggcatgatgtttctaccacaggcagatcagttttaggaaagagttgatatggaggttgagaactaggaaattaattcctttaaagttatctgtgctaggaatcccttggaaagtataggaccgtgaacctctggaaccactccacatccaggtgacagcgatggttgagctttccgcggtgctgactggaccgaaggcttcccaccattaattagccagagcctctgccccttggtcttggcgggctctctcagccgagaccccaaatccacagagcccaccacaaagcccgaccctaattgagggcctggtagataccacaccccagactaaggaagagcataatactagtgccctcttgtttagaagtaattgccaagcaatagtctcagcattttactaaactcatttaatcctccctgaaaaacataagataggtactattataaccattctgcagatgacgaaacagaggccagcagatattaaataacttgcccaaagtcaaacaagtgtatgtggagaaggaggcttccaaaccaagcctgggtcagcttagctctgaagcttgagccactttctatctcaccacgtccctttaaaacaggatggagaggcggggcgcggtggctcacgcctgtaatcccagcactttgggaggccaaggctggcagatcacgaggtcaagagatcgagaccatcctggccaacatggtgaaacctcatctctactaaaaatacaaaaattagctgggcgtggtggtgcatgcctatagtcgtaactactcaggaggctgaggcaggagaatcgcttgaacctgggaggcggaggttgcagtgaatctagatcacaccactgcactccagcctggtgacatagtgagactctgtctcgaaacaaaacaaaatgaaacaaacaaaacaggattgagaatgaagctactgtatttatgggcctactacgagccaggtactttgcacatcgtcaaatttaaatcccactcaaggctgggcatggtggcttatgcctgtaatcccagcactttgggaggctaaggcaggcagatcccctgaggtcgggagttcaagaccagcctggccaacatggcgaaaaatcgtctctacaaaaaaatacaaaattaggcctggcgtggtggcttatgcctgtaatcgcagcactttgggaggccgaggcaggtggattacctgaggtcaggagtttgaaaccagcctggccaacatggtgaaaccttgtctctactaaaagtacaaaaattagctgggcatggtggcgcatgcctgtagtcccagctactcgggaggctgaggcaggagaattgcttgaacccgggaggtggaggctgcagtgagccgagatcatcccactgcactccaacctgggtggcaaagcaagactctgtctcaaaaaaaaaaaaaaaaaaaaaattagccaggcgtggtggcgtgtgcctgtaatcctagctacttgggaggccgcggcaggagaatcacttgaacctgggagggggaggttgcagtgagctgagatggcactgctgcattccagcctgggcaatagagcaaggctccatctcaataaataagtaaataaataaataaataaatcccactacaattctggaaggtaaatcctatgatcttcttgttacagatgaggaaaatgaagcccagggtggtaaggagtagaactggagtttgaccctgggtccatccatcaccaaagagaagcctctctcccctccagccctccaggaactccaagcccatgactgagcacagtccagtaccctttactacaagtcctttggtagatgctatcctgggtttccttaggaagaataggcatataaaggcaataaagctactgctggaaaatttggcctttcagtccatttggcccggcgccatatttcacacaactatttcatttcaagaatgctctgggccctggccatctgccaggtactcagctaggtgctgcgaaaggcattggggatgaagaaaaggcggcccctgacctcagttgctgccacttgacatacaggcacatgtaatattccagaaagacactggtcaacatggagccatggacgttagaggaaggaggtatggatcctgatgagagaatggagaaggagccatgagcatgccagaatctgaactaggaggtcgctgtttagttgatttagtcaaaacaggcagtttaatctgaaggatctaaagaactgtgaccatgtgttcttagcaggggcatgcactgcctgagcctgtctagacctctgctgattgggcaagtcctaggtcatgtctattcagagcttgaagcttaatagtttattgggcaataaactatactttagagtctaaagtatggcaactgtcgctaaaaacagcccagagaaaatggaaacacaacttcccttgatccacatgtggcattcatgcagcataaggacccgtacccacttagctgtgtggtcttgggcaagtcactcaccctccctggacctgaggtttctcatctatagaaaaagggcatggaagggatgatttctcagggactttatacttccaaagtcctgtgcttcaaatgccacagtaaatttagaagatttgtggagctgcagcccatctgatattctccccaacttgaccttttcttaaattcatttcattaattctcttattcataagaatgcattttcatttcatgcttcctatgtttagtgctttctcctgatgatgcttctcttccccggtataattttttgttccattaatttccaaggaccattttgccagatcagagtgttaagaatcattcacacctcttccatttgtctaaccaaccgctcatccatttctctccagaaataattgtatatggttcaataagtttattgttcaaatctgtttacacttcaggatgcatctcatcaggatttgctgtaaagggtggaagccagcttccaatgatcattattatatctatttctccaagtttttcaaatattcattttcttcatcctcaggagctgctttttcctctgtttatttttctttcatagtgaaggcagacttttctttaaaagcacccattcttttagatatttattggcctctgtttctctgactcagctgggtgggatgctgggatttttctgtttccagcatgactctatcttgattctgaaaagttccctatgaagggctcactgggcctttgtgactctatcaggttgtggacccagtgggcaggggacatctgagaaaggagagaggggagagaagaaagaaagagaagcggaaatggaagcctggaaatggaagcaagaacagaagtgagattttataagtggtgatgttgcccagactcaggacagaaggcaaacaagctaccaaactagacccaggtctgcctgctcctggactctcccaggggtgcactggtgtggtggataagagtttgcaggtctgggaccccaggtgggttccagttgtgtcccaccgattagcagctacgcagtgtgagtaaactccttaacctatgcctcggttcctcagctgtaaaaattgggataacaatagttcttgctttgtaggatcatgtggggatttatttatatgtgcatttacacaattatttttcagcttcctacgatgtgccaagctctgtactaagcactggggatatagccgagggcaaaatccagcccccacctctgtatttccggagttgtggtcagggtggagtggcatatatccatctattaactgctcatgtaaaatggacaggtactgctagggagtccccaaagacctgaattcagggagccctgggagtgtttcaggtgaggagaggggagagtacagtaggcaaggcaggtgaggcgtggtagagaggtggggaattcgggaggggtgtgtaagctgcctgcatggagttaagtatggctctgctccaggaattgcccctgtgagtactttagcaggactgcaggctcttcctaggggccatagccatccccctgaataggaatggagctattggatacctcctgaccaactgtgggtcagcagtgacaggctctagaggaaggggctgaggtcgagggtcccagtggtgggggcactaggattctggatgtccctgaatgggtccagctgcaggagggtctggagtgaggtgaagcatgagacaggggccatgcgatggtctgaaactatcctcagttgtggttcataactttcggcatgtatcagaaccacctgcagctgcagacatctgagctccatccctggagattggtttatcaagttgggccagggcccaggaatctgcattgtaataagagccctgggttggggactccactgagaagcactgcccaacagcaacttggccttctgaacaaacctgggccttgtctggattcctgcagtctcagatggaggagctgagaagtttctttcaggaaaggattcttgctatctgggtccaaaagtgctaatattagcagccttcctgaacctgagaacattgagcaactttgaaatccatgtagcagtgtgaaatgggaattaaggagccatagcttggtccatcatttcaatgaagatgtgggaaaacctggccagatgttccatcagctgtgggaagagcctagcaggtccaatgaacatctagatctggcacccactggtgagagacatttggagaaagagggacattggcagcttccttggcacagaagagtggaggggccgttcattcagagagggacccaagccctgggaattcctgccaggcctaggggcccaagagctggggtggaggcctgttcacaggtgcaggtcctggaagaggtggaggccatgcggagggagcaggcagagatgggcaggaggagtgagggactcttgatcttggtgatcaggtgatcaattaccctggtttatcctagttttagcactgaaagtcccatatcccaggaacccctcagaccagggcaaaccgagatggttggtcaccatactttacttggcaacaagggaattgcattctattggaaggctcgatttctcagtggttacagcagaaactatgacccctagagctggatgttgattctggctctaccgttactgtgtgatctggggcaagggttttaattgctcttggttttagtttctgatatataaaatgggaataatatttccttcataggaggatttgggggaggggtaaaaaggataatgcatgtagaaccttagcatagggcttggtatgtttatttatttgacaaatatgttttggccactatgaccctattttctcatatttcattgaatgtaagatgccatcaattaattgtatactgaacaatgattggcctactatgaaggaaagaatgctgcccattacactttgacttatgatggattgcaagttatatctcaatttcagagatactaacatgtgaaaaaaaatacccaccttagaatcgatgaaccaggtaccacgttgggaacctctgggctatggtggtgaataaggccattaaagcctctgccactgctcaatttgcagctcagtgcaggcttctgggtggagacacttttccaaaaactcctgaggtctaagtatgtctccttgaagactgtggcaggtatcctatgttcaatttaaaatgtcagatgtgagggagagttccaggctgtatggggtgccagaagagaaaattcttggtttacatggtcacatgattgctctgggacctggggccagtcagttgtgctttctgtgtctctggtgtgaacagggggattgattctagctctgaggccttcctggcttcaaccttcagggactctgttgggtcccccatggtggccaagtccccctctcccaattgcaggaagggcttccttctggatatatggtctgccaagggaatgcaactctcccttggtgagtgccactcactgccagactgggatgggtgggagtggtgcttggggtgggataggcaggggaagctccaggtgtcaggttacactccttgcagagcactgctgggcctgaatgggagccagggagaacgtcctgccttctccatctttgttcctactagtttttcacaaagggacacatgcagttttccccttcattgtgggttccctatgtgggaaaattccatttgctaggcctcagaaccagtccgtggaaccatgacggcaccttcccccacccagtgtgcccgattagcctccagaggaggcttctgaaaggtcagctggtggggcatttctaccctgttgtggacgatgtgaggtcagcacagactccagggagggcggccagtttctacctagtcctgaaagcagcactaagttaaatgctcgcgggggtggggcaggagggtgggaaacccaaggctgagaatactgtttgtttagagcgtgatccacagagcatcgagggcccgctttctgtacctcattatgtgaagccttgaagccttgtggtgccagctaaggggggaagtgctcagtgtgggccaagggaggagctacccctggggtccctcctgctgaaagtctggagtggtcatggggatgagggcagaattagatacctgtcccaggaccctggttgagggtagaaagtcatttcacgtcgggaggaggctgggggctgatgcgacacttgaaaatatatatttatcatttttttatgactagataaatactagaaaatctagaaacatagacaaaaatccaaaagaataaaataaaaatcacagcaatccaataatctagagtcaacttcctttgacattctggtgtattttctattagaatctgtgttctaaacacaggcctagatcttacatttgaagggcccagggcaagggtacaattggagttccacataccatatgtttaaatatttaatatttaaatcattttttctaagaaagattttcttctgaaacattcaaaattatctgtcaagaccaaaaggcaaaactcaaattacaatgagtaaatcttaaaaatttagatgaaaattatttctgtaaagcagacattaaaattttttaaaaacgtttgattacattccattaggtattaaaaatagcaaaactctatgctatttgaatggccaggatccagggtctatagttgtcaatgtaaagaactgatatacttcatacatattatgtctggacctacacgcagggaaatttaagagtgcaatgaatcgtttgctattgcagaatagtcttcagctgttaggttcctctggaaccatgaattagaacatgaagaaaagcaaggaaatggacacttggcactgctgggagactatactttgttatgtaagaaaatgttgcattccacgctacctgagaggaagtgtttgacaaattaatttgtctattctcttacatgcttaagcacgtccactgctcaaattttccctgtactctgaagcgtcgtccatctctgatgtcagccacagcacagcccacgtggtgttgtggcattgggattcagtcccttttgtctcaaagacagaggacaagacctggagacacatctcctgggtcttgatgatgttagtcccaagttaatgtttagggttacgctatgcagcactgaacaccaggtcgcaagtaacagaagtgactgtcttcataataactatttgcctatgtgtgtttatgaaatgccgaacactttgaattgtgggatctaaggcatggaccacacttacccaggtctaaggtctaagcgtgtgtgtgtgcgtgtgtgcgtgcatgtgcatgtgtgtgcgtgtgtgtgtatataaaactatgtatatatttaatttaaaattaatatatttattttaatattgtaaggtctaattttaaaaaatacatatatagaaaattagtactaaatagtgagtacctctggaaccacaaattatattttatatgcacaaggaattttaaaatattaggaatgtacaatatgtattatttcctcagttttctagcataatttttttctttatacatattcttctaaaaatttatttttaatgattatacagtattccacaaaacagatatgtcattatttatttatttattgagacagagtctcactctgttgccctggctgaagtgcaatggtgtgaccttggctcactgcaacctctgcctcctgggttcaagcgattctccagccttagactcctgagtagctgggattacaggtcgccgccaccacgcccggctaatttttgtatttttagtagagatgaggtttcaccaggttggccaggctagtcttgaactcctaacctcaagtgatccacctgccttggcctcccaaagtgttgagattgcaggcatgagccactgggcctggctgtgtcatcatttattaaagcagtcctgtagtggttgtttccaatttttatgttgcttccagtttttctctactatcaacaccgccacaatgaacatccttgtgtgcatgtaagctacatttctggaagtggcatcctcaggtcggagcatatacattgtgtatatttagttgagtcagggggcagcccctttaaaaagacccaagtttcattgataagctcttttattttttgtttgtttagagttggtcccagggagaccgaagcctgcaggcagtactagaattggcccagggaatggggtctggagttatggatcccaactctctctgagcttgggagagtcccttcccctgtctgggcctcactttctttatctgttcaaagaagactcattggtactgacctaatgagaaaaaaaagggaaaataaaagaagaacaaagaggagtcagagtaggttgcagagtccttgcaatcagaaacgctctgattctgggagggtttgcttgctgggtaagtggagccaagctccagcctctggggctctgtccctgagaccatcctgccccctgctggccagttgccaaatgccagctttgttcctgactcccacagggagattccccggaaatttgctggactcccagcaagtcagttgcccactgtgaaagcaggaggctacaagagtatgagaagtgagcgccaacattgctacaattcatttagctgctgtttcacttctggaaattacattctttgggctgtgcttccaaatgtctcatttcattcatttgttcagcaaatgcttccaagttcctcctttgtgtctgggctatgttagggggctggagacacagtgtttgcctgcaaaaaatgcacaggctagatagggccaaagaactggccataggttactaccatacagaggacagagaggggcacagagaaaagccttcagatgtttaattattaggctattgctgggctttcaaacccctgatcctcatctgtctagataaagagcataaatagatgtatactgggttgaatagcatccctccctaacacttgtccacccagaacctgtgaatgcaatacagggtctttgcagatgtaatcaagtaaagatgaggtcatgctagtgggccctaatccaatgatgggtgtccttataagacgaggagacagagacccagagagacatgcagaggggaaggccatgtgaaggcactcataagtcccagaatggcggggattgccaggaaccaccagcaattagaagaggcaaggaaggatttctcccctggagagaccatggctagctgacaccttaattttggactttgggcctccagagatacgggacaatacattgatgttgttctaagccacccagtttgtggtaatttgttgcagcagcccttggaaactaatgcaacaaacttcttgaggatgaaagttagcaaactgaggagtactcggaatccaagtgagtgagtgtgtgtgtgtgtgtgtgtgtgtgtcagggtgggaggagctggaagtttcaagttacagcttcatcttggctgactggctgtgtgtccttgggtaagtcccttccttcccctctctgggcattggtttcttggcctatataggaagacattagactagcccagtagcctttgcaattcattctgctgctgtttcatttccgaaaactgcattctttgggaccatgacaaaacctttttttgtccttttttaaagaatctggaccctttttttttctcaaacaaaagtaaacatattgccccgcatataaatgagcacagctaagctgtgccaggcacagggttctggggctggtgaagtacttttgggatttcctgacccttctccaagaacaccaaggttgtgctggatcctgtactggcccctctggcattcagaaggtgacatatgatgtcaaataactgtgggtaatcccagagtgagtccctttcttcatgatttaacaggaaggtttatttagtccttggggtttatgagtttgggatcacagagcttttatgtggactcaggaagggtgagtgtatcagtttcctgtggctgctgtaacaaatggccacagagctggtggcttcaaacaaccgaaatttattctcttgtagttctggaggccagaagcctcaaatcagtctcaccgggtggaaacggaggtgctggtggagccatgctctctccacaggctctaagggagattcctttcctcgtggcttccagaacctggcgactgcctgtgttcctggcttggggccacatctctccaatctctgcttctgtggccacactaccatttcctctgcctgtgttacatctccccctacctctgtcttatgaggacacttgtgactgtatttatcccctgcccccagataatcgaggatcatctatctcattttcaatttatccacatctgcagagtctattttgctgtataaggtaagtgcacagtctaatctgggaattagaccctgatactggggccatcattcagtgcactgtagaaggtgatatatccatgatgaagcccatggcagagaccaactctgtcagtctcctctcttattctcattactcccaccctccctctctgcccaggaaagaagctatagaaggcatttggaacccttttttgggtaaggggcggaggcggggagggaggaggctgtggcattgtttgccggccaacctcctgggcagctcctgctgagctgaggacacaggaaggcagagccattcccatggagaaatagaacaaggcccaacctggcagccatgtctggaggcagccctttgtcaaaagttcatctgaccagggagagaaattgcatactcagagttagatcttgtgcaaggagcttccccatgccatgtaatcctctcaagaaccctctgagacagaggttattaggaccactttacagatgagaaaacaggctctgggaaggaaagtgactttccaagctacatagtgttaaaagaaaaacttcagctgaattaaatgtaaaggaatttaattgagcaatgaacgattcgagaatcgtgcagctcccagaatcacagcagatttggagagactccagggatgcctcctggtcagaacaaatttatagacaacaaaagggaagtgacgtacagaaatcgaaagtgaggtacagaaacagttgattgctcacagtttggcgtttgccttatttgaacacagtttaaacacttagtggtctatgagtggttgaagtatgccgctgggattggacaaaactcagctgttgttacaggcacatactcctaagttaggttttcaatcttgtcagcctgttaagctaggttacagtttgtccacaaggactcagatatagaagtatggagttctggctgggtgcggtggctcacatctgcaatcccagcactttgggaggctgaggtgggtagaccacttgaggtcaggagttcgagaccagcctggctaatatggtgaaatcctgttgcttccaaaaatgtaaaaaattagccaggcgtgatggtgcgtgcctgtaatcccagctactcaggaggctgaggcaggagaatcgcttgaacccgggaggcggaggttgcagtgagctgagattgtgccactgccctccagcctgggtgatagagtgagactccatgtcaaaaaaaaaaaaaaaaaaaaaaaaagaaggacggaattcttctcaggccatatttagtttgctttaacaatagctagtgaatggtggtgctggagaccaaagccagcactgcctgcaggtttcagaatctgtttggatctgggtttctgctgctctgagctaagcagcatgctgtgagcatggggtcagagcactggactcgggtctaggagtagatccttcccttctcagtggttctactgtgggcaggttattccagttctcagagcctctgtttccttgtctgtagagcgggctgagaatccttgacctaagccctgggttaagaagttccagggaacacatattcaggaaagcctttgtacacccactgcccacagaggaggggttgattgtagttcaggttttcctggaccagcaagctgtgggtggtcttccaggaggaacggtgctgagaacaggggttgtgggtctggccccgacaaggttaacagacccctccaaaggtacctggcaggcagggaggtgcctccaaagcagtctagctctaggggacggccattcagggtaattcaacagacattcattcactgggtagccattctgggacaagctctgactgggtgatgatgacaagacgtggtggtctccactttcagtgacctcttcaagagagatgggcatgtacatagttgtaagagaaaacagtgcaggatcaggcccggcggagtcataaataagtacatgggacacagaacagaggcagggcccgtgggtgggcagtgacattatgatccactatgtggtccggtttcttcagctcctctgatttgttcatcactctcatcctggggacagagaaagaatagttattattgccataaataacttattgctttaaaattaaaaatgtaatggctaccacagagcatgtagaagatgcatataagcaaaaagaagataaaaggcatttacaatcccattgctcagttatcaatctcattactccattgtcaatactttggagtatttctttcaactaatttttttccacagattttactctgcacactattttgtagccttctttttagaaaacctaacaacaaataattttgtgttactaatggttttgtgaacctatgtgtttaactggatatacaatattccatcaaatggttgtatcatactttaaccagcccctaatgatcagatatttggtttgtttcctttttttttcactattgtaagcagaatctggaataaaattcctgaaatttttacatctttaattatttcctccagacaaattccatatatatatatataaaatttgagacagggttttgtcggggcaaggtggctgatgcctgtaatcatagctctttgggaggctgaggctaggagttcaagaccaacctggccaacatgatgaaaccccatctctactaaaaatgcaaaaaataaaaaattagcttggtgccatggcactcgcctgtagtcccagctactcggaaagctgaggcatgagaatcacttgaacccaggaggtggaggttgcagtgagccgagatcgagccactgtactccagcctgggtgacagagtgagaccctgtctcaaatatatatatttgagacaaggtctttgtcacccaggctggagtgcagtgacatgatcatggcccactgcagcctcacctcctgggggcaaatgatccccccgtctcagctcccgagtagctggaatcacaggagtgcactaccacacccgattgatttttttggatttttagtagagacaaagatgaggtcccgctttgttgcccaggttgatcttgaactcctgggttcaagcaatcctcctgcctcagcctaccaaagtgctggcattacaggaaatcctctaaacaagtacctatgtttggagttgcagtgtcaaaggccaagctcgttttaaaggccaaatctgccctgcacaaaagttgtcctgatttatattttcagggtttgagagtgccaatatctccccacattcaccaatgctggcttattattaccttttaatctttgtcaatttgattatcaaaaaatggtttctaacaggtttaatctgtatttctaagattattggggattttgaacagttttttctatgtttaaggccatacgtatgtgtatatttctccattctcccatcggtgggtttgtgtttccctgatagatttgtaggactctgatgcactaggatggaggacgatgcccccctcccactttattgctgaggaggctgaggtttgatgagggtaaatgacttgcccaaggtcgcttgggccaataagtactagatggagatctcagccctgggctttggagtcactctctagtactttgtccactgcgtcacactgatagatgaccctctcctatggttctgggggaaaaaaatcaagcctgccttgtttcaatttagtctggattcttaaaataatctatcctgtaacatacagtagtgttagcagagaaaatatgttctgccacttattgctaaaggagctggagatccgcggtgggctgtgaccctttaagagcgtgccctccatgctgataaatcaggccctggcaggctgcgtggaagattactgctgacgggtgtggagacagttagtgcgattattaacaggacactgtggcaggggatgagctggctctgtgtgcacgtgagcacctggacccccaacccaggggccggactctgagagcagcctggactggaggactgttcgccagcccagcccaaccccagggatggctctgcagtgcccatccatccacccgactctgttggtctcatggccacttgcagtgctgggagggtagaaagagctggatcctgcatctggtgctacatgagtttacatttgtccataagcacctccctgttcccctctgcctcagtttccccacctgtttagccaaaaggttggacacaatagtctctaagggttcttccgagtccaagtctgcctgccttccccatctgtccaccctggccgttcttgcctcttggctgcctgaacacctgagcagacacccacagaatgtgctgtttggtgggaccttaccatcttttcacccattctcaggccacaaacttttgcaaggtttgcaaggaagacgattttgtctttctctatctggacttatatttaattttatttatttatttattttttgagatggagtcttgctctgtcgcctaggctggagtgcagtggcgcaatctcagctcactgcaacttctgcctcctgggttcaagcaattctcctgcctcagcctcctgattagctgggattacaagcatgtgccagcatgcctgactaattgtttgtattctttgtagagatggggtttcaccatgttagccaggatggtcttgataccctgacctcgtgatccgcctgccttggcctcccaaagtgctgggattacaggcgtgagccaccacacctggccttatttttaatattttttttttgagacagaatctcgctctgtcacccaggctggagtgtagtggcgcgatctcagctcattgcaacctccgcctcccgattcaagcaattttcgtgcctcagtctccaaagtagctgggattatagacatgtgccaccatgcacagctaatttttgtgtttttagtagaaacagggtttcaccatgttggccatgctcgtctcgagctcctgactttaagtgatctgcccacctcagcttcccaaagtgttgggattacaggcgtgagccactgcgtccagccctggacttatttttttcttctgagtcattcagctgcacggcaggaaggccatctcagagaattccaagtggtctcggttactttgggttctctcttcatccccctcttcatctgccagattgtgtctaaattttgggtgggggttcacttggtgccttggcaaaagagagctgggggctgcctgtgttttggaagacactcatctctgctgtcagcccttgagacccagactgctgctccaccatccctcattctcaaagcatacctctccagaggtgagagcaatctcacccactttagaggctgctaaggggcatgggagaatccagcttctctcttccacgacaggaagccacagggctcccaaggccctctttgctcaggtacaccacacacagccgtttctactctgtccctcccacactacacttggcacttgggaactctgccaggcttgatcctctgtgggctcccctggggaaaaggcccaggacccttctactttaagattctccaaatccacctgagatttttgtaatctctgtaaccctggcctcggcctagggaagggcagggttcagggcgtctccagcatcccgcctctgacatggttctctctcccagcccagcaggttttaaatttcttttagctgaaaaaacaaacaaacaaacaagcaaaaaaacctgactctgacaaatgatgcattgttcccagtcctttcgtctgatacctttttttgttgttcttttaaatctctctctgattctgctgaaacaacttgattgcctattgtgcaatttgagtgaggcaagagcaaaagttataaggaaatatggaggaaaacacctcagtgtatggcccagatattacctggccccattaagacggaggactggaggcttggtgaatccatggtggatctatgactaacccttgggttacactctgcctttctctggagccacgttcagatgcgagaaatcctgcttttcttcaagtgaaaaccatccttgtccatgtgctttctacccctcttgcttctactctgaggccagaccctgggcagccagggagctcaggaggggttggcagttgcccagatgacctggcccaagaggactactcggtgccacccctctctgttacccctgtcccggcatcctgggacatgggtaagacatatggcatgactgcagccagccacagagccgtggaggccaggtgggggctgcagtctcctctcgtcagctttggtcagcatcgcacagtcaacttggagccccacactttattatttaaaaaaaacttttattgcttatatttattattatacaagtagtgtatatttgttataagagccagaaaatgaagataaacaaaaagaagaaaataaaactcatgtgcaatcctaatatcaagggaaaacccttttcaacatcttggggtccatcattatctctgtatatgtctttttcatttttaaagaaaagggatcagactgtacacattatttttcatttaatataattctaaactatttttctactaaatatacttctgcaacattatttccaacagccatatggtattctagtaggtgctgaaatggagcaaccaccccctattattggaaatttaggtatttctttcttttttatatatacatatatataattttagaggtggagtttcgtcatgttgcccaagttggtcttgaagtcctgagcccaagtgatctgcccaccttggcctcccaaagtgctgggattataggtgtgagccaccgcacccagccttctttcttcttctttttttttcttgagacagagtctcactctgttgcccaggctggagtgcggtggtgcaaacacagctcaggcaatcctcctgcctcagcctcccaagtagctgggaccacaggtgtgtaacaccatgcccaactaattttctaagttttttttttttttttttttttttgtagagacagggtctcaccatgttgcccaggttggtcttgaactcctaggatcaagcagtcctccaacctcagcctcccaaagcactgggactacaggcgtgggccaccccacctggccaaaagtatttttaatgttttaattttattaaactgaacaacataaaatttctaacatttgactgttcttgacttaaaaaatggcaacttcatgtgatttgaccaaacataaatgatgctgtggtgaacatacttgagactaatctttgcataatttttttctgattactgacaattacatgtctaggattgcatgcctagaaatccacttgctgagtgaaaagggatgcgtgcttttgaagagacccacactttagtatactgacctcttggcgtgtgtccagggcagagaggaaacggaccagggtgagaaaccgtcttaggagcttgctgttggagttgggcttgaccatgtcctggctgctcccctcactaggctgtggccctggaccagtggcagcacaaaggggggaactccagctctggagagccatctgtctgcagggttttcatagtgagacaactggtgttttgtttcagagatattggtggtttggcgaaggctcagccatttcaaactccatctaacttccaccaagcttcgaaactctgcctgaatttaagatcctctgagccttgggatcagaaaccctcttttccaggtgactcagtaataagacgtgactcagtaataagacggcccctcccttcctgctccttagagatgaggcctttctaaaggactcacaactgcctccatggttttgaatgttttaaaatgtaacttggccttgagggtggatccaggcctggctgtggagtgaggttctgatggattctggggcggcagacctcttgaaccatcgaagcgtgcaggctgatttttaaaaataattgtcctttttaatgatgtaaaacatgtcatctagattaaaaaataaacacactttattactttcccagtcttttcttcctccctcccagggccagatggggattgcttgaatatttctggcgtatttcacatatttaataacgcccttggaggttcttccagaactgataaaaatgtgggatagacagtgttcacagaaaggaaagctggtggtgtgtgttcgtgtgtcggggtgggggtgggagatgggggggggcatctgttttggaagcaagtcaaaaggcatgtactttttatcttgagcaacaaaggacattgtttcactgtctccccgccccaactcttgccttttgggggttgggggagcagaaggaagaaaagagagaaaaaaatcactgcagctaaaaaaactagagcggcttcagagaatcagtccttccccccttccccgacagctttccactagctctcttgcgctacagcgaatccaagaaaataattaaagctttaatttatttatacgtcttctctatagatattatagatctcacaatcgccgcctcctaatttatgcacgcagagcctgcggcagctcggagccgccagggttggggggtccgggcccctcggagcgggacggctgtcagcccccgcggtggccgcacaaaggctggggtcccggcgggcgcacctgggtgatgggcacctcccgagactccccgggacggaggcctgacagcgcgcggcggccgccttaatagactgcgggatgttctccgggagaaggctgcgccggtccccgaggacagatcatcaggcagagtggtccccggagcaggatttattagcagacaggatggggaagttgattagcctccgcggctgaacggacatcctgtcagacaggcctcttaatccaatcacttacctgtggaggggagccggctgcctcctcctggcccccttcctcctcccatggcacctgcggggccacgcggggtgctccggagccagggtacacaggccaggccttccgtgcctggcctcgctctctgattcagtctcgtggttgatgcaacctgcaggctgctcttttgggctcactgccctggtggtgactctcccgcatagagaccttaccttctgtggctccctcttccccactcaggaaaatccccttcccctccctgggcttgcctcatttgaccctgaaccacctttccagcttcagcctccactagtccttctcttgagtggcctctctccatttcctgaacctctcctgcctgccccctgcccttgcttcaggtatggggtctacttagactgttctctctctctctcttttcccccaaatccttcttgtcctccagggtctagcccacaagtctcatcttccctgattccatgccccctccctccaggcccaggtaatttccctctcttctgaagctttatccatctgtggtgggtgaggattccaggcccaaatcctgcttccacctcaccagctctgcagccctggccagatgacctcactggcctccccttctggggatgacagcagcaagttcctccagggtctgctgaggaccaaatgagagggtgcatgttgagagctggcggtaacgtccagcccacagcagcacgcagcggtaggtgattgtttcaccctggattgggatcattctgtatggtggggtctccttcacagtgctgagttccattaggacaggggccaggcctcaccatctcctccctctttccgtctcccttgccctaacaccaagcacaaccctttccagataagatggctgaatgtttgttgaatgcatggggcaaccatctgccacacagtggaccaaggatggcgaaccctctctcggagtgaccccacggggccccacctttggcttacctgaccatggaagaagaaggactgtgagggacagggcctccatctgcttctgtggggcgggcattgagatgtgtgttctctccagctcttgtcaagagtttaggaattcagaccctattgatccactgcgtcttcaaagccatctgttatcattaagaaacaggacctgagccccggatgcagcggctggcactgggtaatttagagcattttacacacacacacacacacacgcacacacacagagagagagagacatggctaaaagaagttagctaaggcaaacattgaacacttggcaggcagggagggaaagaaccaggggactcatagaaaccaaaggtttctacaccgctacattaaattctacttcctggtcacagattttcatggttgattgtaatcgtctatgggcatttgactttggcaaatgtggatgccaaggtctcacccaggccctgccacctcctactgatgtctgtcccttgctgctcacaaccgtcagtcttgactgggttgatgtcaaggtcactggtccctagtttgcgccatcttccttattttcctttaaaacaaaccagaataacatttgccagaccacagttgtcaggcaactttcccatgccttggtgtttctcaaagatttctagctgtgcctgggtcattttggtgtggcagaatttaccactggaagaagattcagagcaggggcctggttagatgctgctactgattagacgtgtgcttctaggtggggtggcatgggagagtgtgggcacttaaccgaacctcacggaacctcagtttcttcatctatcatatggggataatatttggcccactactacaaaaggggagatttaagggtaagatgaggtgcttgataggaatgtgcttttaaaagcacagtactatacaaaattaaggcataactactatcaggagattgtgcctaaaatatctaatactctcagtgctaggtgctggagaagtaaaggtgaccaagcctcactctgctctcagtgagtttcacaggctaaagggggaaacgaatatggggacgctaactaagcaaccagcaggatccgtccaactggaccttgggtcgccctttcaatcctggagcccctgttccctacagcatgtgccatcagaaggggctccggccagcacaaggtcaggcagctgtggcactgcccttgttctgctgtttgattcaatggatgagatggagtaaacatggaggcttctccttttaggatggggagtttatgtcttaagaaaaatgacagatgccactgaaccttttttatgacagattcactgaacactgacgtctgttgattgtgtcaatagggagaaagagggtagagagctgaagaaattcctaccccgagctaccctctcatccatgtatcttttttttttttgtctccagtccttgcttcgggaatctctgctcagacctgcagtgccctctccaagggggatcagctaaaatgccttccattgcatggatcctgagctcccccgacaggtatggcagctggtaactgcagcttccctacccctcccccaaaggggcaggtgcacagctctgatctggggctcctagaggcagaagcactcttccggactgttctgtaagtgattctcactacgactgggaggagggaaggggactgttgtcccagcctctcccattctgtgcctccctctgcccagtctatgggcaccccttggggccccagaacccttcttaggtaagcaggagtgcgtaggatgcagcaccaatgaggagaataaatttgctcaggtgaacatccccttattgagggaaggtccttacgttttcaagatgattatggcattagagctcagagtgcaagcgcatatatctcaacacagatgagctacagggccctgattcctctgcctgttaggggctgacctcttgggataaagcaaggggccgtgactcagatctgaggagaataaactggtatttggctgaaatcactgaattgactgagactaggggcctggccccagggcattctggggtcgagaagtggccccgtatagacctgggactatggggctctgtggttctcccaggcagagtccccagtccccataaactgcggcctgtgctaccccatgctcctccccaccgctgtccagaacccccatgcctgctcacacccttgagcgcagacagaagaggaccccgtggttcctagtgggaggggtgggtagaatgagcagtgctctggcccgcacagtcgcctgatgctggctgcctgtgctcagcagcctggcaggtgggaggagggagacagctggttggggttttgggaacagggaccatgttttaataatctccatatccccagcacagagtgggtgctagaaaatgtattgttgaatcaaaggatagttgagtagggggcctgcagatggcaaggcgggacagggccctgcagcctgaagaaactgcatgagcaaacgctggaggtggtcacagtgccaggtaaggctgaagggggagtggcagagaactcacagctggagggatgtacagggctgcccacttcaacccctccacctctctcagaatgctgagctcattctagagccccagcagcagccttcctggagataatccagctgcacttgaagtctctggagacatggagctcattcttcccttgacattgctttgtatcttgggcgtctctgatggatacaaaatgaacttctttcttaaatgaagtgggcattgattctttttggagcacctactgctcctcaagctgcctgcttctttggtgctacattgcccagggccttcagtgccgggccaaggagtttcgtctttcttctgcgtgcagagggagccctgggcagcctctgagcaggaggaccatgaatgggtggagctctgcttaggaaggtgactctgctggcccatctggggctggagtcctagaggcaatacagcctgaagtctgtgtttctgcacctaatcacactcattgcttgaatttatggacctgaggtcagaaaaccagtgacaactatttctgttgcctgacaagcaaatccagggcttgtgaccctgggtatgggctgggaggaggcacatgtaaaagtttgtatcttagggtcagccaggtctaggtatcttggaagccagtgcctcccaaactcccttgcccctctggagtctgtctgcagaaccagatggtaggcaggtgtgggcacctagggtcttggggtgaagggaggctctagctctcctctggccctgacaaagctgatggccattgtgaggactggcattcagtgagagaggcactcagccctccaccctgaggtcaaggcttgcactaaggtgggcccatagcaccttcacccaccccaggagccccactgacctttgcattctccaaaaaaagtcaaggtgatgacaagacacatctatcgcatctcagccatcattgcagttgaaagatgggcccggagcaggtggactgcttcaattatgatggatgaggacggtgacagctctcgggagagccgcgggaacctggcaagtgctcactcagctatgactcctctggtagcaatttgacaagatcagagcactttatggaagtggaaagtttggggacctcggggtttgcttggcccggggactctggctgcggaagccctctgccagcaacacagggcgcttcctacaagggccagcgaaggggaggcaggagcagcccttggggaggggctctgcctcaggagatctcctggccctgggaccaagcctgggacgtgcctgcttgagtctcttccctgccactgagaacggccccctgctaccaaccaggtgacatcatggctccagccacaacctcacaggacagctgggcatctcctctgagccaggccttgtgcagagcactgagagagagtggtgaacacctctgaggtcacttcctgtcctcagggcattctccctgtagattccaaggggactggacagccccatctgtggtcagatgtgacactgggcatgtcacctcttctctctgagctttggttgggtcatttctttatgaggatggcggttgtgtattaagtgaggtaagctatgaggagcactcagcttatcaaaggtggtattcaataaatgttagatttccttcctgaccaattcagctgtcctttggtacatttctttatttattcagcaaatttggcagagcccttcttgtgtgccaagcactgggcttggcttctgggaattagatgcggttgtagaagaggggctgacagctttatctgcttagggatgaggatgtggttggattagacagtcccttggccctcgctgccctgcagtgctttctgggcagaggcatccatcttgcagaatgatggccaggcatagtcctggctgcagtgctcctggaagctgaggccctggtgactcctgggcatcccaggcactggtgggtttctctgcattaattctgctctgaagccaggattctggggagtctttactccagatagtaacctttctagagcgagaagggatccctcagcacgggcagcttgacccagaggtgctccagttcctcaaattcttttttttttagagggagtctcgctctgtcaccaggctggagtgcagtggcatgatctcagctcactgaaacctccgcctctcaggttcaagcgattctcctgcctcagcctcctgattagcttggactacaggagcacaaccaccacacccagctaatttttgtatttttagtagagatggggtttttaccatgttggccaggatggtcttgatctcttgacctcgtgatctgcccgcctcggcctcccaaattgctgagattacagccgtgagccaccgtgccggccatctcgaattcttgttaagcaactgttgtctaccctggggggagaagcagacaagactcagccacatcctgccctctaggagttcttgggctggcagagggagaatgaggcatcaggcattgaatagcatgcagtgctggtaaggaggccgcggggaggttctgaggaaggtggcgtccattctggcagggagatcagggaaggcttctctggatacagagggacaccggaaagagctgaggagcaccacatgcgtgcccgcactgaatgcacccaggcaaaccccctccactgggcctcagcgtccacatctgcacggtgacaaggctgcctctgtggttttgcctcagtcctcctggcccggacactggtaggctcaggtctccatgttccccttagagtcagtgcccaggcgagttgctctacaatcctccctggtaactgcagtttcacttgagacttccttgtgtatcccagacaaccaaaggcagccccgaggggcccctgctgcaccccagcccccacctggggaaagatgccagcacaattttacagagattgagtaaatattgctatgtgttttactgaactattgttattttatctggggaagagaagatgttgatgtcggtgacaaaaatattaaaatcacatactagctgtgtgtccttgggaaagttatactctctctgggccttaatttgctcctctatgaaatgggagctttagtcctacttgatctcctctctgggattgtgtaaaatgctgactccacgaaacagctgacagagaagagatgtggtgagggagggatggtgggggaaaatgatctctaaaaaagtcgtggccaaagtgaggaatggctcttccctgctctcagagcctcttgttgctgtgtgtgttttggtgggtgaggggtggcatagggcagtgttgcagcttttccccttctagcacaagtggccagatacagggctgctttctcctgtttgcctctcaggctacctctcaagaggacctcttattctacgcataaagcctctggcaggagaaaggcatgcaatggagagaagtgcttttcaatggagcagacccccatcaaggtggaggagcccacacaagcccctgagctcacctgggttattgcttggaccttctcctctggtttaatctctgccctaaccatcccttcatggcaaaaagaagagacccaacccagaagccacagaccaggcctgtggaccgaggactctgcttttgctccgccctcccttccccatccccaccatgtctccttgtctaggaaccgaaccctcagctcagacctttcagcatttttaagactgggaaggttttccagtgtctccttcaagttgccaagtctatgttcatgagtggaggcaaagagcttgggctttggggtccagctgacctggatttgatccctggccctgccactttctaactggatgacagtgggcagataatttaccctttctgagtctcagtttcctcacctgcaaaatgggtattataatagtgcctatttcacaggatggttgtgaggaataatgagataatgtgtgcaacatctgtgtgaactttatggtttttctgcccagttgagcatttcccttctcccaggaagtgctcccagttgttctcagggctgcaggtcatggcactgcacttccctggccagagcacatgactgaatgcagccgatcagagtctgtccttgggattttatactgtagctggagaaagaagggctctcccctgtctgttgtaaagataaaagatgcaagcttgaagttggctgcacattgggttctggtcttgcccgggtggggtacagctgacccatcagaaaataacaactgcagctgggtgtggtggctcatgcatgcaatcccagcactttgggaggccaaggtgggcggattacctaaggtcaggagttcaagaccagcctggccaacacggtgaaacaccgtctttactaaaaatacaaaaattagccaggcgtggtggtgcacacctgtaatcccagctgcttggaaggctgaggcatgagaatagcttgaacccaggaggtggaggttgcagttagctgagattgtgccactgcactccagcctgggtgataaagtgagactctgtctaaaaatataaaaagaaaaaaagaaaagaacaacctggaaagaagcagagaggaggagagagagacactggattgcccttgaatccctggttccagttatctcgtggtccagcgtcattcctgtttttcctgtggtttcagtatttgagggactgcccataacatttcccttttgggttagctggttggagctgggtttctgtcacttgcaaccaaaggatcccaactaatgtaaaattacttagcctagtacctggcttatagcaaaggctctataagtggtggctctaagtattaagtcagactctgcggcttgacattggtgctgaatttccatctccatttatccctggccaccctgttgtgtgcacttgtgtattctctctgccacccggcacccaagactctagggctgcctgagtgaaacacgaagctggtgggtggctcgcggcctgagcctgcctggtgaggacggcagcagctccggcccatacaaagcagcaccatggacagtggcagaccagcctgagaatgcctgccaccacgccagacacaaccgagctgccgacatccttccccatgtcggggcctgataatgaacaagtaatttatgtccaggagtcagtggagcctgtcttgggccagggctgaaatgtgactacgagggattcctatgaaggtcatcgccctgctcttgtcactgctaagggttgtctgtaaatggcatccctcggaggcatcaccttgctctcctggcttctttgtggggataagggtgcacttttgagaaggtgagttgagaaaagcactgggcttcttttgagccatgcccttgcagtggcccaggaattcttgtcaagtgtgacctcagatgtctcatgggtgagaaggggtgacccagggtggactgacacgtgagaggctgtgcagaatctgtgagtggggagggcaggaattgggcatccttcattggggacaaaatagctccaaagaccttctgtctaaattaatttgaatcaaactccagatatgacaagaatggtgttctggtgacaaagtaacagagcatcttttttgagagtatgaaaagaggggaagggataaaggagaaagcactaggctggagggtaggtgaatcatgaaaccccttcctatgggactcagtttccccaccatttcgtggattggagaggcttcaccattctgggatgcggtcagagtatggtttaatggtcccattttatggatgaggaaactgagacttagaggttaagttgtacagatttcacattccagacttgggcctttggattcctaacccagttccatgtattgcccagcctcatatgctgtttatagaaactatgggatctctcttcagcagagaggtctcatggagtcctcccagcagcggcccagaggcccccattctgtcccactgtcatttcaaagtaaaattcctctggaaattgccatgctgcctcctgttagagagggtgcaaggggagagggtgctcctggaggaaagatttattttccatgggaggtttggtgatttgtgtgtgcattgcctcagctgggaggggtcaccttccagtggaggggctgaaagtgggatcatgcccttgttcctgcgccatggggccccccccgtcaatgccatcctttcagcttcacttcctctttccatgttgcagctggagtgtctggcctgaaacatgatcaatacactatgagctgagtgctgcagttttcttttcctcccaggtgggaactacatttaaatttacttgaaggttaaaaaaacaacaccttctatgaggggaatttaaaaaaagaatgggttgggaatctcctattaacaggagaacgtatcaccccaaaccaaatgagccctgtttgccgctcaccccacagctgagctgagcctgctctggacatgtgggccctggtgaccacatcacagggcctggacagtgttcactgggtagagggatgctgatggcttggttggctcctgtggttgggcttttagaaaatacccctaaacacagcttttccttttagttcccttttgcagaactccaggaagcaggtaggtcatggattaccaggtccatttcacagatgaagagatgtcactcagagaggaagagtggaagagaacagccaccaggctgcaggcactcccgcagggccctttctgctgcatttctgccagcccccaaccaacggcaggtgcagaaggggctgcacagacatacagggctctggggcacctggccagatgctgcctgagcaggctgggggaggtggtttccttcacatggtctcagagctgagagtccctgagctctacacaccttggactgtgttccttctgttcttctaatgctcactgtctttgtctgtgagaatatcccaatcacaaactgtattggcttttatttttagggggagatttgcaaaaggggatacacgtctattcggaaatattcggaatgtaaagctgaaagggggggtggtaatctcacccctgcctcccctgtctggctgtacccttcttcactgcacctcactaccagggagagttggctctccctggagtcagacagacttcatccaagtctcagccccaccacatcccagctgtgtgacataggggaggtcacctaacttctctgaacctccgtctcttcacctacaaaaggggataataattagggtgactgttaaagtcatccagatggggacactattgagagtgaaagttggcactcttaataagcacgttgggacagtgggcgtggaccagggctgtcctggcaaaccaggatattcaggcacttagtgataatagaagtacctactcataggttgttgtaagaatgaaatgctaaaaatgcaaagattaacttgcatagagctgggagtacaaattcttgatgtaagatagctttattgttgttattttgtgttctcttttcatctcaggagactgtgtgaccttcttttgagactggagagaatagagtggtctgatctgggattcctcaccttctgcacatgtgtaattctatgcagtgctggtatttgccttctctcctaaggccgggctttgcaaatgatcccaatggctcttaagcctccctgattggagccctctgaccatgatggtgcgaggttggtcatatgtggtcccaagaggtcactggttaagaccttggagggcacacatctctgaattgggatgaaggtcacatttgtaagtttgttcctctggcttctcttgctgatgcttcccattgcttattacgggatgtgtgttgttagagtgatgggtgagtggagggaaggatgctgctgtttagagagaggttaagcctagacaacccttctggaaatctccaaacattctgggagttggcctggggagaggaggtgaccaaatccactcctgtgggctaagattagacagtcaggctggtctctgtcctgacatgattccctggagacttcagagaaaccagctaccaagggggtcctggtaattcagcaaaaacacagaatatcaaaataattgggaatcttgccatccctggtgttattaaccacagtgtacattttaaggccagatcttccagctgatgagtgtataggcatgtgtagtccacgggaaggaattttgtagttcaaagtagatgcacccaaatgtaacttgactttctctgtaactgggctttccttctatcctgcgctcctgttctgcctgatgcacagaaatcaatcagtagcgatttcttactgaagtcataattattcagggacttcctgatgctctcagctgagctctgtcacactcaggtttgcttcccctgtcagggttttctctccatcccaccttctgggttgaggctaagtggtgaggaagggactgtgcctcttcccttccggcctgggcaggagtggcccctttgggctggaaacccactgggtgtggccgcatctgcccatgcccttcgtgggagggctgtcctagccacgaacctctccctggctcatgaccgcttccagccaacttcagtgccccatttgggagtcttgagaatgtcctgaatgtccttccatgcagttccgggctgcagggaactggaggggtcggggctaccctgagcctctcatgtctagatgaaccatgtcactcacgtattctccagtgactgcttccttggcagcactaggtgtaggcccaggagctctgtgtcctggcggctccacacttatctgggggcttttagcatcttctcccctcctgtgagatttggcccaaaggagtaggtggcagagttcagggctgtcccacaccagcaactgagctacagcttcatctgcagacttctcctcctctccaggcctgggtgcattttatctcgtcggggtgggcaggggataactgattctagtgggtcatggcccctcctaatttgttcatcctacacctagactgtggatcctgaactgaaaacctcagaacttgggacttctgttctttggtcctttctgacaactaccccaagggatagtggtgggagtggactggagcatgacacgctctcatggggaatgatggttgtgaggtgaaagggggtgctggggagacaaggagacatgtcaggtaacatctcagatttgtgtcccgtgatggagatttacaaggagagcaggcaatgtggagcaacagggactctcattcattgctggtgggaatacacaatggtacagccactgtggaagacaatttggcggtttttcaaaaaatgaagcatactcttaccatatgactcagcaatcatgttccttggtgtatgcccaaaacaaaggaactgaaaaattgaaattttattttgtctacaaaaacaccttaacttggatgtttatagcagctttattcctaatttccaaaacttggaagcagccaagatatcctttggtaggtgaatagataaataaaccatggtgcatgtgttcagggggctgctgggctccaccttgccatatgatcttggacaatgtataatggaacgttactcagtgctaaaaagaaatgtgctatcaagccatgagaagacatggaggaaatttcaatgcatattacagagtgaaagaagccactgtgaacaggtacatacggcatgacattctggaaaaggcaaaactatggagagagtaaaaagctcagtggttgccaggagagagggagagagaaggttgagtaggcagaacacagaggatttttagggcagtgaaactactctgatattctaatgatggatagatatcattatacatttgtccaaacccatataatatacaacaccaagagagaaccctaacgtgaactatggactttgggtgattatgatgtgtcgttgcagggtcatcaattgtaacaaatgcattactctggtggggacattggtggcaggggaggctgtgcgtgtgcaggcatgtggggtgtacaggaactctttgcaccttatgctcagtttgctgtgtatctagcactgctctaaaaaacaaagtctatttaaaaaacagtcacatcacgtatactgtgttattaacttctttttatacaccatgaatatttaccactgtcatcacatattcttttataatatagtttgtaatgagtatgccatatttcattgtatgcaagtttcgtaacttaactattttcctagttttggatgtttaagtttcctttttcttttctctaagaaaaaaatgctagatgagtttccttggacataatcttcatgcaaatttctattccctctaaataaataaggatatttattttcacgtaaatagttgaggatttcccacatcatcccaacacaagctcttgtgcacatttccacagatacacgcatagacacagagaaacacagaaacacaaagccacgtgcagtcttgacttcactgtagagaattcagctcatctgctttgaatctagacacaataaaaatatccccctctttccaggtgccaccaggaagtgaaggcacttgaaggcatctgtgcaggaggatgacaactgcaaacattaatcaccccaaagtgtcctagcctcctttgcagttgtcaccctcctgcatggatggcctgtacagatgtcttcgctgggcagtagagtgaccaactcatcccaatttgcctgggactttactagttttagcactgaaagtccctgactctgagaacctctcccaacctgtcctgataaaactaggatggctggtcaccctaaaaggcagagggtggggctgggtccctctccttcagtgctggcctcttcccctcatgggcagatatcaggtgcactgggcttaccccgagggcattggggaagcttagggactaagaaaagtttgatgctgttggaacacagcctgaagcccactggtgctcttgaagggaagcaaaggaaaactgtgtgttcaggggccttctgggctcagccctgccagatgagttgactaaacctatctccatctcattgcccagtgggcgtcggggacttatcgccttcttctgaggagtgacatcagcctccagttcgttcacccatctgcagccactccccttccaagccagttccaagcctcaaacgtatctctgctcaaagtctgtgatgacactccattgtcgttgggatggtaggatggtgtgggtggaacacagattttggaatcaaacagatcagggttcaagctccaatgttatcaggctatgtgactttcgacaaagcccttgatttttcattttccttatttataaatgaaaacaaaatctcccctgtagggctaaagggagaagtaaattaaataagataacacatttataaagtgccctgcacaatgtttgctacatggtaagtataaaacagtcagtcactattgttctgacgatttagaacatcatccagagaccccagactggggtcattcagcaaccccccaccctgaccttgccttcagctctgggttcatattcacatcacccacacctacactcacacccccacttctgctgcccatacttcttactattctccaggtaagtcctttcctttctggccacacgcttttgctgatttactcccttgcctggaactccagtcccctgttgaagctcctactcatcctaccgtagccccattccacctcctccaggaagtcttccccaacacccccagatgaaatggagctttgcttcctccttgctctaccatttgctttctccagcttgcacttagagactggccttgcagtcagaatggtttcctctatggctatttgcatccatatctcttttcccctatagatcttgggctgcttgagggcagagtctgtgacctgctcatctctgccagcctcagagcctagcacagaactttgcacagagcagctgctccagtgaaagtgttcattgtcctaagagagtggtggacactgggcactgtggaaaaacagagggcgaaggaatcacctgcctggggagcatggcatgttatagagaaggtggcctgggcactcagctttgaaagagcaggaaggtagaagagaaaaagagacagaggaacagataatccaggcagaagatgagtgtgggcaaaagcctgtggggaggaaaatgtgtgtttagggaaaagcaaggggtcctattgctgaaggctgggatgggtgcaggtgtcacagaaagccaggttggaatctggccgaggagggagatgcccaaccaccccagttcttgcttgcttgactgtgaacactctctagctggtatggcccaggtgcaccagaaggatgcagagaaagagttgtgatatagatgccctgttaaacttgaattgcagataaatgaagaatttttagtaagtataagtatgtcccatgcttaggtgggacatacttgcgctacacaataactcattgtttatctgtaattcaaatttaactgggcgttctgttcttatttgctatatctggcaaccctctctgtgaggaatgcagtaatgctgcagcgtcagaggtgtcattaccattttttgggccattgcttcatgagcaaagacagattgaagtgtatgaatccccactgcacctaaatgcagataaacatgacgaacggtaatggctccggaggaatcaacaggagtgtttccagcagcaggtgagttgtgggcgctggaaatgagcatttggatgctggagctcaggccccacctgccatccctggggtgtgaatttcacaagggggtctcttctgaaggagcaaggctcaggcctgaagaaacaaggctagaagtagcgattgagtttccaggcttacccacttaaagtctgttttgctattaaggggcagggatttagcaatattattaatgaggctggtttgggggctggcctggaacccagcttctatttgaaactcaatttttatggcgatggaaactcttttgtcatcgattggaaagaaagaggcatcagaaacatagctccttcaagccaatcacggttgctgtggtctccaggccatgttccaaggaagtgggagtggaggacgggcatattagtggaaactggggaataataaaaaacgtaggctcccctcacctctcttcttcaggaaccagaccctcagagaggaagtattgtttgctaggcacaaaccatgagctagacactttcggttcatcaccttgggtaatcctgctgtacttgtttggagctatctcatcgtatggggatagaaactgaggcttggagaggtgaaataaactgcataataaggtcatatagttcagcaaagccaggactcgaacctgtgtctatgaagctccaaaatcttggctctttattttgggccacattagaaataactccctggaaacccccacaatgggtcccgggatccaactacaagattctgtattcctgacctcacagctcctcatctagccagtcccagcatggaagggctggttatttgtccaccaaggcacttgctctatgggtgtcaaagatggtggctgttaccacgtttccaggagggacccagtgttgctgctactgttctccaaatcctcccccacactcctgtcatccctgaatgacttaatctctgagccctctgagacttagtttgtacctgtttgtggttacgctaagtggagagctcctgggggtgggggttgggcaagaaccaagttagtcctctcttccttccaggtgctctaaatgtgttcatggaagggagaaaaccccaaaggtttattgaactagagtagtccaggcaagaagagctgatgatatgtacagctgcatgtacatcgaccaggctagactaagctcatctgcctggactatgtaatatctgatgcctcaggagagtgatagggtattagctaaggtaatgctggctactataacaaactcctaattatatgatggctcaaacaacagatgtttatgtctcacttgtaaagtaccacacacatgttctgataggtataggtttgctagataaaatatgacacctagttaaatttgaatttcagagaaaccacaaataattttttccaagtgataactctctactcaggctttctaagcatctaggactggttcagaaaggtggctggggttgcctctgcccctaagctgggatgtatactaagaaggcattcattgcttatctgaagttcaaacctacctagatgttttgttttcatttttgttaattctggcaactctagataggtgggtggtccttcttcagtgttggtttagggacccaggctccttcacctccttgccctgtcccttcaacctctggtttccacagtcatgacaccaatttgtatcaaactgatgaaagggaatgagcatgaggatcacttgggggaggtttttgtggactgagcggtaactagaacacaagggtcttctctcattccattggctggaacaagtcacacgccatgcccaacgccaagtaaggctgggaaatgtagtccagctctgtgctcaggaagaaatggaagaagttctatggacacacacacacacacacacacacacacacacacacacacacagctttttaaagaaggcatgatacattttcttgggtagtctttttaagactacagctttactttggcaaacacacactccaggagggaacaagccagtgcccacatttgtcaaggagagagttcttccctctgctttccttgaagaaaacaaataaacaaaacatttatttcttctatgaaataaagtcctggtaagaagttgttgagtttgtgctcttaaacaagcagcaggagggagagtcaaaactttgaacctaccaaaggcccccaaatccatctgttggaatcctagcgccagggtgatggtatttggagtgggggggtgcctctggtaggtgattagatccctcctgaatgggattagtgcctttataaagagccctgggggcacttctttgctccttccaccatgtagggagacagcaagaggacaggtgtctgtgaacgaggatgctggctccctccagaccccaaatctgctgatgccttgaccttcagcttcctagcccccaaaactgtgagaaataaatttctgttgcttatagctacccagtctatggttttctattatagcagttcaaatggacgaaaacagcattcaatagaactggtatggatcctggtagagcctggtacaatcttctagcgatgggacccagatcaagttactcaacctttctgagcttcggttttactatctgtgaaatggggctaatggcatgtacctaatggggtgctgtgaggacacagcctggcccaacacttggcatatacctagagctcaacaaatagaaacaatctcacagcttctgttccctctgtggtcctgtggcagctacccaacttgatcctgagctgagcctgtctgggggactgactggagggtcctccaggaatctgcctgtggcaaggagagccaggttgataaactaagcctggcaaccagcctgagtcacccaccagtcaggaggagaactttcctcctggtccaagcctatcatggatttgtgtctggagcctctggggaggggattggtccaaataaaacttctgaaaaatattggaacacaagactccttggaacaatgccaaagtgggggagaggcagtccccacagggacgcaggctggctgtggaccatccagggtgcagataatggtggcgaagatggtgctgcccagtgggaggtggcttcaaggcgggcacagaggcagtgtgtgtgtgtgtgtgggggggggggggctgcgttctcccatgacttggcagaaagctgaagaagaaggaggagaagcagtagctgagaggataactggtaaaaacataagagttttccagaaatacttgaagaggtactggaagcagctagacagccagaattatcaggtagagggggcacaatgaaacagtgaagcattagctatccataatgacccccttcacacccagggttggtgtggttggggtaacctaggtcgcatcattgtcttcaaagaataattccccaaggtacatttgattgctgttggcatgagtgtgtctccctgacccccacccaccaattgatgtcttcccctggggctctgtgtccttcaggagaaagtgctttgccatccttgattcagactcaacctctctgttctccctgcctgcatctcacacccctctgattatggaaagattgccccttggtctccaaatcattaattttggctgtgtagctcccacctagcagagcttttctgctctgaaaaactctgattataaatagttcaataatacacgtcctcctgagcttaagactctggcttatgtaattggaaatctggatgtgaagcaagttaaagttgatgccataaagacagtaaaataattaatcactttgctctgtctaatagattcaagggcataggaacagccttgcggccagggtgaatcttcgggagtggcacttgctgtcatggcgacctcggcaggcactggggagataggcagggaaatcagcacctggggccagaggatggggtctcagcagggtgtgcccctccaagctcaccaaggccctactgatcaagatgtcaggcatctgtgaccctctgatcccccactctccccctgtcccagggttcctgtatattgtgcatgtccttaggctcatacaagcctggtccccccaactgcctccctggacatggtggctctgattagataatccctcttcagcccacaaaggacttgaactcccactatcttgctctatcctcacaaggctctgtgaggcaggcagaacaattattctttccctcccacttgtcctaagggaaaacaaaggctccgctggttctgggtgaaatggcccatttcacatgtatctttctcaaattcacacagccagttggtggagccatgtcttacactcccatctgggtgacaacttagcctgtgccttcttggctctgctcgccggctccctgacaggccaggagcaccaggctgtggacatccacctgagggaggctgctccaagggcagggaccaggtcggggagcataatattgagcattaacaatgtgccaggcaaggtcctaaccaccttcacactcgtgatctcgtttattcttcaaatcaccatctaaggtagctgctgttgttcccattttatagatgacgaaacaaagaaacaagcacagagagggtaggaaactcgtgtaagatcacacagctcataaatagcagagacaggatttgaacctgtgcttttaaccactgtaacccatgggctccttggaagcctgtgaggagccttgagatgggatggaactcttacttgagtcagtgcctcaggatcgattctagggtctagcacaggaaggggttcacgagatgttgttgaaggtcgggcagggtggggtccttctgcctctggcctggctgtcttccttcacttattccaagcacacgcatttcctgatctgggccagtccctgtcctgcactgggaacacgggggtggatgaaccacagcctctgcatctgcaggggcaagtgaagtgtggcagggcagataacagccaagtcatgtggtaagtgcagggctaagagcaccatggatgcctgcatagcaccagcttaggtcagggcatcccggtaaggtgacagcggagaggggacaggcatgccaggtagaaggaacagcatcagcaaaagccttggcgtcaggaaagagatggggtgagtgggatccagaggcgtggcagagggcgtgcaggagattttaagggccttgagtgccaaggtaaggattctggactttctctggagccgctgagcagtgccatgacccagtgccgttttaggaagtcaggtctagtgagacagactggaggtcgcgaggccagggaggagagggcgggtggcagtgggaatgagggcagtggctctgcttggtgagggagtgtaggggatagcctggggcctgccttgacttctatacgtgtttgtgcccccacatccccacaccaaggccagttttaggtttattctgtgtgttgtgagcgagctccggagagggggctgaagcgacgcatttgagacccccaaccgatttctgcctttaggactatgatgagaggagcagctcttcgcttggggttcttggtacttttacctgaatctgtccaaggtgacttctggaatgagtgtcctgaaggcaggggacaagcccaagggagtggagatcatcaccaaaaccagagcctcctgggtttcaatctcagtcccaccattcagaagctgtgtgcccttggagaaataatgtcacctctctgggcctctgttttcttatctgtgaagtggggcaatagtgatgctgctcctacagcagctgtgagattctagcaagctttacctggaaagcatgtggcacacagaggtgctcagttacacgtcactcctgggacctttgtcatcatcttgtcttcccattgggatcaacgcattgaagaaactgcaaaagattgctgggtgcggtggctcacgcctgtaatcccagcactttgggaggctgaggtggatcacctgaggtcaggagttcaagaccagcctggccaacatggtgaaactccgtctctactaaaaatacaaaaattagccaggcatgatggcaggtgcccgtaatcccagctactcgggaggctgaggcaggagagtcgcttgaacctgggagacggaggtggcagtgagctgagctcaagcaactgtactccaacctgggcaacaagagtgaaactctgtctcaaaaaagaaaaaaaaaaaaaagaaattgcaaaggattgttgtttacctggctgagtagctgcaggtaaacagcttgaagctgggattgggggaactgtggggttgaaacccctccctctctgtcccctggagtaggaccacctgagatgggggtgaggttcagggggtctgacacctacctcctgggagatgagcatagagagagtagtctccattccccacccatccctctccctagcccgtctcctgcaacactgtgcaggagggagccaggctggggtgtactaccatttcacatggggggaagtgggggcatagggaggcaatgggactccccaaagtttcctctggagctgggagggaggcctgggttcctctgtggggattacagaggaccttgaagtctctttgtggcaggctggtgtcatgcagacaggggcaggcagcgacgtgagcacttctgccatctccagtgagggatgcgctgctcaggtgaggagagccttgctcaaggtgactgtgagctcctgacttctcagtgtgctggcaaatggaccccatccatcctgggagggagagagcctgactctcgccccacatggcccgtcagggtggccataagctctccaggcgcctggggagctccctcgggaccccagcaaccgaagacaatgcctggttcccagcagcccagcgcctgtcgggtgaccttgaggactcaccttccctggtggcggctgctgggagtggaggaacagggctcagtcacaggatggaagcaggtgtgtgtgtgtgtgcgtggagtgtgggtaatatgtaaggataggcatctccccagcttttttggggggaggagagcatccagctgggtatcctcccgggtcctaccagcctgtcaggcaggaggggagacctgggagagactgacttaggctgacctggggtggatcgaccccgaggccctccctgagatctgagctggcatctgcttccgcaccgtcgttctgactcctctacccaggactagttacggtcaccatcacagtcagtaggactgtcaatcattgttttaagtactgatgtatatccacctagttggtcctcattttacacatagggaaacggaggcagagagggcttaaatagtctaaggtcacagggtgaacacgcactcagtcactcccttctgtggcactgcctcagggggccacatgtgctgggaaatgctgttgtcctgaagcagctcagcaactgctgggtcaagagaggggcaggtaaggcgctgagggccttggaggaaggaggaccacgacgacagctgtgtggtgtgtacagttgtgtggggtgtttgtgtggggtgtggggggtgtatttgtgtatgatgtgtgtgacgtggcatatgtgtggtgcatgtgtatgtgtggtgcgtgtgcatgtatgatgtggtgtatgtgtggtgagtaatgtgtgtgttgtctttgcgtgtgatgtttgtgtgtggtgtggtgtatgtggtatgtgtattgtgagtggtgtatggtgtgagtggcatgtgtgagtgatgtgtgtgtgtgtggtgtgtagtgtgtttatgtggtgtgtgtgttgtggtgtatgtggtgtgtgtgtgtgtgatgtgtgtggttgtgtatgtggtctgtgtgatgtgcgtgagttgtgtgtgtgtgaatggtgtctgtggtgtgtgtgaatggtgtgtgctgtagtgtaggtggtgtgtgtgagtggggtgtgtctgttttgtgcgtgtgagtggtgcatgtagtgcatgtgtgctgtggtgtgtgtgagttgtgtgtgtgctgtggtgtgtgagtggtgtgtgtggtgagtggttgtggtgtgtgtggtgtgtgtgtggtgtgtgtgtgctgtggtgtgtgtggtatgtgtgtgttgtggtgtgagtggtttgtgtgtggtgtgtttgtgtggtgtatgtggtgtatgtgatgtgtgtgtgctgtgtgtggtgtgtgagtggtgtgtgctgtggtgtgtgagtggcgtgtgtaatgtatgtgtgctgtggtgtgtgtggtgtgtgtgagtggtatgtgtgatgtgtctgtgtgctgtggtgtgtgcgtggtgcgtgaatggtgtgtgagtggtgcgtgtgagtggtgtgtgtgtgtgctgtggtgtgtgctgtggtgtgtgtggtgtgagtggtgtgtgctgtggtgtgtgtgatgtgtgtgagtggtgtgtgtgctgtggtgtgtatgctgtgagtggtgtgtgctgtggtgtgtgtgatgtgtgtgtgctgtggtgtgtgtgtggtgtgagtggtgtgtgtgagtggtgtgtgtgtgtggtgtgtgtgtgctgtggtgtgtgtgatgtgtgtgtgcgcgtgtgagggaaggaatttcggaggaggaggtggcaggtggcaggtggcgcaggtggcaggtggcgccggcacttagccaccaagggtggaggagggccttcaggaggaggaaactagcggcgagcagggggtcagaggaggtaaacgctgtgaacataccgccaagtccccatgctgggggtgcaaaacattgtcatgaaggataagattggggggctagctaggacaagattgtggaggacactgattatcaagctggaattatgcaatttctgtcgagagcacctggtcaccaccgcaggtctttaagcagctatggatgggaggcgaccctggcagcggcgggcgaagatgagttagaaggggacaggaatgagacaagaggaagggagggaagagacgaggtggggaggacgggaaggcgtgcagggagtgggccggtgcgagagggacatgggatggagtccacaggggaagagctggggactccaggttttctggtcaggagagactggagacgccactgacagaaagaggaggaacaggtgtggggagaactgatgtttcttcgaccagagccatctgcggaaacatcgtctcctccgtggggcccagctttcattcctcacagcagtgatcactgcatggcaaacaatcacattcatctattatttgtttcttgtctttgctcaatcagcatataagagagtacgaattccatctgccgtgttcacagcgccatccccagaacctacaacagtgtcggcttctagtaggtgatcgctaaatattttttgagtaaataaacgaatgactcatgtcgtgctggagggggactgtgggacaagcatccaggaggactggagatctccaggagggacgtctgagcaaacaagaatgtcccacacgtggaggtcactaagcccaggctgtgtctgagatggttctaagagagtaagagagaatgcacagaaagaaaccggatcacctcctatgcccccagcgcctgcacaaagcctggcacacagcaggtgttgcgtgttggttgactgaattaatagatgaacctgctcttcggcgaggagtgagacttcctgtgcataaggggctcgagcaggaagacagctggccgagagcgtgcgctggggtccagaaggttgcctcagcttcacaggtgcccatgggtaacgtgttgtggttccccggagactctgggcgggaggaagtgggaccatagagaggggcccacttgggtagagcgtctacctccgagaggtggaacttcattgggcgagtgggtagccaatgaggaagctccctgaggaagagcccgcccctggaactgggccgaggcaccgcccccgcggaggaagccccgcctctccccgtccctaacactgaggccccagaggcgaactgtcgggactcccgggctgcttggtggcctgagaggcccccgaagggctctgggctgcgccttcatccgctgctttcctgtgtgacaaccccagacctcatccttcagggggtctccattgcctcaggttcctctttttttcgagacggagtttcagtgttgactcccaggctggagtgcagtggcgtgatctcggctcactgcaacctccacctcccgggttcaagcgactctcctgcctcagcctcccgagtagctgggattacaggcgcccgccaccacgcccagctaatttttgcatttttagtagagacgggtttcaccatgttggccaggctggtctcgaactcctgacctcaggtgatccacccgtctgggtctcccaaagtgctggcatgagccaccgcgcctggcaggttccttttcatctagaaagaggccttcaagggttagctctggtttaacaaaatggattcagtgcttcctgtaccaggcgctggtctacgctcttttttgctttttctttccctccctccctccctccctcccttccttccttccttccttccttccttccttccttccctccctccctccctccttccttccttccttttttccttctcttctcttcccttctcttcctttctgtttctttcccataatgcatttattttgtcatacttttagtgacacgggagctttcagaatgcagacttgaagatacacggtgatctatgtgaatggtctgggctctgaggaaacaccttcagaccctctcctcatgggcctcaccatctatgggtggaaacacagtaaacaaacccgcagtctcttctataattacacattgaataagtgtgtcaagaaacaaaataatggggcataattcaggtagcaatactgggaaagtgacatttgagctgaactagagagcagggcactattggcagttggagaagtctccacgctgagggaacaacatgagagaagtccccaaagctgagatgagtgtgctgcatgtagggcgaagcagccaggctagacggggaggtccgaggtaagagcagaggagagcaggccgtgcagaactccttcgaatgtttttataataggagtttagatggtttttttctcgggatactgggaagccactgaatatttttacagggaagcaccatgtgattttcaaataattactctgactttgtgtgtagaacaacttggggaagagcaagaagatttctgttgaggtggctgaattttcctctttatggcaattagaggcaatttgagatgaggcaacacccagaaccttgagttgaagggcagtacatcagaagaggcacagattatccctaatcctctccagaaatatatgagcttgtgtgtggccttgggcaaacgactttcaggactgagagaaggagtggagggaggggggaatgcatgggatgtctcacaagccacataggtctgcccaggtgtcccgcatatcccagtgcattccctataacctgtcccagagtggttttcctttttctatcacaatcccaattttcccagctgaaccattctccagtcctgggctgggttctgccatttccttgctagaagcctccagccttcttgcttccattttctggttcctgagaggcacttgcctgtaagaaatctgactctctgaatccatagttgaatcagggttcaagcagttcatagcaagtgaaaaatgtcctgtctggccacccagcagtgattggagaggaggctgagttgatggtcctccaggctgtacagaccatgagagcagggatgtagcaggtcctcaataagttacttgttgtttggatggtaccttcatcatgatttatcaattctaacgtgccatcaactgtaggaaacactgtcaattcatcgacaactttgcaggacatacaaaagatagacatgacattaaatatacacaccaattataagatacattctaacaggaacaccaacatgtgaaaaaacaatgcatacatttgagaatcgagaacttgtgtagtaacaatcatctctctaagaaccagtttgcaaaccaacttgtgtggcccatttagctgtgaagggcttgttgctttctcattctcctgtgagtcttgcttttctgtagacacatccccagtcctgtggatttctgaagcccagttttcctctcctccagaaagtagccacggcccccatcagcagatgtgcatggttgagctccctaggccatctcgccaccgactttgtaaatgaccagctccacaacatattttctttagagtttacaggaataatgaaagtgacatagaactgtgcagccagattcaaatgaaaggacaaatgtagttggccaaaatgaacaattataggaaacaaagggaaaataacgattaaagatctttcattacagcccgctaattatcatgagttctggacttaactgttcaggcatagaattaaaaaccttaattatattgtcacctttgtctctcagctcccattgccacaaatgaatccatttactgtaagtgctgctgatgagcagaaattgatggcagtcccagcgaggtgggagagggggcccaggagtgtgtgtgggggggtatgccaggcagtactaccaggcccacacagctgggtggcatctgcattccaggacattataaattagaaacacttttaatgagacaaatacaggtttaatggattttatgatttcttctccccttcaaaccactaacaatgctcctcctctttctttctttctattagagccagtctcttgttaagtgattgcattaatggtctttgtagacaggctgagtgtgggaggacaagagggacttcccttgtgagggcattggaaggctcttctctctgaaggaagacaattctcggctgttgttccaaatgggagcattttaaagcccagtgcgatgagtggaaatgcgagatcactttgagagctagggaaattggaaaagaatgcagcagactggttggggagataaaatcctcaaaactagccagttagttcttttgagagagaggccagccagttcagtgagagccaggcgtggctgttggagagatggccaggtggtcaatttcttgacttcagggtgggatggggtgcggctgggagtgaggagccctagaattataatcaagcatagtattgtggttctggacacaaactcaggagccagactgcctggtcttgagtccatgctccgtctctttctgtgtgactctgggcaatctacctgacctgtctgggcttccgtttcctcatttgtaaggtggagctattgatagtacgtacctcatagggttgatatgaggattaaaagagttaatatgcatcaaggatagacagtgcctggcatattagaagaactacataaatgctaactataccaagtaaaaaacagccctgaattcaaatagtcttccacctaatggcaatgtgaccctggatatgttaacctcttcaggctttcatttcttctataaagtgaggggagccaccccatatactttagaggtttacactggggaatcgtgagaaaatacgaatgtacaactgttgtgtacaattactagataaactccaggtctgccttgcgcctgcttagatttcagtgccaggcagagaaagggcgggcaagtggtcatagagaaacttaacctaaaataagctgaaagccctgtgctaacaaacacactcagtggccatgggtatcttgggtgaggggttgtttctggaggcaggggctgtgccggatgcagagtaggagctcaggcaatgtggctgccatcactgtgaatgcattgaggtctctgcccatccctgcgtagctgtggatggagcgcagtcccaccctggtgttggtggcgtgcctatctcctatctttgggagagtcgggagccagtgttgccatggtgatatggaggagttaatgggatggaacttgtcacagagctgatggtgggatggcagcggtgactgcactgtgttaagatgctagaaacaaaagggtgagcaccttggccacgcgagattgtgaccaaacctagctcgtgggggtctcaggttctgccttccagagagcaggagggagtcttggctgctgaaggtctttcctcccactgtctctgcatccatggcccccagtcccacccctgattcttcagagaagggacccgaggaaggacaaagacaaagacaggaaagagatgtcagggagctgccctacaggctgggcagagggggaagggggcaccaattagagatgggaaccaaggggcaggagagaaaactgtgcccccacccctcttgccccaggcctcaagagaagaccccagacaactgggtctcctgggtgaccaggggcttctgtgtcccttctcctatcacttttgtctctccaaaaaccttgaaagtaacaaaagcaaggtttattatccccattttcctgacaagcaagctgagactcagtaaggtgggagccctccccagggtcagtgacagagttaggatcagccttctacctgtaggtcccatgtcatttttcctaaaatcccaagactggcaggactttggggtcgggagtgggtagagcctccactgctctcactccaggccttcgggtctttgttcagaagcccaggccctttcttcagccttgaactcagctctctgtgtgccagaagccaactgggtgagagcagttgctccatcagcctgtccagctcctccccaagaactgggcactgcagaactgacaagggcttggtggagaagagcgggtctgagtatcggggagggccagcctggcccgcttccttccccaccatgtgccccctgtgtgaccttggatcagcttcctacctctgagcctcagcgtcctcatctgtaaaatgggacaaacaggacttgcttttccacctcacaggttggctgtggatgttgaaacacctagtaaattgggtacaatggctgtgaagaggcacgagctgggaggctggtaggtgtggagttggcctggtgccactgttgctcctgaaaccctcaggagaaagcctgagttcccagcctggccctgccctcctgagacacttcccgatgcagcacagccctcatcttgccctccactttaccatttcccaaattcgcaagaccaaagacacatttaggtctttgctctggttggttctcccaccgtacctcccttagcctgtcagtgctgacttctgctagaatgcttctcggagtgcagaacctgtgcctcctctgtgacccactgtacggcagaatcatctgccaggaccatttccctatttgcagcccctctcctccctcagactaagcatctgaaggacctggtccagtgagtgtttgctgacagccctatgagtatgggctgcatggctgtcttcactgcacagatgtggagacagaggctcaagtgaggcaagtgactcactgaggtgctcctgtgggctagacgcagaagtcttcatctctggctactggttcagtgcagtgctgtctccccttattcatctgggtcccacacttgaggtcaggtaagttggtgagagcacacctatatgaatcacagttcatttaactgcagataatagaagtaactttagttgtttaaggaaaaaaagggatttaagacaggggactaggcgcttacagaatcatagaggggtgagagaagcagggtctcagctaggtctccaaaaatgacacccagaacaacactggagaattggccggccagaagagcccccgcctctgccacaatcagggaagtaggggaatccagaagcagtcaccagcgagattcacaacagtaaaacaatgatgcccagggcgctgcttcttgacctactgggacttctgcagatacctctgcacaagccgaaggagcaaagcagaggcagcgcggcccctgcctcaccttaacatccaaaagcacttactcaagtgcatctgattggctggacccaaaccacattttacctgccagggcatctgagaaatgtacttttgggtcttcttgactctatggtacaggacaatccactggaaggagggtggaaagaatactgagtgccaagccaccacatctaccatgcagccattaggctgatccaggccaacagtccagggaccgaatcggaccaggagggttgtttacccaggggagaacctgtgcttggccaaaagttcccgcagtgccacattttaagaaaagtagcactgcacttcctgagactacagatagatttctatctgtaactggtgagtgaccttggacagctccctgcatacacacatggacacattacatgcaactttccgtggggcaagcatgacagactgatggggaggagactctacagcttaatctctgcctgagtctgtgtaatagaattgttaaggtctctggggtcgggcccttgccatccgaatgggtcaccgttctgtgagcttgctttattctgctgccatttgctgaaagccagcagccaggagtgattcagagcacgggcatggacccacacctgactgttagctgagcatgagctcttcctgctccgccagagctacttcaaagctggacctggctcccgccttctgggctgggtttccctgtgccctctgcttgactacgataaggttacactcagggaggtgaggtgatgaatgtgtccccgccatggggccataggtgaaatcttctgccacataggatccatgtgaccatggacagctgttaacccctctaagcctcagtgctctcatcactaaagttgctttcctaacagtgccacctcgagggttaaaatgaggatgaaaggagacaccatgcatgtcaagtgctcagcacggtgcccagcactcagtatgggctcaaaaacaactgctttgctgtcgtcatcgactttgcttcaagccagtatccctactgacaagtcacgaccagggtctcaccattcctttgcctctccttgtgaaggtcactgcaggggctgccccggagcccactgaacccagttgtattaaccatttggtggctgacaaggagctgatcttgggtcctgaagaaaggaatgggtgagtgagaaaactgggccagagcttcttggccctggctgtgcattgaaaaaatactgatgccagctccactggcagagatcagatgcaactggtcctggccagtgcctgggcatcatgatctgtctatcatctatctgtctgtctgtctatctatctgtctgtctgtctgtctgtctatctatctatctgtctgcctatctatcaatcatctgtctagctacttcctgatgatgctcatgggtaactttgacggagacgcactgaatcaggtgctctgctatgatttgacttggttaggacagaatagtgatggcccttacatcttaccagtgtatattcttagtcctctgaatccttgcagggtcggaattaagatcccttccttatgaatgaggaaagtgaagcttgtggggtttgggtgaccccaattcaccagcctggaagggcaataaggagaaagaagagggtcacttttgtggccttgttatgtgaaaatcccccagaagaattactatcaatagagaatctttctctaggcccctgtagctttgcagaagctgagggtttggactgtctggtgagggtcaggttgcttgttctgtcttcctctgattccagccagacttcatctgctgctggagatgtggaaggggccctaccattctttgaggcaggcttcaacttgtccacagccaggtaaagagaagcctggcaggaagaggaaggaattcctgcttggaacaaaatacgggtccttcaaggggacccatctgtgtagtggcttcttttttattattattatactttaagtcctggggttcatgtgcagaacgtgcagttttgttacataggtatacacatgccatggtggtttgctgcacccatcaactggtcacccacattaggtatatctcctaatgctatccctccactagtccccccaccccccaccaggccccagtatgtgatgttctccaccctatgtccatatgttctcattgttcaactcccacttatgagtgagaacatgcagtgtttggttttctgttcttatgatagtttgctgagaatgatggtttccagcttcatctatgtccctgtaaaggacatgaactcatccttttttatggctgcatagtattccatggtgtatatgtgccacattttctttatccagtcgattactgatggacatttgggttggttccaagtctttgctattgtgaatagtgctgcaataaacatacatgtgtatgtgtctttatagtagaatgatttataatcctttggatatatatccagtaacgggattgctgggtcaaatggtatttctagttctacatccttgaggaatcaccacactgtcttccacaatggttgaactaatttacactcccaccaacaatttaaaagcattcctatttctccatatcctctccagaatctgttgtttcctgactttttaatcatcaccattctaactggcatgagatggtatcttcttgaacccaacatgccctgaaagcaggttgtcacaaggggttggccggaagatcagctgctccatcttcccagtgaggtttcacctttcaccctatgcctagggcacattcatcatactgagtgcctcaaacattgaaagagatgggattatagatggcaccaggagaaaaatggagctccagctcctgagtaaaatgaatttatctattcccagacccaggtcagacaacgctggctggaggaagtcatttatctctttgagagatgattctagaaatacaatcgtggatgtgtcaattccatgctttccgacttaagggtgagacaggaagaacggaagtgtcttctgcctctggaagacagcgggaggccccatggtgaccaactgcgctgcctgacagcggggtccaggcctcgggttctgattactacagccttttctgaattggaggctgtgttgttcctcttcacttccttttgattatctccgggcaattttgagagagccagggatgaattaagcagagctggtgtgcacattattatggcctctctctgggcttaaatggctctcttgaaaataggcctttttatttatcctctcatctcctctccttaaattgtagcccagccctaaaggtgtggattgattgtgcatatcctttgccttgtaatgagcctgtttatcacttctgtggatctggaaacaggagaggagatggggccactggggactgcctgctcccaccaacctctcctgcccacttagaccaaaggcagctctgccttcaaccctttaatttttaaagaagccacttgcacttcgcgttaggaactggtgggtgcaaggtgtatatgatgagtaactagagtttttgtttatttccttatgagtagatggatcttggcccaggacagctgctgtgaaaggtccctttagacgagagaagccacacccattcacttactggacccaggctggtggtggagtcataaaagtggccctggacccagaagaggaggccatgcccagacgcactaccatcagccaggggcgttgagattccgtcccaggacaatgatcatcagcctgacttccgattctgattcagggagttaatggcaaagctgagactggaggctgggccactggacctttctacaagatccttccagtctctccttgatcttgactttgttaacattttaactctttcataactgtttgcagaggatcagaaagacagagcccacactgtgtgcctgggcttgtgccccttgcagatacgggtggtcctgcaggcaacatgatcttctcagggcactttgagtggacttcgggtcagagggaacaacgctggctaacggggctgttactctgtactgggccctgggccagatgcttcatgtgcattaactcactggatcctcacaacagtatccccactgtgcagatgaaaacgccgaggcacagagaggttatgtaatttgcccatggtcacacagctagtgagtggtgaagccaggatcaaacccaggcagtctggcgcctcagcctgagctcttcccatcactccagagagcctgtgccaggtcttgggaaacaggcagggaatagtctgttgatgtttcctgggtgccctgctgccactgccctggctcagcccacatctctcgcacctgaccgcattccagcctctccactgagtaccatggctgtagcgtagcccacccaaccatccgctactcccgcctgcaggaccatgccaacacagagagcctcctgacacgacactcccgttgttcctccccagccctctttaatggctcccaattgtctgatttctgggtgttcccaacccatctagtctgatctcccaccacacctttcatggatcctgacagccaaacaaggatttaccaacttgttcatacaacacttttcccaccttccagcctttatccaagctgttcttcctgcctggaatgcctgttctcacccgcccatggctctttcatgactgcttcccaggccctgtgcttggcaggtgctcaccaacgggatactatgtgtccatgttgctttgttgcagaggaatttttattttttctctttctggatcctaaaaagaatacaagttcacattagaaaatctggaaaattgagacaatctctcagagaaaaattaaagatagcctgaaatcctacatccactgtcaatattttgatatatatcttttcaatctttcttttcatttttaatattgtgaaatatttcaaacacagacagaatggagaataatataacattctctggtgcatccaccttttcttttatcaacccagtagtttttcttttcttttttttttattattatactttaagttttagggtacatgtgcacaatgtgtaggttagttacatatgtatacatgtgacatgcgggtgtgctgcacccactaactcatcatctagcattaggtatatctcccaatgctctccctccctcctccccccacccgacaacagtccccagagtgtgatgttccccttcctgtgtccatgtgttctcattgttcaattcccacctatgagtgagaatatgcggtgtttggtttttttgttcttgcaatagtttactgagaatgatgatttccaatttcatccatgtccctacaaaggacatgaactcatcattttttatggctgcatagtattccatggtgtatatgtgccacattttctttttttttttttttgagacggagtctcgctctgtcgcccaggccgggctgcggactgcagtggcgcaatctcggctcactgcaagctccgcttcccgggttcacgccattctcctgcctcagcctcccgagtagctgggactacaggtgcccgccactgcgcccggctaattttttgtatttttagtagagacggggtttcaccttgttagccaggatggtctcgatctcctgacctcatgatccacccgcctcggcctcccaaagtgctgggattacaggcgtgagccaccacgcccggccatgtgccacattttcttaatcaacaacccagtagtttttctatggatattagcaaatttagtttgtttgttttccttgagacagggtcttgctctgtcacccaggctggagtgcagtggcttgatcatggctcactgcagcctcaatctcttgggcccaagcaatcctcccacctcagcctctggagtactactactctaggactacagatgtgcaccaccacgcccagctgcaaatttagttttaaacattttgggataatgatctacaaattatccacactgttttgaaagctgattgtcccctggccccttccccatatgataaatcacaaatacttttcaatgactaaagaatattctctgaaaaaatatacagtaggttagtcagttaaccagtccctaattttggacatttataattattataagcaatactgcacatccctgactatttactaagaatatattcagagaagtagaattacggggtcgaatcatataaacattttgatacattctgctaaattggcttttcaaataattttactcatttccatttccataagcagcatatgagaatatcaatattgattcatcttagtgagcactgggtattatcacatttgtaacatatcgtctcttatgaatgaatgaaggaatgaatgacaagagcctttcctgggagggataatgtctccttgtggtgctgctgtcacactgccactctccttgtgaccagctcagatcccctgcctgtgcgaatgtgtgtgttgctcaggaggggaggtggggaggtgaggatagggggctgacttccagactatttcagtgtggcttttagatctcagccaattctgtgaagtgaccgtgcagccaaactaatcacccttccttgggccaggttaatgtgctcctctcttgctgcttggatcaataccgtacttactgcagattagctaaatgagccagtgcagctgggaatgagcttctagagacaattactatggaaaatgcagccatattttagtgggcaccacatgcatgaggctctttgcaaatatcaatatatatttgcttgcttgacagaaatagatcaaacctaagtccggagattaatccagatgatcagagtgtacatgcttcttgttgtgcatagtgtggcggaaccttgaccttttccatggttgctattgttcggattgtgctggaagtaacccaaaatgggctggtggttggcccatgcgattgtctgcaagtttattgcaggtacaaatagtaatgaggctgcttatggtgataatcgtttatctcacttgatcttcaccacaaccttgaaatgctcactaaatgtttatttaataaattcattcattcccttaacaaataatgactgagtagcctttatgtacagggccttgttctaggtgctggagaaacagtagtgaagaagacagggcctttttcagtggaacttgcagcctggtgggacaagagtgacaataaacaaggaagccatgcgcatggagaagtaatcacgcattgaggcaagtgctgcaaaggaagacggtgccgtgtaaagaaaatatatagggtggtggtgcttaatttcaataggggggttggagaagtcttctccgagggggtgacattgaggttgagatttgatggatgagaaggagcgagctaggacaagagaagaagagagacagtgttctcagtggagggaccttcttgtgcagagggcgtgagctggaaccagaccagcagttccaaggaacggagaagctgccgtgcagggctggagtgtgatgagcaaggcaggaacagcacatcatccggtgagagaagcagacagcggccaggccacacagagccctgcagggcacggtaaggactttggattttattttaagggagaagggaagcagtcaaaggactttatacagggaagggatatgatccaatttacattttcaaaaggtcactctaggtcctgggtacggaatgaggaatattctatatccattttgatagctagttccagaaaaataacaattataagtagacaggctggcaaggtggggggagccttgggtagatcctccgaatggctctttgggaggtgaggatctgccacggctgcgggctctggttctgaatgttgtctgatttcacaacccatctcacagtttctctttcccgtaggagggcttgtcattggcagattcttagcccagtaaaaaggagaggcaggggatggagaggagagagctggggatctttgatgtcacccccacgatcccagccctggctgtcctggtgtgctggctttcatcccaaagaacagcacggagccccccctcactgcatgcgggggcccctctggcacagtggggaggtgccccgaagacagctcctcctcactcagtcactggggcgctggtggccagggctcagagagcaggagacctgaagattgggtggctggtcggcctggacatttagactgtgcctgggttcttccgattgctcccccacagtcctccagccacaatccatttcctgtccttgggctcagtaacctcccccttgcttttccccctgcagtcttcttggttctcacccatacgttccttactccttcacacaagcatcagctaaaaaaagccagcagccttttgtgtacgtttgaaaactggtgaccctcctaggtaaagaagtttggggtgtggggaatgaaaggagcatgataggaaagattcccattcccttcagtcgttgaaaagtgtaacattcaggatgtgtttaaatgttcaaagagtcagcactaaacaaccaggaatagaatgtgtatcttccaaactactggggaaagagaccggaggaagcataacccaacagatggctgagtgacttctaagatagaagaggcagagggaggaaaagcaggacagagaagaagttgaattcccttccataaacaggttgaacattcttctctgcccgcaggaaacctgggctgtgttctttcaggtggtgggtggagggggaggcatggccggaatccccagtgcccgtgggtgccagccaatgacttacacatctgctttcctcagttttaagttccctgggggcaaggccagacctagttcatctgtctatgtccccagaacagggaggttccattgctggagaagaataagagcacatgttgttattacccaacacaagctctgcccatcttttcggctaatgccatcttatgaaaggggtgaattcagatcctactctgaaggcaaagaaatggggcaaagtggaccatgaagctcagagacccacatgaatgtgaaccacggttgagaccagcagacagaaagctctgagtgtctggggatgggaagctttcttattccactgacttctctcgccatttcttctctttgtcttcctctgcttcctcctccctcttttgacttcagctggcagagttgcttgaaatgaagccgttccctgaaaagcacacatgaatttcccctgcggaaaattcaaacagacacacttgaggatttccactaaattctctctggcccccagagcactggggaagcatgtgagacctgtgccatcccggaactgtggcgacaatggtagttaacgtccatcatctgcaggcaccttcaggatgtggagcatgcagagatgactcacgcccacaccggtgacctccaacacaccagggaaggcaggaaaaggctgtgtgccaggatcttgttctgggctagaaaagtatgcctgttcgttacccgacctttgctaagtacaccaactaatggagcgagagacatgaaagatcttcacaggccatgtggaaatgtaattcaaacccagcccgaggaggtcatagtacgtgagtttaattttcatcctgcctttccttacaatgctaacctttgccttacaaaaaaagttgtttaaaaagagataagtcagtgtctatttggcatttgaaggagttttaatctgagcaaccctgttggaagtgtttccatttccttaggattcagttcaggaaaccgtgaattgatcctttacatcagaagtaattgttctgggtttgaaatctatcaagtattggaaattcaaattaagccatttgtgaagttctgtttaatgagggttatcaagtcgcttcttaatggcatctgtcggactcctagccccctctgctattcatacaggcccaaggcctcccattatatgccccatgatgcagccggatgggccccctctttgatctgggcatctctgccctcatacgtggtgggcagtcccaccctcccccactgctctgggagctgttccgtcccagcycctccatgtcttatctttctcttccactttctgttttctctcctgtcctctcttcccatcatcccattgcttctgttttctgtcttccttcccagcctcctgcctcttccttctttgtcacgcattcamcctgtctctcatcaacactaaggccagcacgtgtcaccaaactgcctcccatcagaggcctctgacattctccaagtcctccttcaacatgttgcattctgacagtatgagatcctgaattataaacatttaccacccactatttattaatcgcacttttatcttttggcctgaaactttgtctctcacctgctaccagctgcctccagagcatgggggttgggagctgatggcaagttccctgtgtcttttctgcagccctctgggttttacataatgtgattttgtgttctcgcacaaaatcatggtgctccagactgaaaaattctactcatcaggaaatctccctccccttagagcgctagaactgtctttttgtgggacttggtcagccctgagatttcttacaggagataaagggccgaattggagagatgcttggagagaaatggttgacagggcctggagagcatgtcgtggaggaagacattgacaaggtctcctcctcgtcctctttcctccttccatctctcccagtcaacccccaagccttggttgatgcccagttccctaaggtcactcatgaacttctcatgtgtttgttgtcattcctctttcctttaattctctctgcttcaaacttgggagaragattttctctgatgaatttttcaagaaactcccttcaggctccctgctgccctttccagccattctctgcttttggatccctgaggaccatccagagagcccgtgtgtcatttttaagaaactctgttacaaggcaagaaataaaggacatcctcaaatggtagtgcacccaggggaggtgtggagagggtggaatgacgaagcgcccgagacatatgctgtacggcaaggtccacagagctgggatgcccatggggtggggtggggtggttagagacggaaaaccaaatcaaaagaatttaagcaataacctggcggggcacggtggctcacacctgtaatcccagcactttgggaggccaaggtgggtggatcacttgaggtcaggagtttgagacccacctgtgcaacacagtgagacccaatctgtacaaaaaatacaaaaattagccaggtgtgatggtgggtgcctgtggtcccagctacttgggaggccgaggctggaggatcacttgagtctgggaagtggaggatgcagggccatggtcacgccactgcactctagcctgagtgaaagaatgatagcctgtctcaaaaaaataaaaaaccaaaaccaaaataaaacccctgaacccccaaaatggaaggaaaaatgaatatctattgactccatcgctgacattgcacctgtgggttctagggctttaccagcaccatcaggacaccccagtctcttgagagacaatattttctagtagtcatcactgcctggacttggagcctggccccacctcttatgarctctgtgaccttgggcaagtgacttcacatctttgtgcctcagtttcctcacttagaaaacgaggataaaagtagcactaccttctagggctactgtgactattaggtgagtgactatttgtaacgttcttagatcagtgtgatgcacacagtaggtacaaagtgagtgtaagcaactggatgtgtttcctaggcctccataacaaagtgccatgaactaggggcttagaacaacagaatgtattgtctcatacagttctggagctggaagtctgaaatcaaggtgctggcagggccacgctccctctggaatctgtagagatccatgcttgcctcctcctggcttctggtggtttgccggaattc

SEQ ID NO: 57 - DNA, 155989 bp, Homo sapiens
gaattctgcgagttggtgaccccctttgggccctcctccacttggatgtgatgttggtcactgaaaccgtttcctcctcatgtttgtctggctctcatttcaaagccgtagaggagcaaaataaacaaccatgtgttaggggtacctctaaagtgcaggcacgtgggtgggccagggtgcagctaaactgctgagtggatcatttcaataaaaccttatcctcagccattctccactgagcagagagagaaagagctctatttgaatctttgacaacagacatttcaaattccatgctgacacttaataggtgcctgatctttcattcgtgctggtctttctgtcatcagcaatgctagacactgggaatacaagaataaaaaagatacagtcgaggccttcaaagagtttacaatctcattggaggacagtgagatatttttagaagttaaaaacttacggatgagcaggagttcaccaaggggggcaggttgggggaaagtggactgggaaaacattaagattgtatttggccaggggacgtaagattttctgaatcccatccttgactttttggtcacagaggaagcaggtagtatattacttgctggagcttgggtcccagtgcccactgtagaacacctgtcaactactgcacggaggcaccttctttcctccgataggtctcagcagccttgagcaacattggatctatttctgtgccaaagtccaaaccccagtttcagctcttaaaaccccaatttgagcaaatgccttgaccaccagccctagaagagaacggacagatgagcagtttaatccagtaaccaaaggagcccatccaaggatgccttgaggccaggaagaaacaggaagaaataaagggagaggaccaggcaaagccttgggccacctcaccttgccagtttagggaaacaaaataaagaatggaccacattcatgttggttgcgatctttagctcttaactttgcgtcccccaatgatgatcaggaagagagatgagcattggggtttaggcaacgacaggtttaataggactggagtacagcccgggtgatgagtgataagaaaagaacagactggaatttagttaagacaagaccaaatcatgaagagtcttgagtgccacattgaggaatttgaacttaacctgaataacaaaagtgagccattgagcacataatgaggaaatgatgtgattagatcgtatttcggaaaaactctggctgctgtgtagaaaatggattggagggtgctatggtttgaatatttgtcccttgcaaaactcatgttgaaatttaatccccaggccgggcacagtggctcacgcctgtaatcccagcattttgggaggccgaggcggggggatcacctgaggtcaggagttcaagaccagcctggccaacatggtgaaaccccatctctactaaaaatacaaaaattagccgggcgtggtggcacacccctgtgatcccagctactcggaaggctgaggcaggagagttgcttgagcctgggaggcagaggttgcagtgagccgagatcgtgccactgcactccagcctggctgacaaagcgagattctgtctcaaataaataaataaataaataataaaaataaaaaatttaatcgccaatatggtagtattgagagacggagcgtttaagaggtgattggtagagccctcatgaatgtattgatccatacatggattaatgggctatcatgggaatgggactggcctttataagaagaaaagagacctgagcaaggatgttaagccctttcaccacgtgatgccctgtgccacctcaggactgtgcagagtccctagcagcaagaaaaccctcacgaaatgtagcctatcaacctcagacttctcagactttgcaactgtaagaaatacattccttttctttatatattgcctagtttcagttattgtgttatatataaataagcaacagaaaacagcctaagatagaggagaaccaaaagagaagaaaactggctaaaaagttttaggcatggggtgaaagtgacctgaactaaagcagagatagcaggaatagagagattttaaggtggtagaatcaacaaggcttgaggaagatgagattgattcaaggataacaaagatttttcacttggacaactgagtgacggtggtgccattcctgaaaatattaacagataatacagagaactatgaagagcagagaactatgaccccggttaaatcagattatttctgtgactctccacataaagcagaagggctgaagcaattggactagagtcaccactatacaattactaatgtcctctgagatggggatccaaagatatgcaaaggagaggcacaatagaaggattgcccattcctttttttccattaaaaaaaattgtgggccaggtgcagtggctcacacctgtaatcccagcactttgggaggctgaggtgggcagatcacctgaggtcgggagttcgagaccagcctgaccaacatggagaaaccccgtctctactaaaaatacaaaattagctgggcgcggtggcgcgtgcctgtaatcccagctactcagcaggctgaggtaggagaatctcttgaaaccgggaggcggaggttgcggtgagccaagatcgcgccattacactccagcctgggcaacaaaagcgaaactccatctcaaaaaaaataaataaataaaaaataaataaattgtggtaaaatatattatgtaaaatttattattttaaccattttcaagtgtataattgtaatttcaagtggcattaactatattcacaatgaattagctgggcttggtggtgggcacctgtaatcccagctcctcaggaatctgaggcagataattgaattgcttgaacccagaaggtggaggttgcagtgagctgagatcgcaccactgcactccagccagagtcaggcgacagagcgagactctgtctcaaaaaaaaaaaagaaagaaagaaagaaagaaaactgtattcacaatgttgtaaaaccatcaccactatccgtttccagaacatcttcatcaccatcccagacagaaacccattaaataactttcagttccctcctcccctcagcccctggtatgtctattctactttctgtctctacagatttgattattctagatacctaatgcaagtggaaccatacaatatttgtctttttgtgtctttctggcttatttcactcgcataatgtttacaaggtttattcatgtgacagtatgtattagaatttccttcctttttgttttatttttatttatttttgttttaattattttatttttatttattttggcaacaagagtattgctgtttttgccaaggctgggatgcaatggcgcaatctcagcttaccgcaagctccacctaccaggttcaaatgagtctcctacctcagcctcctgagtagctgggattacaggcatacgccaccacacctggttaattttttgtactttttgtagaaacagggtttctccatgttggtcaggctggtcttgaactcccaacctcaggtaatccgcctgcctcggcctcccagagtgctaggattacaggcgtgagccaccaagcctggccttactgcttttagttcttttgagtatatacctaggagaagaattaccgcatcataatggtaactctgtgcttaactttttgagcaccagactgttttctataggggctgcaccatttttgcattcccaccagcaatgcataagggttctaatttatccacagtcttgccaacacttgttattccacccccacccctacctttttcttcataatagccttcctaatggatgtgaagtggtatctcattgtagttctgattcgcactccctatttcactttcaagcttagcacaatgtctgtttacttgtatttgccccagcctggcttgtaaatcattattttatttgggggttaatgagggagtggaggagagaaattgtaagaaaatactgaaggggcgccgggtgcggtggctcaagcctgtaatcccagcactttgggaagccgaggtgggcggatcacgaggtcaggagatcgagaccatcctggctaacacggtgaaaccccgtctctactaaaaatacaaaaaattagccgggcgtggtggtggtggtcgcctgtagtcccagctactcaggaggctgaggcaggagaatggcgtgaacccgggaggcggagcttgcagtgagccgagatcgtgccactgcaccacaacctgggcgacagagcaagactccggtctcgaaaagaaaagaaaagaaaagaaaatactgaaggggctatttcatgaaaaacgataagacaatgatagacctaatagcatataaaaccagaagaggagcaagatggtatttcagagtattacagagtaatactttgcagccttagcaactgaaggaatccagataaggtagacccaatggaatttgtaaccatgctcagcaaaggaagtgaaaatagcaatgccaagtggaaggggctgaggcaggagatgaaatgaaccaccaataccacatgactactttccttcacaaacacatcacaagcacatgtgagacaactatatggtttccctgaaatgcttggggatgtaaattgcagggtgagagccagagcgaaagaaaacatgctgagcatttttcctcactattatcacattaataaacattagtttctatttccttaggccacattcctaaaggtggaattgctaattcaatgttttgaaaagttctaatttccagagagatcatagcaatttatttgtttaatcatttatttttatttaaatataagggattgaattggtcatatttctcacttgtaaggccactctcatttgttatatttatttattctcttttattcacattcactaatctcattcccctttctcaccacaggcaattattccgatgtgtttcatgtatatccttttgtttgtgtttatttaaaatatgtagtattgggctggacatggtggctgacgcctgtaatcccagcactttgggaggccaaggcaggcagatcacttgaggtcaagactttgagaccagcctggctaacatggtgaaaccccgtctctgctaaaaatacaaaaattagctgggcgtggtggtgcacgcctgtaattccagctacccaggaggctgagacaccaaaatcccttgaacccggcaggtggaggttgcagtgagctgagattgcaccattgcactccagcctgggtgacgtaatgacactctttcaaaacaaaaccaaaaccaaaacctcccaacaaagagatttttcaaaaaaaaaaaaatagtagtaggataaaatatgtactattttcttagatgtgtgtatttttttcttttgtaaataacattgtaagacacatttttttttcttatttttcttttttgctgcagcatgtttttaagatctggcccattgcttctatctactgcatattactccacccatcacattttgcctaaggtcttcttcattagggacacccaaattgcctacaaccaaaaacatcactgccataactgtctttatacataccccttatagaacctgtgtgagaattttaggagggttgtatatatagtatcagaattggaattttatatttttttctctgttatatagtttttgctttcatatttttattattggtaaggataaatgtgtgtgtgtggtgtgtgtgtgtgtgtgtgtgtgtgtgtttcttcaaccacagtattctaggaattttctgatcacatccttagccctatcctctatggcttctttaaagactaattgagtctgtaattgattgtaatacattgaataaatgtaatgcatgagtccataatgatgctcaaagagcaagaaaagagaaaggaggaaaaaattcatttgccactattggaaatactatgacaccaactcctttgtcaggaaattggtaattaaagagaaagaatgaagcatttaacctgccattttaggaagaaatgaggttcatccccaattgatgagaggaaattcttctttacagaagaatgtcatctaataaatgtagaaggattgatagaattaaaaacttaccattttgcaatctccaatgagataattgattcaagcaaggatcatcagtgaatgttaaactatttaaaaagaaagaaaaaagaccaatctaccattgtatctatttcccaccattcacttgctctacaaacacttccaatttgacttctgctcctaccattctattaactacatgcttgaaagacaatgctggcttctcaattgccaaatacaatggtcttttctcagttctcatcctccatgatctcttcatggtatttgacaatagcagccacctcctctttcttgtaactctctcctttcatctacaaaagactggctatccattgctgtataacaaaccactctaatatatttagaggcttttaaaaatttattgttatttttcatggttctgtgggtagactaggctcagttgggtggttctcacttgggatctctgatgtttcagtaaatggtgtctagggctggactcatctgaaagcttgactgggctagacatccaggaaggcttcttcactcacttgtctggcatctcgaaaggatggctggaacagctggaggttaatagggcaactctctgtctccatgtgactggcttgggctccctaacagcatggtagactcaatatagtgaagattaaactctgattttttagtttgtccaaattcctacctaagggccctggggactcatgccctacaaaccataaagtctcatcagaggggttttcattttaactctgtatagtgtggtctgttttctaacctgactctggcataacatcacataacaaataagggaagaaatcaaaatattttaaccctaaatataattccttgccatatcttgacattgccctgaaaagttgtctcttgtgggaaaaatccacattccatagagaaacccctttcccgtttttttccttccttcatttccagatccaggagataatcaactaagagccaggcacccttttacatcggataagaaacattttacaacctgttctttctgaagtctgctatctgagagcttcctctgcacaataaaacttgtctccacaatcctaacctaaacatttcctttctgttgatcccaggtcttcagataaactcaaccaattatcaactggaaaatatttaaatctacctatagcctggaaggccccccctccgccaaaaaccaatgtacatcttaaatgtatttcattgatgtttcctgtctcccaaaaatgtataaaaccaggctgtgccctaaccacctcagacttttatacatttttggaagacaggaaacatcaggtctcaggatctcctgagggctgtgtcacaggccacggtcactcatatttggcccagaataaatctcaaaatattttacagagtttgactcttttcatcgacaatagataagacttcttacatagtgcctggctttccccagagcaagtgttcccaggtggaaactgcaaggcttcttaagagacaattcatgctctttctcacccaatatgcatcatctactattttcagcattggtttctttagagggggaaaaagaactgaaagacttttccaaagctgagtgtaaaatccatctatgtttttattgtttcatttctattttttttttttttttgagtgtctgtcacccaggctggagtgcagtggcgcgatctcggctcactgcaaggtccgcctcccgggttcacaccattctccagactcaccctccccagtagctgggactacaggcacctgccactatgcccagctaattttttttttttttgagacagagtttcgctcttgttgcccgagctggagtgcaatggcgtgatctcagctcaccacaacctccacctcccaggttcaagcgattctcctgcctcagcctctctagtatctgggattacaggtatgtgccaccatgcccggctaattttgtatttttagtagagatggggtttctccatgttggtcaggctggtctcaaactcccaacctcaggtgatccgcccgcctcggcctcccaaagtgctgggattacaggcatgagccactgtgcccagcctaattttttatatatatattttttagtagagacgggattttaccgtgttagccaggatggtctcgatcttctgaccttgtgatctgccggcctcggcctccccaagtgctgggattacaggcatgagccaccacgcgcagcctattatttcatttctaatgatgtgtctatccatatctaaccccaaagcaatttttaaaagaagtttttgtagagatggggtctcactgtgctgcccatgctggtctcaaactcctggcctcgagtgattctcccccgtcagcctctcaaagtgctgggattacaggcgtataccaccacacctggcccccaaagcaattttgaaatacctttatcggccgggtgcagtggctctcgcctgtaatcctagcaccttgggaggcagaggcgggcagatcacctgaggtcagaagtttgagaacagcctgaccgacatgaagaaaccccatctctactaaaaatacaaaattagccgggcgtggtggcgcatgcctgtaatcccagctactccagaggctgaggcaggagaatcacttgaacccggtgagccgagatcatgccattgccctccagcctgggcaacaagagtgaaactccatctcaaaaaaaagaaatacctttatcaagtctttcaaaacatttagctgaattttcatagaagcaggaacaatctttacacttgcacttgtgtttccacagtttacttaatatttaattatgtaatgtaatttctgtaataaataaaactaacacaaacagatttgtggagaaacttctcaattggtaggctcagtaagtcccagaaactagtttaccagctatgagcattcagtgcacatgggtgtaaattagtatattttacagacggaatagagggcattggttaatacaattaatcggttaaaagagtttctaatgtatcttttttgaaccttttgaattggaagtacataaaccactttaagaaacatagactcggctgggtgcagtgtctcacacctgtagtcctagcaatttgggaggccgaggcaggcgaatcacttgaggccaggaatttgagaccagcatggccaacatggtaaaaccccgtttctagtaaaaatacaaaaattatgagggcgtggtggcatatgcttgtaattccagctacttgggaagctgaggcacgagactcacttgaacccaggagacagaggttgcaatgagccaagatggcaccactgcactccaggctgggcaacagagcgagactcggtctcaaaaaaaaaaaaagaaaaaaagaaacaggctgtattggctttcataatccaaagcctggggtggatctggcatgacttgattcagggacttgaatgatgtgtcagctcccaatcttcctctgtctctcagctgtgcttaccaccatgttggtttcatactagactccatgcagtgatgagacagtgatggcagctcctggcacagaagagaaaacacgtaaccctctcagcaatcctaacaaaaagtctcactactttgtatcagctaagattgggtatatgcttgcttaccttatactgatctgtgaccagggagatgtgatgacctgagtgacttaggattgagtcccatgcctctctgaagccctttctaacccctggactgagaagaattgccttggagcattccagcttgctattatataagttgatttttttttttttttgagacggagtcttgctctgtcacccaggctagagtgcagtggtgcgatctcggctcactgcaacctctgcctcccaggttcaagcgattctcctgccttagctcccgagtagctgggattacaggcacccaccaccttgcctggctcttttttttttgtatttttagcagggacggggtttcaccatcttggccaggctggtctcgaactcctgacctcaagcaatccacccgcctcggcctccaaagtgctgggattacaggcgtgagccactgtgcccagccttagaaattctttttttgtttgtttgagacagagtcttgctctgttgcccaggctggagtgtagtggcttgatctcagctcaatgcacctccacctcccgggttcaagcgattctcctgccccagcctcccgagtagctgagactataggcatgcatcaccactcctggctaatttttttgtattttcagtagagatggggtttcaccatgttggccaggccggtcttgaactcctgacctcaggtgatctgcccacctcagcctcccaaagtgctgggattacaggcgtgagccactgcgcccagcagaagtccattcttgaagtaatgattgggttaaggaaggactatgggcttcttgagggcaagaatggcattgtgtttctgtctgtatcctcactcttcatacatagcacccagcatgtttccctacacacagcagacatcacttaattgtgaaccaaaaaactgcaagcatctttcttcattcactgtgtatcttactgctgtttatagaagacttgcccttgctgtgcaaaatgccagtccctatttgcctgggttttgtcatcttttgatctcttgtgctgccagaaggcctcaaagcataagtttgaatggggcttggactccgagacccatagagctaagctccgtatagaattccctgagggaagccttttcctttccatctcaagtccggcatattgctctataacactggttatggtgatgctgcagttttaattttaccttttgtgtttgttctagagccactttaaaggactctctttgggtctttcccctaatcctcctttctgacccccagcttcccttggtccctcgcttccctgcagccacagctgcctggctccagggcactcagacggcactgtcgcctaggcaacccagaaaggggcttcaatctactgtctccccagaggggttgggctggccctgagccaggaagaggcagggggcaggggacctgtaccagccctgcacagggcatgtcgggaaataaacagactactggtgtgctgtctgcattaagagatagggggaatgtcatgggtgtgttgtctgtgtgttatgtaagcaaacagccaaggatgccactgcccgctgagagcaaagaaatggaacaagagaaagaaggccctcccatacatcttggactcaaatctgcagtgatggagttaactggccaaggctctgttttagtttcctagggctgctgtaacaaagtactacaaactggatggctcaaaacaacagaaatgtatcttctcacaattctggaggctagaggtccaaaatcaaggtgtcagcagggccatgctccctctgcaacctgccagagaacttccttgcctcttcctgctcctagtggtttgctggcaatctttgacaatccttgacttacagccacacataactccaatctctgcttccatagtcacatagcgttctccctgtttgcctctgttttcatgtggccttcttcatataaggacactagtcatattagatttagagcccacccttgctccagtatgacttcatcttaactaattacttctgcactgaccctatttcctaacaagctcacgctctggcatggggatttggacttcaacatatcttttttaggggacacaattcatcccataacagcctcccagatgggtatgaaatgatgggagagatggttttagaagttcccatagtataagagaaagccctttctagggctaattgacaagactaaggaagctctggaacaccaggctgaggatcttggctttgtttagtagaggggagccatgaagggtctcagagaagacagcagtgtggcaatctataagactcagggtttttgtcattggttgctttttatgttttagtgccagtgaaatgaaccactcttttctccaacgcatactcccagctgcctctttaagtaacagccctacacagccagttgtagcatgacaaaaaccttcgaaatgaatagcacagagtttggtgtggttccgaagtaagactgccacttgccagctgtgtcagccttagttgcctcctcagtcaaacgaggattataaaagtaccaatctcaaagagttgttacagggattaaatgagtatgtatgaacttatataatatatatataacatattacatatatgatatacatacatatatatgtctagctacctgtctcagaagaaagcctgacaaagtaagaactcagcaaatgttcacaattattatgcaaagatgagtagttaatttggctaaggagtaaagtagaagtcattattattagtgctggttattaagactttagaccctggctgagcacagtggcacatgcctgtaatcccagcactttgtgaggccaaggggggtggatcacttgaggtcaggagtccaagaccagcctggccaacatggtgaaaccctgtctccactaaaaatacaaaaattagctgggtgtggtggtacgcacctgtagtcccagctacccaggaggctgaggcaggagacatgcttgaacccgggtggcagaggttgcagtaagccgagatcacaccactgcactccagcctgggcgacagagtgagactctgtctcaaaaaaaaaaaaaaaaaaaaaaaaggaataggaagagaaagctttcacttttactttatacaattttaaaataagcacatagtattttaataatgaaaacttaattccatttagaaaattattaaaataaagcattttgtatgcaagcaacattattataggcatatcttgaatctgctctgattttcttcaaggaaatcattcatgaatatgcatagactatttctggaagtatcttcaagaagctgatgacagcggttgcctctcaagagggagattgggggactggtgtttggagtcagggatgggaagaaaatgacctttatgctatattttcttttacaagatttaatttgtttttaaccaaatgcatgtattatgaattcaaataaattaaaagaaaatttttaaaagctacaataatttataattaccaatgaataatgtgtaactcacctcatgactgatcacaacacaccagtgcttctgactggagttgatcctaagcagagtgctgacagtcaaactcaggactccaagtccagaggttttttttgcggggggaggtgagggggacagagtctctttctgtcgcccaggctggagggcagtggcacaatcttacctcactgcaaacttgcctcccaggttcaagcaattcttgtgcctcagcctccttagtagctgggtctatagatgtgcaccaccacacccggctaattttttttttttttttttgagacagagtttcgccctgttgcccaggctagagagcagtggctggacctcggctcactacaagctccgcctctggggttcacgccattctcctgcctcagcctcgcgagtaggtgggactacaggccccaccaccacgcctggctaattttttgtatttttagtagagatggggtttcaccgtgttagccaggatggtctcgatctcctgacctcatgatccgcccgcctcggcctcccaaagtgctgggattacaggtgtgagccaccgtgcccggcaatttttctgttttttaagtacagactgggtttcgccatgttggccaggttggtctcaaactcctgacctcatgtggtccacccacctcggcctcccaaagtgctgggattacaggcatgagtcacagcatccagccatccacggcttttaatactacatcattgcccagcatagttgcctcaaggactgcacccttgcaagcccagtacctccaggaccaccccccgactcaacaagccatgacagtaacatcacaattgccatagcagaaaagtcatgactgtggaattaactcctcaacaaacattaaatattcagctcagtgaatttttatatatgttcacctgtgtaaccatgatctggatcaaaacatatagaccatactggtcaggcacagtggctcacacctgtaatcccagcgctttggaaagctgaggaggcgggtggatcacctgaggtcaggagttcgagactagcctgaccaacatggagaaaccccgtctctactaaaaatacaaaaaaaattagccaggcatggtggcgcatgcctgtaatcccagctactcgggaggctgaggcaggagaattgcttgaacccaggatgcagaggttgcagtgagcagagattgcaccattgcactccagcctgggcaacaagagtgaaactcaaactccatctcaaaaaaaaaaaaaaaaaaaaaaagatatagatcataccatctctccggaaggctccctcaggccccctcaagtccataccccctaaatgtaactactcttctgattcctatcatcatgaattaattttgcctgtttttaaattttgtataaatggaattatatggtgactacttgttcgtgtctggtttcttttgcttgacactattttgtgagatttatccatgttgttgtatgtagtagttgtttgttcattccaggattgaaagtgctgagtcacagggcatagatatgtatatttaactttacatatactgccaagcagttgtccaatgtagttgtacaaattatactcccactagcaatgtaaaaaaaatttcagttgttgggccgggtatagtggcttatgcttgtagttccagcactttggaaggctgaggcatgaggatcacttgaactcaagtgttcgaggctgcagtgagctatgatcgtgccactgcactccagcctgggcaacagagtgagactttgtctctacacacaaaaatgttccagttgctgcacatcctcacagactcttgctattgtcagtccttttaacttctgccattttggtggggggtcactattttaaacccctcttggttccttgattttccatctgctcagtcttccggtctgatagaccctcaatggactttgaactcctgaccaacacttcctgccctttctttcctggaatagagccgtatagtgttattacctgattgaatcctagagctcaccacacacaattctgatctctgccacaggctgagacctgactccagcccagactaagctctaatgctaatcacagactggtctctactctaatcacagactagctcttagccccacacactgagccctaatcacaactacagggtgaaccctgatcccaaccataccctgagccattaccccagcaacagattgagctttcatcctagatagaggtttaaactgatctgatccaaattcagactgataaacacaagtgggccaagcacagtgtcagaaattattagaagatgtcaaattgcaagaataaaatgcattgtaaactactatttctgtagcctctccttggttcacgtcaaattttaattgtgactgaattttgctaagttggggaaagaaactacaatcaaccccaccctgacatgttataaagaacaggctgggggcgggggagtgtggctcaaagaagcctaaagctgagccagtctgcagatggtggcgggaagacgggtaaccttcttcctgtcctcacaagatggcaggtttattttaagggtgtttttaacagcttaaaaaatggattcaaagaacactgggggaagcctctgatttttgggcttctgcccatgatgcctttttttttttttttttaacaatggtatttgactcccagtgagatttgttccttcattacattctgatcatattgcttttcacatccccctccctgcagaggctgttgggaaggaaaaaggaaacagccttgaagaatgaatgcttagaggttctatttttttttttttttttttttgagacggagtttcgctcttgttgcccaggctggagtgcaatggcatgatctcggctcaccgcaacctccgcctcccaggttcaagcaattctctttgctcagcctcccgagtagttgggattataggcatgcgccaccatgcccggttaattttgtatttttagtagagacgaggtttctccatgttggtcagactggtctcgaactcccgacctcaggctatctgcccacctcggcctcccaaagtgctgggatcacaggcgtgagcttccacacctggcctgcttagaggttctatttgccctatgtctgctaatcagcagcaagctgggaacataattttcactttttctttttttctttttttttaagacagagtctcactctgtcacccaggctggagtgcagtggcgcgatctcggctcactgcaacctctgcctcccgggttcaagcaattctcctgcctcagcctcccgagtagctgggactaccggcgcatgccactacacctggctaatttttttttttttttgtattttagtagagacagggtttcaccgtgttgcccaggctggtctggaacttctgagctcaggcaatccgcccacctcggcctcccacagtgctgggattttaggcgtgagccactgcgcccagccaattttcactttttcttatgcccatgagaaaaatcttgattttacccttagtaccaggaacacccttaatgccaggtccacagtgcaaagtggatcttcatacacgttctctctactggacaaaaatcctgattcgtttgagatttctaaaccttaactgggcaagacaacttggatgatgaggccgcgtggcattgtggaaaaggctctggacggagagtcaggagacctggacagtcatgccatcctatgtcgtgccactacaagtcccaccctctctctaggcctcccttctccatcaataagagtaaggtttaagtgcagctctttgtagtgtatttacatacattatttcatttaatcctcatgagaagcataataagtcccattttataaaagtagcagggatttcgagaaattaagacttgctgaaggtaacagagtaatcaaatagttttgattggtttggttttgtttaagttgaatgtaacctgctaatgttgttatttgtcattaattcactaattgacaaacattaattcagcatcttcatgtgccaaatactgttttttggctcaaggaacacggacgttttcaggaataatcttgttggttaatggtctacacaggtcaatgtgtcagttaaaaaaaaagtataattgctgggtgcgtggctcacgcctgtaatcccagcactttgggaggccaaggcgggcagatcacctgaggtcaggagttcgagaccagcctggccaacatggtgaaaccccgtctctactaaaaataaaaaaaaattagccggacatggtggcaggacctgtaatcccaactacgtgggaggctgaggcaggagaatcgcttgaacctaggaggcggaggttgcagtgagccaagatcatgccactgtactccagtctgggtgacaaagcaagactccgtctcaaaaaaagaaaagaaaagtatgattaagggtcttcttcttctccttctccttcttcttcttctcttaatggagtctagctctgtcgcccagactagagtgcagtggtgtgatctcagcttactgcaacctccacctcccaggttcaagtgattctcccgcctcaggctcctgagtagctgggactacaggtgtgtgccaccacgccaagctaattttttgtatttttagtagagacagggtttcactgtgttagccaggatggtctggatctcctgacctcgtgttccatccaccttagcctcccaaagtgctgggattacaggtgtgagccatcgtgtccagcccctttcttcttctcttaagacaaatatgggttaactttccatctctgtccccctggaagtctaataaaggggcaatgtcagctgtggtattcaacagcatcgcttatggtaaaaataactcctgattggtaaacttcttctgggccaggatacataagtacctgatgagaacacagctttgggccaccctaattgcagtgacacttgtaaccagttcatcgtctatggagaacctgatagctatgctcccgagacactagatatgattcctatttgggacagggcatttcttttcttttcttttctttctttttttttttttttgagacggagtcttgctctgtcgcccaggctggagcgcagtggcgcgatctcggctcactgcaagctctgcctcccgggttcacgctgttctcctgcctcagcctcccgaatagctgggacaggcgcccgccaccatgcccggctaattttttgtatttttagtagagacggggtttcacagtgttagccaggatgtctcgatctcctgacctcgtgatcgctcacctctgcctccaaaagtgctgggattacaggcgtgagccactgcgcccggccagggcatttcttcttcttcttcttcttcttttttttttttttttttccgagacggagtctcgttctgttgcccaggctagagtgcagtggcgcgatctccactcactgcaagctccgcctcccaggttcaagcgattctggtgcctcagccttctgagcagctgggactacaggcgcatgccaccaggcccgggtaatttttttgtatttttagtagagacgggattttgccatgttggccaggctgttcttgaactcctgacctcaggtgatctgccctccttggcctcccaaagtgctgggattacaggcatgagccaccgcgcccagcgggacagggcatatctaaactaaggttgtcgctgcacctgtgaatatgatcctgtctccttgcacctaagctgtcacctggggggccaaagaagactaatcactggataactacaataactctgctgaagagaagtgccagatgttgttctgctggcacagtgtgtcatgtcttgaatccttctgagtgaatctgatgcaaagtaaagcctatggtattgagggtaaatgtctggttgaactcaaagaccacctaataatggacatttcaggggcaaatccagatccagtagttttgaagatataattccaaccctattttgtctgactctagccatggttctcaatcttggccacacgttggactcacattgaaatgatattgaatcccttgccacaatgaacacagcaataaaaaaagaaagcactgctacacacaacatggatgaatctcttgggcatgatggtgaaagaaaggagccagccacaaaagagtgcaaactgggtaattccacttatcagaagttcagatgcagcccaaactaaccagaatagtggctattattgagggggtaggtattgactggaggcagaagggagccttctggggagctataaatatcctgtatcgtgatctgtgtggtggttacatgggtgggtgtatatattcataaaatatgtgaaggcagggaatctagaagcagaaagataggctgaatccaaaggtgggtggggggcttaactagagatttgaggcctgagctggaggctgaatcttctgtaaaaactcccactgaccctgcaaggtggaaagtgtgagccccgtggaaaggtactgaatagtaattctatcagagggacccaagactttgagaaaggagaaataggagaatgggacctagatgttcaactcccaagggaagcgggaaagcagcctgcagctgcaaccaaaaggaaaactccactatgcaaggagctatgaatataaaaacccaggggaggtaacattttgtggatatcaagtgacagttttggagatggtattttactttttatgtgtctctttcttcccccatctatttttaagacttttaattgcaggagaattaaataaagtaatgtacgaggctttattttagtcagactggagcccagacagcacctgaaattaggtcctgcctttgttaaagtggattaatttattcctagcttcaagctgggatgaaacttctggtgtaagaccaaattgaaagagaaaatccaggagtcatgcttcatgacaactggctgaaaggatggaggccactgtcttggtggaggaaggatctcagggaaagcgacaggacatgggaagtgtttccatatatctgaaggtttgccatgtgagaaaaaggcagatttgctcaagatgagtgcagaggggaacaaggaaattctatgtggaaattcttggaattcttgggggcaccagagttgcttgaacccaggaggtggaggttggagtaagcctagatcgagccactgcactccagcctgggtgaaagagtgactctgtctcaaaaaaagaaagaaagaaagaaagaaaaacacttttcttctgacatattcaaataatatcatcggcgttaacaaagatagacagctaaagtcataaatttgtgttctaagtgattcaaagctgtgcaagtattgatatgaacaactatatttgtgtagacagggaatgataatatcacccatgtagagatggcaggatgagtgatcttcactggaattacaccagcatgctcctgctcttcctttttcattttttttcaggtttttaaaataatctaccatatttttattggttgcaagaaatattttcccttctccagatttggagaacaggattttcttccctcctccctgcaacccattccagttgctcaccctgtgtttggcttgactagccaagtgattccctcctgcatgaaattcttacattgctcttgattcaaattcatactaggtgtttaaaaatgcataatctcagttaatcctctcaacagcccacaatatcagtataattattctcattacaattaaattcatgtcttggatctttgaggctgtttgtgagtagctgaaacaatgaatagtaattcacaaatgtcaagggtctattctaatttacctgtctgtctcccaaaatagactatgaagacttgaactttttttttgtttgatttgttttttgagatggagtctcactctgtcgtccaggctcgagtgcagtggtgcaatctctgctcactgcaacctctgcctaccaggttcaagcagttctcctgtctcagcctccccagtaggtgggattacaagcatgagcaaccacgcccagctaatttttgtatttttggtagagagggggtttcaccatgttagtcaggctggtctcgaactcctaagtgatctgcctgccttggcctcccaaagtgctgggatttataggtgtgagccaccgcgcccggccaattttgaacttatgaaccatatcttattcatcattatattctcaacaatacctagcacgattcctgacgcatagtaggggctcaaaattatttttccaataaataaatagattaatggaaaggtataataattaatattgcatttgaatcatttaaatagggtgcatttatatataatagatcaaagatacttgagggaaatctcaaaatagttgttttttttttgggacagagtctcactctatcacccaggctggagagcagtggcgcaatatcagcccactgcaccctctggctcccaggttcaggtgattctcctgcctcagcctcttgagtagctgggattataggcacccgccacgagcccggccaatttttgtatttttattagaaatggggtttcgccatattggccagctggtctccaactcctgacctcaagtgatccgccgtcctcggcctcccaaagtgttggtattaccggcgtgagccactgcacctggcctcaaaatagtctcaactgtggtgaaaagactagaaaacgatcctacctgcagtttctaccatatgaaattatgcattcttgaaaaataagatagcagaaatagcgacagaatccctttataactaggtatcactcctgtaataaaccaaaataatttattctgagggataaaagggtaagcccttcagccccactccttctcgtctctcctttccctcccttttctctcttctcccttttctcctttcttttctgttcccattttcaaacatttactaagacactattgccttaacacactgtgaggatttcagcccttgccttcaaagagcttatagtccagaggaaaaaaggttaagaaatggcaatatctataaccacggtgacaacatctgactttctacaatagcatcaagcccacagttttgcccgagccgccctcgggcgcaccacgaatcccatcttggaagacttgcctgatcttttttccctgagcacaggcacaaagaaaattcttctcctcattctgtaaatacttagtgtatctgactgaactgcatctgactgaactgcaatagcaactgggctttcctctgggagcaaaagctagggaaagcctcaaaacaatattaaaaatgactggagctactcagaagaattataacaactggaaggggacttagagaactttcaatccagctacctcattttccagatctggaagctgagaaccagagttggaaggtggtgacctgcctgtggtcacatagcaaatcagtggcaatgcaataatcctgagattattttaagtagtgcatgacaaacttttacatatacaaataattgtgcatttctctttttttttttctttttgagacagagtctggctctgtcgccaggctggagtgcagtggcacgatctcagcccactgcaatctctgtctcccaggttcaagcaattctcctgcctcagcctcccgagtagccgggattacaggcacacgccaccatgccgggctaatttttgtatttttagtggagatggggtttcaccatgttggccaggatggtcttgatctcttgacctcgtgattcacccgcctctgcctcccgaagtgctgggattacaggtgtgagccaccatgcccagcctgcatttctatttttaacttgtataaatttaatgagtataagtggaatatgcatttattttagtttaggaaatatataaaaagcacatcaagctctgattttatagataaggatattatatagtggtcaaaagttttctttaaattttaaaataaaaagatgaatgggctgggcatggtggctcacacctgtaatcccagcactttgggaggctgaggcaggtggatcacttgaggtcaggagctcgagaccagcctggccaacatggtgaaactccatctctactaaaaatacaaaaattagccagatgtgctcgcttgaccccaggaggcggaggttacagtaaaccgagagtgtgccactgcactccagcctgggggacagagcaagacagtcttaaaaaaaaaatgaatgaattaaaataaaagtattttttaggccgggtgtggtggcttacgcctgtaatcccagcactttgggaggccgaggtgggcggatcacctgaggtcgggagttcaagaccagcctgatcaacatggagaaaccccgtctctactaaaaatacaaaattagccgggcatgatggcacatgcctataatcccagctactcaggaggctgaggcaggagaatagcttgaacccagtaggtggaggttgtggtgagccaagatcacgccattgcactccagcctgggcaacaagagtgaaactccatcccccttaaaaaaaaaaaaataaaatatatatatatatatgtgtatatatatatatatatatgtataaaatatatatgtatatatatgtataaaatatatatgtatatatgttatacatatgtataatatatataatacatgtataatatataatacatgtatcatataatacatgtatcatatatattatatatgtatatattatatacatataatatacataatatataattgtaatatatataatatataatatgtaatatattatataaataatatatatgtatatattatacattatacatgtataatatatataaataatattatatataaataatattatatataataaaaatatataaatatataaaatatatatataaataatatatataatatatattatacatgtattttatatatatataaagtatatacatacatatttttttaaagtagaggccaggtacagtagctcacacctataatcctagcactttgggagcccaaaccaggtggattgcttgagcccaggagttcgaggccagtcagggcaacatggtaaaaccccatctttacaaaaaatacagaaaattagacaggtgtggtggcatgcgactgtagtcccagctacttaggaggctgaggtgggaggatcacctgagcccggatggtcaagtttgcagtgagctgtgatcatgccactgcactccagcctgggtgacagagtgagacccctgtctggaaaaaaaaaagaggtgggagtagtcagtacaataatggagtaaaaaaattacgaaaggggtatgcaaattactgaagtttagaaaacatcatgtttactatatcacactgcatctctccaagataagataaaggactttgaagctgggcgcagtggcgcatgcctgtagtcccagttactcaagaggctgaggcgggaggatcacttgagtccaggagttcgaggctacagtgtgttatgattgtacctgtgaataaccactgcagtccagcttggacaacaaacaagaccctgtctctaaaaaaaaaaaaattaaaatttaaaaaataagaaaatgtaaaggactttgacaaatgtaccggctcagaacattctgagaagacaattttttaatgtaaaggtgatgattgaatagttggatatgtgcacgtttagcaaaaatgggttaggcacagttaagagtaggtattttattcaggaagaatagaaggcaactagatgggggagtttggcctgagttttgacatttgatagaaatgattgtgttttcttttttttttttttttgagatggagttttgctttgttgcccaggctggagtgcaatggcgcgatctcggctcaccacaacctccgcctcctaggttcaagcaattctcccgcctcagcctcccgagtagctgggattacaggcatgcaccaccacgcctggctaattttttttttgtatttgtagtagagacggggtttctccacgttggtcaggctggtctcgaactcctgacctcaggtgatccgcccacctcagcctcccaaagtactgggattacaggcgtgagccactgcgcccggcaatgattgtattttcaagtatgccttcctggattaacaaagggtcaaatagaaaccctgcaacctgttttcctataactgaatgtgagtgaatattttatcagaattgggttcaaatcctgcttctgccacttcccagcttgtgccctctgccaagtcacttaaccactctgagtttgtgaaaaagttacgttgtcaggagcaactatgagaatgtcaaaatgcctcgaaagggagagtgagaaaaagactgaaagaaagatgaagaaaaagaaaaaaaaaaatgacaaaagagaggaagccaggttggaaggactataagaagaatgggagctggtaaaattatttcagactttatgtgctgaaatagtcattcttgtcacaagctgctagattttcttcttatgaaaacatttctaaggtggcagatgaatatatttttaaaatttttcctgaaacataacactccaacaggatgtgttagagaaatgccaagaaaagaaggcagaaggaggtaaagtccttgaatgaaaaggaagataaagggatctatgcatggacctagtggggcagaagtcccacctcctctatgaagccccactgggttcctgggtggagctgactgtctcctccttagacccctgctatatttacacaccttctactagggccagtgcaatggcttaggagcatctctgtttgtcattcccattagataataatccccttaactgctgggactgtcttatttatcttacgtattcccagtccttctcacaggacctggtccatatgatatgcttgataaacatctgttgaatgaatgagcctgtttctaggaacttgcagtgatgatctttgagggataaatggaggtcaggaagacatttggcctggagtgtgtctggggagacatacttactgttttccaatagttgaagaactgtcttggggaagtgtatttttaaaatgtgctctgtcgtccttaatggcacagctagaactaagaaaatcaacctggctaacatggcaaaaccccatctctaccaaaaaactacaaaaattagccgggcgtgatggcacatgcccaaagtcccaactactcgggagtctgagatgggaggatcatttgaacctgggaggtggaggttgcagtgagtccagatcgcagcctgggcaacagagcaagactctgtcaaaaaaaaaaaaaaaaaaaaaggagccatgggcttggactggaatgtactgcccatgtttactgtgttcataaactctggtgcagggcttcaagtgcccagaagtagggtcacctgttttaaatttacacacaagtgccctatgggattaggagtcagaaagacttgagttctaactactcaacttttctagcagtgtgactttgagcaaattaattagccctctgagcctcagtttccttttttcaaatatgccaataactatatctccctcccggggtgagataaggcttaaataataaagcaggctgggtgtggtggctcatgccttgtaatctcagcactttgggggaccaaggtggtaggactgcttgagcccaagaattcaagaccagcctgggcaacttagagagaccccgactcaaggtggccaggcgcggtggctcacgcctgtaatcccagcactttgggaggctgcagcgggcggatcacgaggtcaggagatcgagaccatcctggctaacacggtgaaaccctgactctactaaaaataccaaaaattagccgggcgtgggggcgggcacctgtagtcccagctactcgggaggctgaggcaggagaatggcgtgaacccgagaggcggaggttgcagtgagctgaaatcgcgccactgcactgcagcctgggcgacagagcgagactccgtctcaaaaaaaaaaaaaaaaaaagagagaccccgactcaaaacaaacaaaaaaaattctttttgtagagatggggtcttcctctatcacccaggctggagtgcagtggcacaatcttggctcactgcaacctctgccttccaggctcaagtgatcctcccacctcagcctcccaaatagctggcaccacaggcccacgccaccagacccagctaattttttgtattttaagtttctccatgttgcccagactggtcttgaactcccagcctcaagtgatccacctgccttggcttcccaaagggatggaattacaggtgtgagccaccacacctggccagaattttttttttttggagctggggtcttgctctgtcgcccagattggagtgcagtggtgtgatctcagctcactgcaacctccacctcctggattcaagcaattctcctgcctcagtcttctgagtagctgggattacaggcgcccaccaccacgcctgggtaatttttgcatttttagtaaagacagggtttcaccacgttggccaggctggtctcgaactcctgacctcaagtgatccgcccacgtcggccccccaaagtgctgggattacaggcgtgacccaccgcacccggtccagactttttttttttttcaattagccaggtgttgtgccatttgcctgtggtcccagctactcaggaggctgagatgggagaattccttaagcccaggacttcgaggctgcagtgagctattaatgcaccactgcactccagcctggtcaactgagtaggaccctgtcccacactgccccccacaaaaaagcacataaagctcttagcacagtatcataacaaacatttaatttcttttaagaagacagccctagtgtttttttgtttgtttgtttgcttttttggaggcagaatttcgctcttgttgcccaggctggagtgcaatggcgcgatctccgctcaccgcaacctctgcctcccgggttcaagctattctcttgcctcagcctcccgagtagctgggactacaggcgcctgccaccacgcccggctaattttttgtatttttcatagagacagggtttcttcacgttggtcaggctggtcttgaactcccaacctcaggtgatccgcctgcctcggcctcccaaagtgctgggattacaggtgtgagccaccatgccaggctgccctagtgtttttattttcctttcagtctcttcctagctataaacatggataattgaataaaacttctcaacattgcaacttctctttctgtaggaaacaaccctgttcaatcccattgtctgcctccatgaagacttcccttacattcattaactagatgacattgcatagtcacttccttctgagagcttgtttttctatctgtaatgaagacaggagagggaggaatgtctatttctatttttagcagtccatttccacaagtgtatgttaattttgtaaagaaagaaaagatttttaaaaattgaactaaactgctgtctaatgtccctttttgctctgacattttttgagcctgagaatctaagcctccttctctttcccctgttcccattgccctcctccattcctagcttctctctctctctggccttagaatgcaaaactccattgagagtgcaccatgcaggtggaaggattgcaacaaatacatttctcctctggccccatgctaggacctggtcccagaaatggctatagctgggaacatctagggaagcccagagcagatcggattgccttacttagctggagctcagcctatctattctttttctatttttttttttttttttttgagacggagtttcgctcttgttgcccaggctggagtgcaatggcgtgatctcagctcactgcaacctctgcctcctgggttcaagcgattctcctgcctcatcctcctgagtagctgggattacaggcatgcgccaccatgcctggctaattttgtgtttttattagtagtgacggggtttctccatgttggtcaggctggtctcgaactcctgacctcaggtgatccgcccgcctcagcctcccaaagtgctgcgattacaggcatgagccaccgcacccggccttttctttttcctttctttttttaaaaaaaggagtctcgctctgtcgcccaagctggagtgcagtggaatgatctcggctcactgcagcctccacctcctgggttcaagtgattctcctgcctcagcctgttatgtagctgggactacagtgggactacaggtgtgatccaccacacccggctaattttcttttcttttttttttttttttttgaggagtcttgctctgtcttccaggctggaagtggcgcaatctcggctcattgcaacctccaccaccctggttcaagcaattcccctgcctcagtctccgaagtagctgggattacacgcgcacaccaccatacccagctctttttttttttttggtaattttattagagatggggtttcactatgttggccacactgggtctggaactcctgaactcctaacctcaggtggttttttgttttgctttgttttttgttttgttttgtttgtttttgatggagtcttgctctgttgcccaggctgcagtgcagtgacgcaatctcggcactgcaacctctgcctcccgggttcaagcgattcttctgcctcagcctccagaatagctgggactacaggcacacgccaccacacccagctaatttttgtatttttagtagagatgggatttcaccatgttggccaggctggcttgaactcctaacctcgtgatctgcccaccttggcctcccaaagtgctgggattacaggcatgagccaccacgcccagctcaccaggctaattttcatctttttagtagagacggggtttcaggctggtctcgaactcctgacctcaagtgatccacccacctcagcctcccaaagggttgggattacaggtgtgagccaccgcacttggccttcagcctatgttttcatttgagcacttttctttataatttcacgttgtcatcctcatctagtacccaatttcctttagggaaatccagcagttgagttacagaatgatagacttaaaagtgtgcaaactggataacaaagaaatcatgttccggccgtgtgaggtggctcacgcctgtaatgccagcactttgggaggccgaggcggctggatcacgaggtcaagagatcgagaccatcctggccaacatggtgaagccctgtctctactaaaaaaaaaaaaaaaattagctgggcatggtggcgctggtggcatgtacctgtagtcccagatacttgagaggctgaggcaggagaatcgcttgaacccgggaggcgaaggttgcggtgagctgagatcgtgccactgcactccagcctgggcaacagagtgagactctgtctcaaaaaaaaaaaaagaaaaaagaaatcacgttccacaaaaactgtgcaacccggccgggcttggtggctcatgcctgtaatcccagcactttgggaggctgaggcaggaggatcacttgaggtcaggagctcgagaccagcctggccaatatggtgaaaccccatctctactaaaaatacaaaaatattagccgggcttggtgtatgcctgtagtaccagctactcgggaggctgaggcaggagatcacttgagcctgggaagcagaggttgctgtgagctgagatcactccattgcactccagctggtgcaacagagcaaaactccatctcaaaacacacacacacacacacacacacacacacacacacacaaaacctatgtagtccaccccgtccttatttctgttatcctttttttccctcaaggaccaagtggcttaagcttttctgaccaaataacattaattttatcttttatcctctccccatccctcttcccctccccctccccctctctctccctctccccctcttcttctttcttcttcttttgagacagggtcttgctctgttccccaggccagagtacagtggcaggatctttgctcactgcaacccccgcctcctgggttcaaatgattctcatgccttagcctcctgagtagctaggactataggtatgcaccaccacacctggctaattttttgtgtttttagtagagacggtttctccatgttggaggggctgctcttgtgacctcaggtgatctgccagcctcaggctcccaaagtgctgggattacaggcatgagctctgcagccagccatcttttcttctttaaatgttttatttgtttgtttatttatgtatttatttttgagacagagtcttactctgtcacccaggctgagtgcagtggcatgatctcggctccctgcaacctccgcctcccgggttcaagtctcctgcctcagcctccctattagctgggattacaggctcataccaccatgcctggctaatttttttttctttttttttttgcgatggagtctcactcagttgcccaggctggagtgcagtggtgtgatctcagcttgctgcaacctccacctcctgggttctgatgattctcccgccccagcctcctgagtagctgggattacaggcgcccgccatcatgcccagctaatttttgtatttttggtagagacggggtttcactatgttggccaggctggtcttgaactcctgacctcaggtgatccacctgtctcgacctcccaaagtgctgggattataggcgtgagccaccatgctggcccagttaaaatgttttaaagagaatacaaaatgtaaaaattaggaatatatgaaaaggcatttctgacatttctgggaaaaatgacaagattcggtgagattaaaacccagtcaaaaatcacctgggattcagtagcagctgccctagtatcgcagacactctccagttggtcttcagtctctgtcccttcctgttatcacctgacccccaccaaggtcaatatcaattccaatacactgttaaacccagcccacttcgctagaggccaacccctatagacaaatgagtgtatgactccaagattagaatgagcctatggatcaacaaacacgcagaattatttgcagtcaattagtaaaatgtcaaatgcagttgatgagattgctttacaaaagtgtctggacctggcgtatcacaggcactcaacagaaagtaattgctatgactagtattaaaattattattacttaactgagatgcatcttcttactttgaggacaatcttgcatcagtgacatatccaagaaaacggagtcggtgacttctctgatggaaagcagtctcaacctatctttttccagtcctccaggacttttgctgagtaatgttttcttcattttgttacagagttgtttataacgtgggagcccagaggagtcactgactctatcaggatgagggcacagcatcactggaagaaacctctttattccaggtttcatgtattcacatggaagaacctcctttagggaagtagtggcttatataattggttagtttggaagaagggacaacagcatatacagggcttagcatttacctttctgtttttatttggcacaaccttacatgaacctggtacatatcgtgacctgttccttcatacgtcaaatataaagtatataggagatcaatgattgcctggacctgagtgaaagaaggtcaggaaatgtattacaaaagagtatgagatattttggggggcaatggatgtgttcattatcctgattgtgttgatggtttcacaggtatggagacatgttagaactcatcaaattgtacactacggctgggcgcggtggctcatgcctgtaatcccagcactttgggaggctgaggtgggaggatcacttaagcccagaggtttgagaccagcttgggcaacaaggtgaaacactgtctttacaaaagaaatataaaaattagccaggtgcggctgggcacggtggctcatgcctgtaatcctagtactttggggggtcgaggcaggcagattgcctgaggtcaagagttcaagaacagcctgggcaacacggtgaaaccccatctctactaaaatacaaaaaacaggccgggcacagtggctcatgcctgtaatctcagcactttgggaggccaaggtgggcagatcacgagatcaagagattgagaccatcctggccaacatggtgaaacccggtgtctactaaaaatccaaaaattaggtggatgtggtggcacgcgcttgtagtcccagctacttgggaggctgagacaggagaatcgcttgaacccaggaagcagaggttgcagtgagccaagatcgagccactgcactctagcctggcaacagaacgagactctgtctcaaaaaaaaggaaaaaaaaaaaaattagccaggcgtggcagcatgcgcctatagtcccagctactcgggagactgaggcagaagaattgcttgaaccctggaggtggaggttgcagtgagctgagatcatgccactgcactccagcacgggtggagccttaaaaaaaaaaaaagccaggtgtaatgtcacatgcctgtggtcccagctactcaggaggctgagggaggaggattgcttaagtccaggagtccaggactgcagtgtgacatgatcgtgccactgccctccagcctttgtgatacaagcaagaccctgtctcaaaaaaataaaaaatttacactctaaacgagtgcagctaattgtcaattatatctcaataaagctgggaaaaagccatgtaagtaaatggagagagaagtgtaaaaagtcattttataatggtgaaaaagcattttctataataacatgatttgactgtaaaaccaatgagagtcacctatacaatttgtgtatacacacatggaaaatggaaaaaaagttaatcatttaaaaatctttcagataaagagggtcagtgagttgtttttaactcacttctttcttttttcttttttttgggggagggggcagagtcttgctctgtcgcccaggctggagtgcagtggcgtgatctcggctcactgcagtctccatctcctgggttcatgccattctcctgcctcagccttctgagtatctgggactacaggtgcccgccaccacacccagctaattttttgtatttttagtagagacggggttttaccgtgttagccagaatggtcttgatctcctgacctcgtgatccgcccacctcggcctcccaaagtgctgggattacaggcgtgagccaccgcgcctggcctctttgtttttgtttttttttttttttttgagacagagtctcactctgtcgcccaggctggagtgtagtggtgtggtcttggttcactgcagcctccgtctcccaagttcaagccattcttctgcctcagcctcccgagtagctgagactgcaggtgcgtgccatgacacctgactaatttttgtatctttttgttttttgagacggagtttcgctcttgttgcccaggctggagtgcaatggtgcgatctcggctcactgcaacctctgcctcccgggttcaagcaattttcctgcctcagcctcccgagtagctgggattacaagtgcccgccaccacgcccagctaattctttttgtatttttgtagagacagggtttcaccatgtcagccaggctggtctcgaactcctgacctcaggtgatccacccgccttgacctcctacagtgttgggattacaggcgtgagccaccaggctcggcctcaatttttgtatttttagtagagaaggggtttcaccgtgttggccaggctggtctcgaactcctggcctcaagtgatctgcctgccgcggcctcccaaagtgctgggattacaggcatgagccaccatgcctggccctaacccatttcttaaaactattggagtgccacatcttccaaatagtttgtaaggaaaattgattaaaggaagatgaaaatttactagttggatttcaacaaaatgctgtgcatagtatttataattgaaagaggatatcaagttttagtatagttgtggatctacatgtcactgtgaaacatcttttttagtatgacagtctccaaacaaagcatccacaaaagctgaaattagaacagacgtgggctgggtgcaatggctaataaaaatacaaaaattatccgggcgtggtggcaggtgcctgtagtcttagctacttgggaggctgaggcatgacaattgcttgaacccaggaggtggaggttgcagtgagctgaaattgcaccaccgcactccaacctggatgacagagcaagactctatctcaagaaaaaataaaaaaacagacctttaaatttctatatcacaaattattttaaaatattcttagaataaagaaatacattcgatcacattgtactcattaaatatcactggtcacaaaaatatttttctatagctaatagataaaataagataaaaataatttgaaatgtttttaaaataataatttattagctacaataaaatttaatttttttaaattctgtgtccaaatctttttatttttttaatttattttatttatttatttatttattttttggagatggagttttgctcttgttgcccaggctggagtgcaatggtgcaatctcggctcacctcaacatctgtctcctgggttcaagtgattctcctgcctcagcctctggagtagctgggattacaggcatgcgccaccacgcctggctaatttttgtgtgtgtgtatttttagtagagacaggctttctccatgttggtcaggctggtctcaaactcccaacctcaggtgatctgcctgccttggcctcccaaagtgctgggattacaggtatgagtcaccgtgcctggccttattttatttatttatttatttatttatttatttatttatttatttatttatttttgagacagattctggctctgttgcccaggctggagtgcagtggctgatctcggctcactgcaacctccgcctccgggttcaagcaattcccctgcctcccatgtagctgggactacaggtgcccgccaccacgcccagctaatttttgtatttttagtggaaacaggatttcaccatgttggccaggatggtcttgatctcttgagctcgtgatccgcctgcctcgacctcccaaagtgctgggattacaggcataagccactgcgcccggcccatctttttcttttttatagagtctggttccctttgcccaggctggaattcagtggtgaaatcatggcttattgcagcctcgacctcccaggctcatcctcccgagtagctgggaccacagatgcacaccatcattctcagctaattaaaaaaaaattatttgtagatatatggtctccttatgttgcccagcctggtcttaagctcctgggttcaagtgatcctcccacttcagtctcctgagtagcttcccaactactcaggcatatgccaccaagcccaggtagtgtttttgtttttgtttttttttggtagagacagggttaccctatgttgcccaggctggtcttgaactcctgggctccagagatcctcctagatcagcctcccaaagtgctagaactacaggcatgagccaccgtgcccagcataaaaccaaatattaataacgtcatttggcctcaaacataagccatgttctccaacctagactttattaataatgaaaatgacattttaatcttaatcagccagcatctttgactacaactaaaatagttttgaattgaaaaggaaaaggggggcggaggttgttgatctcctaatagtggtgaccttttgtttgatttttgaagactgagtagaataaggtcaccaagcaaagatgtgagagaggactttgcaggaaaggataatgagtacagagaaaatttcgtgatcaaagttatggaaacattaaagagtctggtgcaccagggaagtgcctggctgttgtattcagggtatgtattgaaatgtggtaggaaaagagcctgttgggccataggcatggatccagatcagtgctagctatatttgtcttcaaaacagaggttgtttttatcatgttctccactggtttcctagcgcttggaacagtgtctggctaagggaaaggaatgaaagacattttacactatgtttaataaatttgcatgttcccctgtaagtgataggggatttggttcttcagccattccctttcttctgtgagttagctcatatcattttttcttaagttaaacatgaccgctttctgttgcttgcaaccaaagaaccctacctgattcagttggcacagttcatccccttacaggagatacatcccctgttaagggagtatctctttttttttgagacggagtttcactcttgttgcccaggctggagtgcaatggcatgatctcggctcactgcaacctccgcctcttaggttcaagcgattctcctgcctcagcctccctagtagctgggattacaggcaaccgccaccatgcccagctaattttttatattttttttagtagagacggggtttcactatgttggccaggctggtcttgaactcctgaccgcaggtgatccaccctccttggcctcccaaagtgctaggattacaggcgtgagccaccgtgcctggccaggagtatctcttacatgaagaatatcaaggacattcaaagtgcttttagtagtgggccacaaattcagaaatccctgggtgtgcagccactggcatttaaactaatggcaagtcaagagggttagtatgcgtagtagatggaagtcaagtgtatgtatttaagtcaagtgtatgcaacatatgaatgagcagaaacattaaacgtaacctttaggaaaagacaacaggcaagtgcaaacaaaaagaaagcggactatgcattattcatatcacaaaataaattcaaggaaagcaaaatctatttagatatttactaaaaggagagcactacgtaacagagcttatgggaacgggccaaatctccacttacaagaagattaacaaccttaaatttctttattgtagaactaagaatgaaaatacctgaactgagcagtcagttcaagaaaaatgacaaaaagaagagagcagactgaatgagaatttggccacagtccatttcataggtgtgggacagggaaaggaaaaagggcctctcaaatgcacaaataacatgatcagagaggtgcaagtacaaccaagggagctcagtttcacagaaccaaggggaacagagttttttggtgtttttgtttcagacagtgtcttgctatgttgcccacactggtcttgaactcttggcctcaagcgatcctcctacctcagcctcccaaagtgatggtgctgggattacaggtgtgagccaccatgccaggccatgggaaatggaggtttttttgtttttgtttttgttttttttgaaacagagtttcactcttgttgtccaggctggagtgcaatggcgcaatctcagctcaccgcaacctccgcctcccgggttcaagtgattctcctgcctcagcctcccgagtagctgggattacaggcatgtgccaccatgcccagctaattttgtatttttagcagagacagggtttctccatgttggccaggctggtctcgaactcccaacctcaggtgatctgcccgcctcggcctcccaaagtgctgggattacaggcgtgagccaccgagcccggcctgtttttgtttttgagacagggtctcactcgtacccaggctggagtgcagtggcatgatctcagctcactgcaacctccggctcctgggctcagggatcctcctacctcaaccccccaagtagctgggactacaggtgcaagccaccacacctggctaatgtttgtatttttggttgagacagggttttgtcatgttgcccaggctggtcttgaacttctgagctcaagcaatctacccacctcgtcctcccaaattgctaggattataggcgtgagccacccatccaggccaggaaatggagttttaatgaataagtgaggagctgcagaagggagggagtaatcaacagggtcaaacaaaaaatgagatccgataagaaaatgtcttaaatttctacagagcttggcaattaccagtaagagatcagcaggatttattctgagctttccatagaaagaaaatactttggcagaattaaagggaaggacactagaattgtggtcatttctcatgtttgccatccaaagtctccttagacctcttacgctacgtgtactccaatttttccggggaagagacatcctttttttttttttttttttgagacagtcttgctctgtcgccaaggctggagtgcagtggtacaatctcggcttatcacaacatctgcctcccaagttcaagtgattctcctgcctcagcctctcagatagctgggactacaggcacacaccaccatgcccagctatttttgtgtgtgtgtgtgtgtgtatttttaatagagacagggtttcaacacattggccaggctggtctcgaactcctgaactctagtgatccgcctgcctcccaagtaccagctgatgcatttctatgtccagggtgtgatatggcagactgtgggttgaataaccccattctcattcccaaccctgttttcccttgcctgcctcacttgtactcactttcccaacaaccttatagcaagcagtggccagatggtatgtatcccaaaacagacatgatatccaggtagatataaatgactagaactgggccgggcacagtggctcacacctgtaatcccagcactttgggaggccgaggcaggcagatctcttgaggtcaggagtttcagatcagcctggccaacatggtgaaatcctgtctctactaaaaatacaaaaattaggcctggcacagtggctcatgcctataatcccagcactttgggtggttgagacaggcggatcacctgaggtcaggagtttgagaccagcctggccaacatggtgaaaccctgtctctactaaaaatacaaaaattagccgggcgtggcagcatgcgcctgtaatcccagctacttgggaagctgagacaggagaatcacttgaacctgggaggcaggggttgcagtgagccgagatcgcgccattgcagtccagcctgggcaacagagcaagactccatctcaaaaaaaaaaataaaaaaaaaaataaaataatacaaaaatcagacggatgtggaagcaggcgcctgtaatctcagctacttgggaggctgatgcagaatcgcttgaacccagaaagtggaggttacagtgaaccgagattatgccactgcactccagcctgggcgaaaggagactccatctaaaaaaaaatacaaaaattagccaagctttgtggcatgcacctgtaatcacagctactggggaggctgaggcaggagaatcacttgaacccgggagcaggagattgcagtgagccaagaggtgccactgcactccagcctgggtgacagagtgagactccatctcaaaaaaataatagaaataaaaataaaagacatggccagatggggtggctcacgcctgtaatcccagcactttgggaggccgaggtgggtggatcatgaggtcaagagatcaagaccatcctggccaacatgttgaaaccccgtctctactaaaaatacaaaaattagctgggcatggtggcgcgccccagtaatcccagctacttgggaggctgaggcaggagaatcgcctctgggaggcggaggatgcagtgagcagagatcgtgccactgcactccagtctgggtgacagagcgagactctgtctcaaaaaacaaacaagcaaacaaacaaacaaaagatacataactggaattgggacacccatcttgtgagaaacagtaaaaaatcaagagaatcccagctctaccaaccccaagtccttgagccactgggtcgacatgttactatatgacttcagacttttgtgtgtgtgtgtttttgacacagagtctcattttcttgcccagactggggtgcagtggtgcagtcaatctcggctcactgcaacctctgccttccaggttcaagtgattctcctgcctcagcctcccaagtagcagggattacaggcgtgcaccactatgcctggctaatttttgtatttttagtagagacagggttttcaccatgttggccaggctggtctcaaattcctgaccttaaatgatccacccgccttggcctcccaaagtgctgggaatacaggtgtgagctacagcgcctggcctgacttcagactttttatgatgtgagaaaaatacacccctgatgtcaactcctgatgtaaagtctgtccttgtacttgaattaatgtctgttacagaagacttgtgacttataatgatgctgattttgtccctagggccacaggtggctatgttgacttaagccttagccaattcacatagaacatttccttgatgacagtgaattgttcagggacaggcataagagccaagtcaggacaattggggccaaagaaactcactttccaggatatttttataaactgtcagagaagcagacttttcttttcctgcagtaattgattaagagaagatatgtggattgagccgcagcagcatcttgagggggagaatctgcctgaggctcgagccagcacaggaaaaactgaacccagagatgaaaaagagaaagtgggttctggtgacatagctctagactcagtcaagccttatttggagtcagcccaacccctggagttttcacatacgtgagccaataaattgccccttttgaaagccatttaggtttgggttttctcttacatgaaagcaaagaatcttcaggagattgtatttttccaaagatggttccatcagtatatttatcccattccacatgctcttcttgcaataactggtactcttcccactattgggtggggtttgttttcccacccctgggtggggcttgtggttgccgtaaccaaggagtatggcaccatgatgctattgacttacaaggtacagattgtctctttctctctctctcagtgcttacctttgtaacctggcctctatattttaaggaaacctaagccacttggagaggtcacatgtaggtgttctagccaacaatcttaggtctcaggacagccagaatctatcaccagatgtgagtgaatgagccttcaggtgattctagcccccagcattcaaatattccaaatgagaccctggccatcctggagcagagacatgccattctggctgtgttcaatccaacctccgcctcctgggttcaagcaattctcctgcctcagcctcctgagtagctgggattacaggtatgtgccaccatgcctagctaaattttttgtatttttagtagagatggggtctcgctatgttagccaggctggtctgagagcacgtgcccagattatcattgttttaatgcaactaaattttggggtagtttattatgtagcaatagatatactaacacggagtcctaattgatagaattggtattctgcgtgagagtggtttaagaagaatagtagaggctgggcatcacaactcatgcctgtaatcccagcactgtgggaggctgaggcaggcggatcacctgaggtcaggacttcgagaccagcccggccaatgtggtgaaacccatctctactaaaaatacaaaaaattagcctggtgtggtggcatgcacctgtaatcccagccactcgggaggctgaggcagcagaatggcttcaacccgggaggcggacactgcagtgagtgaagatcatgccactgcactctctagcctgggtgacagagcgagatgccatctaaaaaataaaaaaaagaaaaaaaaaagaagacgaagacaaagaagaagaatagtggaatgggaaataagattgcagcgtataagaagcgagcaggaggtgagaaaaatggaattagaaaggtagatactctggactctgaacaagttccatgaaggcctctccctggtcttagaaaaggatacaataagtcttaaaccaaagctgacagtcactattcaggcttctggggatcatcagaggactaaaggttatgagtttgatataattctggaggagggtctttactaactggctttgtgaatttctcagaattccaaaaggcattaagaaggaatcaaaggtgaatcaataaaaccctcaggaaagcatttatttcagaagcattctctgctcaaaaactccagcagacttcattgcctctgatacagataaagcccttcagcctggcattcgagggtctccttgccacatctgtttcccaatgctcccctttacatcccccagggtccagcaaaactgtgatgcttgctgactgcactacgtgatattctcccaactctccttccctgtgccacctctaggtgtttgccctcgtggggaagaaactctggagcaccagctgtggtcagagtgctcctcagtgcctgtgcccattctcatctcagccaaagtacagagaccttctgtagtgaaggatcaatgatgatcaatgatgagttgtagggcccacagcctttttcttttatgatttttaaattcaagttttttttttttctttttgagacagagtctcactctgttacctaggctggagtgcaatggcggaatcttggctcactgcaatctccacttcccgggttcaagcgattctcctgcctcagcctcctgagtagctgggactacaggcttgtgcccccatgctcggctaatttttgtatttttagtagagatgggtttttaccatgttggccaggctggtcttgaacttctgacctcaagtgatctgctcacctcagcctctcaaagtactgggattacagatgtgagctgctgtgcccagacagtaaattgaagtataatttatatacagtaaaatgcatagatctcaagtatactgtcctgtgagttttaacagttgtattcacttgggatgatatggtttggctgtgtgcccacccaaatctcatcttgaattcccacaggttgtgggagagacctagtgggaggtaattgtatcatgggaacaagtcttttttttttttttcccaagacggagtcttgctctgtctcccaggctggagtgcagtggtgcgatctcggctcgctgcaacctctgcctcccaggttcaaggcatcctcctgcctcagcctccaaagtagctgggactacaggcgcatgccaccatgcccagctaatttttgtatttttaatagagatggagtttcaccatgttggccaggatggtctcgatctcttgacctcgtgatctgcctacctcggcctcccaaagtgctgggattacaggcatgagccaccgcacctggcccctgggggggcaagtctttcctgagctgttcttgtgatactgaataagtctcacaagatctgacggttttttttttttttagatggagtcttgttctgtcgccaggctggagtgcggtggcacaatctcggctcactgcaagccccacctcccgggttcatgccattctcctgcctcagcccctcagcctcccgaggaactgggactacaggtgcctgccgccacgcctggctaattttttttgtatttttagtagagatggggttccactgtgttagccaggatggtctcgatctcctgacctcatgatccgcctgcctcagcctcccaaaatgctgtgattacaggcgtgagccactgtgcccagccgatctgatggttttaaaagaggaattcccctgcacaagctctctttctttgcctgctgccatccatgtaagatgtgacttgctcttccttgccttccaccgtgatcatgaggtttccccacccatgcagaactgtaactccaattaacctctttcttttgtaaattgcccagtctctggtatgcctttatcagcagtatgaaaatagactagtacagtaaattggtaccagtagagtggggcgtttctgaaaagatacttgaaaatgtggaagtgactttggaactgggtagcaggcagaggttggaacactttggagggctgagaagaaaactgaaaaatgtgggaaagtttggaactccctagagacttgttgtacagctttgacaaaaatgctaatagtgatatgaacaataaggtccaggctgaggtggtgtcagatagagatgaggaacttattgggaactggagcaaaggtgactcttgttatgttttagcaaagagacgggcagcattttgcccctgccctagagatttgtggaactttgaacttgagagagatgatttagggtgtctggtggaagaaatttctaagcagcaaagcattcaagaggtgatttgggggctgctagtatattcagttttttttcttttcttttcttttttttttttttctggagacaaaatctcactctgtcgcccaggctggagtgcaatgatgtgacttcagctcactgaaacttctgcctctcggattcaagcaattctcctgtctcagcctcctgagtagctgggactacaggggtgtgccaccacacctggcaatttttgtttttttagtagagacagggtttcaccatattggtcaggctggtctgaaactcctaacctcaggtaacccacccaccttggcctccctgagtgctgcgattacacgtgtgagccactgcacccagcccaaaagcattcagtgtttttttttttttttttgaaatggagtcttgctctgttgccaggctggagtgccatggtgtgatctcagctcactacaacctccacctcctgggttgaagcgattctcctgcctcaacctaccaagtagctgggattacaggcgcccaccaccacatccagctgatttttatttttagtagagatggggtttcactatggtggccaggctggcctcaaactcctgacttcaggtgatccaaccccctcggtcccccaaagtgttgggattacaggcgtgagccactgcacccagcctgcactgagttttataagggaagcagagcattaaaattcataaaatttgcagtctgacaatccaatagtaaagaaaataccattttctgaggagaaattcaagctagctgcagaaatttgcataagtaacaaggagcagaatgttaatctccaggacaatggggaaaacatctccagggcatgacagaggtcttcagggaagccccacccatcacaggcccaagagcctaggaggaaaaaggcttcagagggtggacaccccaaggcttggcagcttccatgtggtgtcaagtctgcgggtacacagaagtcaagaattgaggtttgggaacctccacctagatttcagaagatgtatggaaacacctggatgtctaggcagaaatttgctgcacggacgggccctcatggagaacctctgctagggcagcgaggaagggaaatgtggggtcagagcccccacacagagtccctactggagcattgcctagtggagctttgagaagagggccaccatcctctagaccccagaatggtagatccacaaacagcttgcactgtgcacctggaaaagccacagacactcaaagccagttggtgaaagcagccggaagggaagctataccctgcaaagccacagaagcagagcttcccaagaccataggaacccacctcttgcatcaacatgacctggatgtaagacatggagtcaaaggagatcaatttggagctttaagatttgactgccctgctggatttctgacttgcatggggcctgtagcccctttgttttggccaatttctcccatttggaatggctgtatttacccaatgcctgtacccccattgtatctaggaagtaactaacctgctttttaattttacaggctcataggtggaagggacttgcctcagacgaggcaggaaggtccacctcagacgagactttggaccatgaacttttaagttaatgctgaaatgagttaagactttggcggactgttgagaaggcatgatgggttttgaaatgtgaagacatgagatttgggaggggccaggtgtggaatgatatgtttggctgtgtccccacccaaatctcttcttggattcccatgtgttgtgggaaggacccagtgggaagtaattgagtcatgggggcaagtctttcccacgctggtttttttttttttttttttttttgagatggggtctcactttgtcgtccaggcgggagtgcagtggcacaatctcagctcactgcaacctctgcatccccaattcaagcaattctcctgcctcagcctcctgagtagctgggactacaggtgcacaccaccacacccagctaatttttgtatttttagtagagacagggtttcgccatgttggtcaggctggtctcaaacttctgacctcaggtgatccacctgcctcggcctcccaaagtgctgggagtactttgggtgagccacccatggtgtgagctaccttgaaagacccaaatcacttctttttttttttttttttttctgagagggagtctctgtcacccaggctggagtgcaatggcacaatctcagttcacagcaacctccacctctggggttcaagtgattctcccacctcagcctcctgagtagctgggatttcaggtgtgtgccaccatgcctggctaatttttgtatttttagtagagacagggtttcaccacgttggccaggctggtctcgaactcctgacctcatgtgatccacctgccttggccttccaaaatgctgagattacaggcgtgagccactgtgcccagccccaaatcccaaatcacttccaatagtagaaatggaaataaatgtgagctcggaaaagatcaatataaacaagaaagataattatttacccaagttttggtatatctgagtgatggcagttgtagtggtggtgggttaagtcatggaataaatgcttagaaagggaaaattgtaaggagtgcttcctacaatcatgcagttcaaaaacaatcacaaatatggtcggcttgctaagtagtttcttcttttttttttttttttggagacggagtctcactctgtcgcctggtgtacagtcgcgatctcagctcactgcaaactttgcatcccggtttcaagtgattctcctgcctcagccacttgagtcactggattacaggtgcctgccactacactcagctaattttctgtatttttagtagagacggggtttcaccatattggccaggctggtctcaaactcctgacctcgtgattcacccgcctcggcctccaaaagtgctgggattataggcgtaagccaccacgcccggcctcgctgaatactttcatactatatcatttattgtcacacatctgtgtgattgttgtatactttatgaattttttattgtacaaaaatttgcattcatttattcattttcttttcttttttttttttttttgagacgaagtctcgctctgtcacccaggctggagtgcagtggcgcgatcttggctcactgcaagctccacctcctgggttcacgccattctcttgcctcagcctcccgagtagctggtactacaggcacctgccaccctgccctgctaatttattgtatttttagtagagatggggtttcactgtggtctcgatctcctgacctcgtgatccgcctgccttggcctcccaaagtgctgggattacaggtgtgagccactgctcctggcccatttattcattttctaacccacttattccagttcaaggttgcgggtagccagagcctagctcggcaggtcatagcacagggctggaacctgccctggactggacactatcctgttgtagagcacactctcacacacacctgcacacacacccacactcactcagaccaagacaatttagacatgcaatgaacccacgctgattaatcaacagcatttgctttgggatgtgggaggaaaccacagtacctgaaggaaacccacacagacatgggagagtgtgcaaattccacacaggcagggcccctgccgggaagcttttctttttttttccctcatctaagttataaggaaaccaggccaggctcagtggctcatgcctctatatttccagcactttgggaggctaaggtgggaggatcgcttgatttcaggagttcaagatcagcctgggcaacatagtgagatcctgtctgtacaaaatatacaaaaattacccgggtgtggtggcctgtgcctatagtcccagctactcgggaggctgaggtgggaggatcacttgaggccttgattgtcgaggctgcagtgagctgtgatcaggccactgcaccccagcctgggtgacaaagagagaccttgtctcaaaaaaaaaaaaaatttataagtgagccacattgtacaaaattatggtcttccaggacctgatacatttctgtcactccaaaaattctgtcattcccctgctcctttcttttctttttttttagacagagtggagtctcgttctgtcgcccaggctagcgggcagtggcgtgatcttggctcactgcaagctccacctcccgggttcatgccattctcctgcctcagcctcccaagtagctgggactacaggcgcctgccgccacgcctggctaattttttgtatttttaatagagacggggtttcaccgtgttagccaggatggtctcgatctcctgacctcatgatccgcctgcctcggcctcccaaagtgctgggattacaggcgtgagccactgcgcccggcctctatgtgcttatttatatatcttcttttgtgaagtgtctgttcacgtcctttactgtctttctcattgatttgtacttggagcctactttgttgccaaggtgacgtatacagaacccagaagcccatcttgaattcacatgccctggcatacaggttcaaggcaggaagaaaggccaggtgtctataattcgaaggatctgcacctacttaggagttaggctacacaggactatacaagtgttgcaaatcgggtcttttggtgttgggcacaacacagcgcacctgggcaaagagcagaactcctgaatcttacactacagtagtgatttataaccctggatgctaataagaaccacctggggaattcttggtcccaaattctggtttaattggtggacgttcagtctgggcatttggaattgtaaaagctttccaggtgattgtaatatgcagtgaaagttgaaaatcactgttctggaaggacattcactgattattaagcatatgctatgctattttgtgaaactatcaagttaatttaaaccaaactttaaattaggtgttttttttcccacatagataaactgggggagctgaagatttttagctctttatcaacatcaagtatcaaactatagaatgtggccaggcgcagtggctcacgcctgtaatcccagcactctgagaggccaaggtgggcggatcacaagttcaggagtttgagaccagcctggccaacatgccgaaaccccatctctactaaaaatacaaaaattagccaggcatggtggcaggtgcctgtaatcccagatactcgggaggggctgaggcaggaaaattgcttgaacctgggaggcagaggttgcagtgagccgagatcatgccattgcactccagcctgggtgacaagagcaagactccatctcaaaaaacaaacaacaacaacaacaaaaactttagaatgtagaccctgatgatcactatccagtctctataattttctcaaggccccatctcatctataataatcatgtttgaaataagaatttagctatcatagttctagacacatttacccagcagttaaaatgagatgtaagagtcctctttatttattgtcttaagctgatatggagacatctcatgtacttgtaatttgcttccaagttctatccccaaaaagccagatttcaaatttgaaaaaggttgtacagagattatgatgtagggccaggggtcagcaaactatgactagtaggccacatccttcctgtgggccagatccagtctattgcctgttttttgtaaagcctgagagctaagaatggttctaatatatttaaattaatgaagaaaatcaaaatgagagtaataataattacatgaaaatcaaatttcagtgtccataaatacattttttatttgaagacagccatgcttgttcatttacttattctttatcattgcttttgcatacaaatgcagaattgagtaattataacagaaacttcatggcccacaaaacctgaaatatccactattcagatttttttggggtttcactatattgcccaggctggtctcaactcctgggctccagagatcctcccactttgacctcccaaatgctgagattacaggcatgagccacctcacccaaccctatttggatctttatggaatagatttgctgccctgtgatttagataaagattctctgaatgggagaagagaagaattggggaattgaggaatgcatagatcgagtctttcactaagaatgagccccgtctacccactttcccactaagccaagccctgggagataaagactaaatagtagtaaataacagaacttctaatttgtttgggtaatctgaatgcagagggctgacccgcttcctggttagagccccaagtatttttttttttttttgagtcagagttttgcttttgttgcccagactggagcacaatgccttgatctcggctcaccacaacctctgcctcctggttcaagcgattctcctgcctcagcctcccgagtagctgtgattacaggcatacgtaccaccacgcccggctaattttgtatttttagaagagacggggttcctccatgttggtcaggctggtctcaaactcccgacctcaggtgatctgctcacctcagcctctcaaactgctgggattacaagcatgagccaccgcacccaaccctatttggatctttatggaatagatttgctgccctgtggtttagataaagattctctgagtcaggaaacaacaggtgctggagaggatgtggagaaataggaacacttttacactgttggtgggactgtaaactagttcaatgattgtgaaagatagtgtggcgattccttaaggatctagaactagaggccgggcgcggtggctcacacctataatcccagcacttttggaggccgaggcgggtggatcacgaggtcaggagatcgagaccatcctggctaacatggtgaaacccccgtctctactgaaaatacaaaaaattagccagacgtggtggcaggtgcctgtagtcccagctacttgggaggctgaggcaggagaatggcgtgaacccgggagatggagcttgcagtgagctgagatcatgccactgcactccagcctgggggacagagcgagactccgtctcaaaacaaaacaaaaaaaggatctagaactagaaataccatttgacccagccaacccattactgggtatatacccaaaggattatgaatcatgctgctataaagacacatgcacacatatgtttattgcggcactattcacaatagcaaagacttgaaaccaacccaaatgtccatcagtgatagactggattaagaaaatgtggcacatatacaccatgaaatactatgcagccatagaaaaggatgagttcatgtcctttgtagggacttggatgaagctggaaaccatcattctgagcaaactatcgcaaggacagaaaaccaaacactgcatgctctcactcataggtgggaattgaacaatgagaacacttggacacagggtggggaacatcacacaccggggcctgtcatggggtggggggagcagggagggatagcattaggagatatacctaatgtaaatgacgagttaacgggtgcagcacaccaacagggcacatgtatacatatgtaacaaacctgcacattgtgcacttgtaccctagaacttaaagtatatatataaaaaaaaattctctgaatggggaaggagaagaattggggaattgagggatgcatagatattatgagtctttcactaagaatgaaccctgtctacccactttccctgggagataaagactaaatagtagtaaataacagaacttttaatttgtttgggtaatctgaatgtagagggctgacccccttcctggttaaagccgcaagtaataaatggctgtgtgatagataaatctaggctcctggttcccaaagtcttgttcccagacttgcagcatcaccatcacctggaagcttgtttgaagtgtaaattctctagctttgtcccagactcacggaatcaggaactttgggagtggagcccaacagtcagcattgcaacaggccctcctagtggtgctaatgcacagaggagcttgagaagctcagcaggtagaaccttcgatagcagcctgaatttcctgtgactgtgcatagcgcccagcctgaaataaagtctcatttcttgaagaagaaatttgtggccaggcgtggtggctcacgcctgtaatgccagcacattgggaggccgaggcaggcagatcacctgaggtcaggagtccgagaccagcctggccaacatggtgaaaccctgtctctacaaaaacacaaaaattagccgggcgcagtggctcaagcctgtaatcccagcactttgggaggccaaggcgggtggatcacgtgttcaggagatcgagaccatcctggctaacacggtgaaaccccgtctctactaaaaaaatacaaaaaaaattagcagggcgtggtggcgggcgcctgtaaacccagctactcggaggctgaggcaggagaatggcgtgaacccgggaggcggagcttgcagtgagccgagatcgcgccactgcactccagcctgggcgacagaacgagactccgtctcaaaaaaacaaaaacaaaaacaaaaattagccggcatgatgacgggtgcctgtaatcctagctcctcaggaagctggaacaggagaatcacttgaacctgtaaggcagaggttgcagtgagccaagatcatgccattgcactccagcctgcacgacagggcaagactccgtctcaaaaaaaaaaaaagaaaattggctgatgtggtggcgagtgcctgtaatcccagctacttgggagggtgagacacaagaatcacttgaacccgggaggcagaggttgcagttagccaagatcacgccactgcattctagcctgggcgatgaatcgagattttgtctcaataataataataataataataataaaataggccgggcacgttggctcacgcctgtaatcccagcactttgggaggccaaggcgggcagctatgcagcactgatttattccagatgggctgctttcctcactgtattcttcctctatgggtgaacaaatccacctgttggtacttatgcattcatatggcatgaatatgccttgctatggattattgctgttcatcatcactatatgatggagaaggtgagtgggggcaagcaagaccttgctggtaggcagcagcaagccactgttacagggaatcctacagtcaaggtttgctcagcattttcccaattcagggggttagtcctagggttattcatcctctatcacacagttctccaagaatactttactgtggcatctcttagttatgaatgttacttctttttccaagctaatgtcaccacagaacagtgaaaacttaggagttcccttccaggctattgtgttcctaactggtacctgcgacttgccaaggattcacgagtgccttgttttggtggttttcatgtggctgtggcttgtctccaggcaggcctgcaatgagatatgtgtatccatgtgggtggtctgcacaaagtacaaccatgggagtggtcagaagaatttcataaggctgaacaaatgggcttggcaggtctttctccagaattccttttgtaggccagtttcccagctgcaatggatgtgttggcatggagtccagtcttagcctcgaggcctgctgaggcctgcggttcttttttttttttgagactgagtctcgctctgtcaccatgctggcatgcagtggcacaaacgcatccggggtatttttttaaatctacattttattatttttatttttatttatttattttttgagacggaatcttgctctgtagtccaggctggagtgcagtggcatgatcttggctcactgcagcctctgccgcccaggctcaagagattcttctgccgcagcctcctgagtagctgggattacaggtgtgcaccaccatgcgtggctaatttttgtatttttagtagagacggggtttcaccatgttgctcaggatggtcttgaactcctgacctcgtgatccactcacctcggcctcccaaagtgctgggattacaggtgtgagccaccacgcccggcctattttattatttttagagacaggatctcgctctgttgctcaggctggggtgcagtggtgcagtcatagctcactgcagcctgcaactcctgggctcaagcgatcctcttgcctcagcctcccatgtagctgggactacaggcacccagctaaggaaaaaaacatttaattgaaggaggggtagcacgtaccaaagcaaattttagatgtcaaattgaaaaaaatgagaaagtatgatatttccatttgttttcacaaacataaggataatataacacccaagtctcctattttaaaattctaccttatgtagaggcatatattgagtatctattaattaaaaagttttaagctgggcgcggtggctcacgcctgtaatcccagcaatttgggaggccgaggtgggtggatcacgaggtcaagagattgagaccagcctgaccaacacagtaaaacctcatctctactaaaaatacaaaaattagccaggcatggtggtgcatgcctgtggtcccagctactcgggaggctgaggcaggagaatcgcttgaacccgggaggcagaggttgcagtgagccgagatagcaccactgcactccaacctggtgacagagtgagagaccatctcaaaaaaaaaaaaaatagatttaagagactgtatctcttgataggtcaaaggagaagatggataaatatataaagctatggaactatgctgtctaatatagtaactactggccatatatggctattgagcaaagctagtctaaattgagttgtgttataagtgtaaagcacatatccaatttcttttttttttttccttttttttttttttgaggcggagttttgctcttgttgcccaggctggactgcaatggcatgatctcacctcaccacaacttccacctcccaggttcaagcgattgtcctgcctcagcctccctagtaactgggattacaggcaagttccaccacgcccgggtaattttgtatttttagtagagatgaggtttctccatgttggtcaggctggtctcgaactcctgacctcaggtgacccgctcgcctcagcctcccaaagtgctgggattacaggcgtgagccaccgcacccggctccaatttcaaacacttaatataaaaaagaataggcggccgggtgcggtggctcacgcctgtaatctcagcactttgggaggccgaggctggtggatcaccagtcaggagatcaagaacatcctggctaacatggtgaaaccccatgtctactaaaaatacaaaaaattagccgggtgtggtggcgggcgcctgtagtcccagctactagggaggctgaggcagaatggcgtgaacccgggaggtggagcttgctgcagtgagccgagattgcgccacagcactccagcctgggcgacagagcgagactccatctcaaaaaaaaaaaagaaaggaaggaagaaaagaaaagtataggccaggcatggtggctcacgcctgtaatcccagcactttgggaggctgaggagggcagatcacttgaggtcgggagtttgagaccagcctgaccaacatggagcaatcccgtctctactaaaaatacaaaattagccaggcatggtggcatatgcttgtaatcccagctactcaggaggctgaggcaggagaatcacttgaaccagggaggctgaggttgtggtgagctgagatcccgccattgtactccagcctgggcaacaagagcaaaactccctttccaaaaaaaaattaataaaataaaaataaaaaaatatagaatacttcattaataattttttctgccagacacggtggctcacacctgtaatccccgcactttgggaacctgaggcaggaggattgcttgagctcagaagtttgagaccaacctgggctcatatctacaaatatatttttttaaatcagctgggcatggtggcacatacctctggtcccagctaatcagtatgctgagtggggaggatcacctgagcccaggagtttgagactgcagtgagctgtatttgtaccactgtacgccaacctggacgacaaagtgagattttatctcaaaaacaattttttttttctaagtgattacgtgttgaaatcatattatgtatctattgggttaaataaaatatcaaaattaattcaccttttaaagaaaactttttaatatggctactagaaaatttaaagtttgaacccaggaggcggaggttgcagtgagccaagatcgtgccactgcatgccagcttgggcgacagagggagactccatctcaaaaaaaaaaaaaagaaagaaagaaaatttaaaattataatatggcttgcattatattcctatgggatagcactgctagagagaaattgtgatgaagacccatgggaaatgtatcaaagttgaaatacatggaaaacttaactaaatggtttaataagtacatttcaataatattttttagcattgtgtcaaaattataacgtggcaaaaacattagcttttcataaaataacccttactaacgaaatttaatggtatttccatgtcattactctgccaatttaataattggtatttggttctaagtctgttaaaaggagttttgaatcttctctgttacctacttgcatgtgcatttgttttttgttgtttgtttgagatggagtctcactctgctcccaggctggagtgcagtggcacgatcttggcttactgcaacctccacctcccaggttcaagcaattctgcctcagcctcctgagtacctgggattataggcatgtgccaccatgtccggctcatttttgtatttttactagagacggggtttcaccatgttggccaggctggtcttgagttcctgacttcaagtgatctgcctgcctcagcctcccaaagtgctgggatgacaggcgtgagccaccacgctggcctgcatgtgcatttgcaattacaaatgtagtgacccaggaaggttgtactgacactcacattctagtagatgcatggccaaaaacaatttgatttcccaaaatggtcaacaacacttggtaaggttcccaaccaaacaaagtacatttttcttacatttacacagcagtttggttcctggaaaattcggtgaatgttaaaaccatgcaaaaatacttctctttgtgtgtatgtggagtgggggcgtgtatgtaaaacagaatcagctcagatcattataaacagatttttatcttacaggaatctctggtgatacagtggaaaatcctaaaagacacaaagcaattatttgctatgaagagagtgtggcatccctgccctcccccattacgtgcttatagcgtctcaatattttgtaaacattttttggggggaataattatagattcacaggaacttccaaagaaatgtccaggaagttccactgcacccttcactccattctccctcaatgttaatatcttccatggctacagtgcaatatcaaaaccaggaaatcaacattggtacaatgcacagagcctattcagataggaaaccaacattggtataatcctcatcacttgttcagacttcacccattatacttgcagtcattagtgtgtgtgtatgtgtcttgctttatataacattaccacatgcctagctttgtataattaccattataatcaagatacacaactgtcgagtagggagggatcatggcagtggggaggcaggactagattgcagctcccacttggacggacagagcagtgtgcagcctctcgcatcgtgaacttttgctccagaagtactgcaggaatagatcaggaaagctgagagaacccacagaccctaggaaggaagcagattgctcctgcaggacctgggagacaccctaaatactgtgttggtatccatggctgagagacctacagatggtcacatcacatgactctgtgcagacaacccccagtattagccaggagcctggtagacctgttgggtggctagatccagaagagagataacaatcactacagttctactatcaggaaaccacatccctaggaaaatggggagagtaccacatcaagggaacaccccatgggacaaaagaacccgaacaacagccttgatccctagaccttccctctgacaaagcctacaccaatgagaaggaaccagaaaaccaactctggtaatatgacaaaacaagttcttcaacactctgcaaaaatcacaccagctcagaagcgatggatccaaccaagaagaaatccttgatttacctgaaaaagaattcagaaggtcagttactaagctaatcaaggaggcaccagaaaaaggcaaagctcaatttaaggaaatcaaaaaaagatataagaaatgaaggaagaaatcttcagtgaaaaagatagcataaataaaaaacaatcaaaacttcaggaaacaatggatgcacttatagaaatgcaaatgctctggaaagtctcagcaatagaatcgaacaagcagaagaaagaattcagggctcgaagacaaggttttcaaattaacccaattcaacaaagacaaagaaaaaagaataagaaaatatgaacaaagcctccaagatgtctaggattatgttaaacgaccaaacctaagaataatcggcgttcctgaggaagaagagaaatctaaaaatttggaaaacatatttgggggaataatcaaggaaaacttccccagccttgctagaaacctagacatccaaatacaagaagctcaaagaacacctgggaaattcatcgcaaaaagatcatcaccaaaaaaaaaaaaaaaaaaaaaaaaatggccaggcgcggtggctcatgcctgtaatcccagcactttgggaggctgaggcaggcagatcacctgaggttgggagttcgagaccagcctgaccaatatggagaaaccccatctctactaaaaatacaaaaattagccagtgtcgtggtgcatgactgtagtcccagctactcaggaggctgaggcaggaaaatcgcttgaacctaggaggtggaggttgcaatgagctgagatcgtgccactgcactctagcctgggtaacagagtaagactctgtctttaaaaaaaaaaaaaaaaaaaaggatcatctccaaggcacattgttgtcaggttatctaaagttaacatgaaggaaagaatgttttttttttgagatggagtttcgctcttgttgcccaggctggagtgcaatggcgcaatctcggctcaccacaacctctgcctcccaggttcaagcgattcttctgcctcagcctcctgagtagctggaattacaggcatgtgccaccatgcccagctaattttgtatttatggaggagacagggtttctccacattggtcaggctggtcttgaactcccgacctcaggtgatccgcccgccacggcctcccaaagtgctgggattacaggcatgagccacctcgcccagccctacctagattggcatttttattattattattattgtttgtttgtttgttttttgagatggagtttcgctcttgttgcccaggctggagtgcaatggtgcgatctgggctcatcgcaacctccaattggctatttttacttagtatgattcacttgaggttcatccaagttgtatgtgttaatagctcattcactttgattgctgcgtagtagtccatggtttgaatgttccgcagttcagccatttatttactgaaagacatttagaggctgggcgtggttgctcatgcctgtaatcccaacacttcgggaggccaaggcaggcaggatcacttgagcccagaagtttaagacaagcctgggcaacatggcaaacccccgtctctacagaaaaatgaaaattagccaggcttggtggttcacacctgtagtctcacctactcagaagattaaggtgagaggatcacctgagcttgggggtgcggaggttgcagtgagctgaaatcatgccagtgcactccagcttgagtgagagtgacactctgtctcaaaaaaaaaaaacacctttagataatttacagtgtttggctattatgaataaagctgctgtgaacactattacgagcttgtgtgtgaaaaaaaattttatgtgagaaaaatgaccaagagtgaaattgctgagtcatatgttaagtccattttgggtggtaaaaaaaaagcagccctggccgggcagggtggctcatgcctgtaatttcagcactttgggaggctgaggcaggcaggtcacgaggtcaggagttcgaggccagcctgaccaacatggtgaaactccatctctactaaaaatacaaaaattagccaggcatggtgccgcgcgcctgtaatcccagctactcaggaggctgaggcaggagaattgcttgaacccgggaggcggaggttgcagtgagctgagatcgcaccactgcactccagcctgggcaacagagtgacactccgtctcaaaaaaaagaaaaaagaaaaggaagaagaaacagcccaagtatttttcagagcggctgtaccattttacgtcccatccagcaaagtatgagtgactcagagtctctgcatcctcaccagctcttggcatcatcactattttttatttcagccattcttagtactttgacaatcaaaatttgcccacaaatttctaaaatattacccagatggtagcattgtgtctactgagaatcattagatgactggctctcaaactaggctgtgcattcagattgtctagagcactttataaacatacctgtggctgggtccctgcttcacagattctagtttaattggtctgggatgtgacctggccatcaagaattgtaaaagttccccaggtatttcaatgtacaaacaaattcatgaatcactgatactattcccacgtctcagtcattttagtcctaaagtttcaaaatcctatggatgagataaatcaagggttgaggccaggcgcagtggctcgtgtctgtaatcccaacactttgagaggccgagatgggcggatcatgaggtcaggagtttgagaccagcctggcaatgtaatgaaaccccgtctctactaaaaatacaaaaattagctggatgtggtggcatgtgcctataatcccagctactcaggaggctgagggaggagaattgcttgaacccaggaggcggaggttgccatgagccaagatcatgccactgcactccagcctgggcgacagagcaagacaatgtctggggggcggggaggggaatcaagggtcgagatcatttctccagaataagatttacagctagtgcagcattattttcccagcagaatgtcagtagagctcaaaggggaagcaaaagtaactgtggcctaacatgctgggttagaagaagaaacttcttaaaatagatatataagactaaaactaagtccaaattacataaaaacaaaccacaaatgcctaggactcatttcaattcctagacatatgatgtagtggtaccaaaagacgggctttcgaattagaagttctggccaatcactgggcacggtggctcacacctgtaatcccagcactttgagaggctgaggagggtggatcacttgaggtcaggagttcgagaccaacctagccaacatggcaaaactctgtctttactaaaaatacaaaaagtagctgggcgtagtggtgcacgcctgtaatcccagctactcgggaggctgaggcaggagaatggcttgaaccaaggagaaggagtttgcagtgagccgagattatgccgttgcacttcggcctaggcgacacagcaagactccatctcaaaaaaaaccaaaacaaagacttagaagtcctggttttgagttctggtttttccatgtaagagctgtgggatcttggatgagtcatttgacccctctaaacttcagttttctatccctgagatctgcaatgatgaaaacctcagaggtttttggcaaagcttaaagtgccaatatgtgctgtatttttaacaaaaacatgctgcaattatgatacaattattacggataggaaaattagaaatatttgttatccagacctcatccaactcactccaaccaatatctgatgaccacattttatgtaatatttaatatgtattgtcatggccaggcacagtggctcatgcctgtaatcccagcactgtgggaggcgtggcaggtggatcacttgaggtcaggaatttgagaccatcctggccaacatggtgaaactccgtctctactaaaattccaaaaattagccgggtatgggggcggtgcctgtaatcccagctactcaggaggccgaggcaggagaattgcttgaacccaggagacagaggttgcagtgagctgagatcacaccattgcactccagcctgggcaacagaacaagactccgtccccctcccccacaaaaaaaaaaggcctggtgtggtggctcacacctgtaatcccagcactttcagaggccgaggtgggcagaccacctgaggtcaggagtttgagactagcctggccaacatggtgaaaccccgtctctactaaaatacaaacattggctggacgtggtggtgggtgcctgtaatccccagctactcgagtggttgcggcaggagaattgcttgaacacggcaggcagaggttgctgagatcgtgccattgtacttcagcctggacggcaagagcataactctgtctcaaaaacacatacacagccgggcgcggtggctcacgcctgtaatcccagcactctgggaggccgagacgggcggatcacaaggtcaggagatcgagaccatcttggctaacacagtgaaaccccatctctactaaaaaatacaaaaagttagccgggcatagtggtgggcgccgtgcctgtagtcccagctactcaggaggctgaggcaggagaatggcgtgaacccgggaggcggagcttgcagtgagccgagatcgcgccactgcactccagcactctagcctgggtgacagagcaagactccgtctcaaaaaacaaacaaacaaaaacaaacacacacacacacacacaccaaaaaaaaaaaaacccacagaacaatacaattttatttatttatttatttatttacagaaacgaggtctcattatattgcccaggctggtcttgaactcctgagctcaagtgatcctcccgcctccgcgtcccgatatgctgggattacaagcatgagccaccatgcctggcccagaataatataatttggggcttcttaagtttagtgtgcctgcgaatcaccaagggatctctttaaatttcagatatgattcagcaggtctttggcagggcctgaggctctgcatttcttttgttgttatttcgagacagagtctagctatgtcacccagggtggagtgcagtggtgcgatcactgctcactgcagtcttgccttcctgggctcaagcagtcctcccatctcagcctcccaagtagctgggactgcatgccaccacacccggctaattttttttttttttttttgagatggagtcttgctctgtcgcccaggctggagtgcaatgatgtggtctcagctcactgcaacccctgcctcccgggttcgagcgattctcttcctcagcctcccaagtagctgggactacaggcgcccaccacacccagctaattgttgtatttttttaaatagagacggggtttcactatgttggccaggcttgtctcaaactgctcacctcatgatccgcccacctcagcctcccaaagtgctgggattacaggtgtgagccaccgcacccggcctaatttttgtattttttgtagagacagggtttcgccgtgttgcccaggctggtctcgaacttctgggctcaagtgaccctcctgcctcagcctctgaaagtgttgggattataggcgtgagccactgtgccctgccaggccctgcatttctaacaagctcttaggtgacatccgtgctggttgtctgctgacattttgagtagcaaagatataattttcaaataccataactcagctttaataactgttaactactggtcagctttgtttccatcttcttatccattctctgccccagatgattttgaagtaaatcttggacattctatgatttacgtgtatttaattacatatctcattgaaaacttcagaatgcttcctttgaaaaatataatcataatagcatcaggagcgcctcaaaagtttaacaatgacttctttttttattatttttattttttatttatttttttattttttgagacagagtctcgctctgtcgcccaggctggagtgcagtggcacaatctcggctcactgcaacctccacctcacgggttcacgccgttctcctgcctcagcctcccgagtagctgggactataggcgccagccatcacgcctggctaattttttgtattttaagtagagacggggttttaccgtgttagccaggatggtctcgatctcctgaccttgtgatctgcccgccttggtctcccaaagtgctaggactacaggcaggagccaccgcgcctgccctaacagtgatttctgagtatcatccagtatccagtcaattcacatttccctgattgtcccatgaatgcttttttattgtgatttgttaatatgtctcttcagtcattttttattttatttatttatatatttttgagatggagtcttgctctgtcacccaggctacagtgcagtggtgtcatctcagctcactgaaacctttgcctcccaggttcaagtgattctcctgcctcagcctcctgagtagctgggattacaggctcgcaccaccatgcccagctatttttagtagagacagggtttcaccttgttggttaggctggtctcgaactcctgacctcgtgatctgctcgcctcagcctcccaaagtgctgggattacaggcgtgagccaccatgcccggcctcttcagtcatttttaacctgaagattctcctttcagctttttcttttccttacttttatttatttatttatttttaagaaactaggtatttgttctgtagagttttccagtgtggattttgctgccaacatcctcctgatgttgttgagcatgttcctttctctcttgtatttcctataaattggtatggatccagagccttaattggattcaggtttgatttttttgacaaggctacctaatacacagtgctgtgcattccatcaggaggtgcctcatgtcttcttgtctttctgtccataatctttgtaaaggagtcatctcgcctaacaatggaacccgtgattggggtctgctgccaccgggtggtagcagcatgccatagccgcaggttcaaggagtagtaaaagggaaaaaacactgctgtgagatcccagacggcaggacttgtcctcttcattgaacctacaataaatcatcatgattctcaaacacgatacttcaaagctacttttattttattattattattatttttgttattattgtttttgagacggagtctcactctgtagcccaagctggagtgcagtggcgtgatctcggctcactgcaaccttcgcctctgggactcaagcgattctcctgcctcagcctctcgaggagatgggactagaggcacccaccaccatgcccagttaattttttttttttgtatttttagtagagaccaggtttcaccatgttgccctgggtggtctcgaactcctaagctcaggagatccactcgccttggcctcccaaagtgctgtgattacaggcgtgagtcaccacacctggcctattattattattttttagagacagtcacccaggctggagtgcagtggcacaatcattgctcactgcagcctcaatctctcgggctcaagctattctcccatctcagcctcttgagtagcggggaccacaggcacacaccaccacgcctggctagtctttttttttttgcttttttcttttggtagagatgtggtctcactaagttgcccaggagcaaagctacttttaaaatgaggctgggcactgtggctcatgcctgtaatcctgaactgaggcaggaggattgcttgaggtcaggagttcaaggccagcctggcctacatggtgaaacctcatctctactaaaaatacaaaagttagccaggtgtccaggtgcagtggctcactcctgtaatcccagcactttgggaggccgaggtgggcggaacacctgaggtcgggaccagcctgaccaagagagagaaaccctgtctctactaaaaagacaaaattagccgtcgtggtggcgtgtgcctgtaatcccagctgttcaggccgaggttggcggaacacctgaggttgggaattcgagaccagcctgacaaacagggagaaaccctgtctctgaggctgaggcaggagaatcacttaaacctgggagaaggaagttgcagtgagccgagactgtgccattgcaccccggcctgggcaacaagagcggagctctgtctcaaaaaaaaaaaaaaaaagaaaattagccaggcatggtggtgcatgcttgtagtcccagctactctggagactgaggcaggagaatcacttgaacctgggaggtggaggttgcagtgagccgagatcaggccactgcactccagcctcgacaacagagcaagactgtctcaaaataaatacataaataaattagttaaattaaattaaacaatgctgctgggtgcagtgggctgacgcctataatcccagcactttgagaggtggaggcatgaggattgcctgagcctaggatttcaaggctgcagtgaactatgatcagccactgtactccagcctgggtaacacagcaaaaccctgtctctaaaaaaataaaatagtctaatgctgtctaatagcatgaaataatagttacaatttattaagcccaagaaccttatatccatatctcatttaattctcacaacacccaggaatattaaaccatggtgttcatgttttgtaaaacagtggtgatgctggagtttgctgtcaagacttgttctcaaccatttctgtgccaatcttctgttttggtctatattggagtcacttgtccttcctgtctccacccgacatccccttacagtggtgctgttattttttctgtttgtcccactgtcctccattgccatccattccccctgggagactgaactttctctttagttttttttttttttttttaaagacagagtctcgctctgtcgcccaggctggagtgcagtggcacaatctcagctcactgcgaccgccacctcccaggttcaagcaattgtcctgcctcagcctcccgagtagctgggattaaaagagcaccccaccacacctggcaaatttttgtatttttagtagagacggggtttcaccatgttggccaggctggtctcaaactcctgacctcaagtgatccacctgccttggcctcccaaagtgctaggattacaggcatgagccaccacacctggtcttacttttcctttctttctttcttttttttttttttgagatggagtttgtgctctgttgcccaggctggagtgcaatggcacgatctcaggttactgcaaccaccgcctattaggttcaagcgattctctcacctcagcctcccgagtagctgggattacaggcgtccaacaccacgcctggctagtttttgtatttttttgtttatttatttttttttgtgacagagtctcccttcgtcgcccaggctggagtgcagtggcgcaatctcggctcactgcctctgccttccggttcagtcaattctcctgtctcagcctccctagtagctgggactacgggcacacgccaccatggccagctaattttttgtttctgttttgttttgttttgttttgtcttgtttttgaaacagagtcatgctcttgttgcccaggttggagtgcaatggcacgatctcggctcactgcaacctctgcctcctggattcaatggattctcctgcctcagcctcccaagtagctgggattacaggtgcccaccaccatgcccagctaatttttttttttgtatttttagtagagacggggtttcaccatgttgaccaggctactcccaaactcggacgacctgaagtcggaagttcgagaccagcaggaccaacatggagaaaccccgtctctactaaaaatacaaaaaattagccaggcgtggtgttacatgcttgtaattccagctacttgggaggctgaggcaggagaatcacttgaacccaggaggtagaggttgcagtgagccgagattgcgccattgccctctggcctgggagacaagagtgaaactccgtctcaaaaaaaaaaaaaaagtttatcctttttccctctgggctccatgcaggtccctttccttctccacttttgttcccagcaatttacggtttccttgattatcatttctctgataactatgttaccagaaagggctcctgatgcacatcctaagagagggttcttggatctcacacaagaaagaattcagggtgagtcactagagtaagtgaaagcaagtttattaggaaagtaaaggaagaaaggaatgcctactttacagacagagcagccctgagggatgctggttgcccatttttatggttatttcttgatgatatgctaaacaaggggtaaattattcatgcctcccctttttagaccatattgggtgacttcctgacgttgccatggcatttgtaaactgtcatggtgctggtgggaacgtagcagtcaggacacccagaggtcactctcgtcgccatcttggttttcgtgggttttaactggctcctttactgcaacatgttttatcagcaaggtctgtatgacctgtatcttgtgctgacctcctatctcatcctgtgacttagaatgccttaaccttctgggaatgcagcctagtaggtttcagcctcattttacccagctttattcaagacggagttgctgtagttcaaatgcctctgacaattataccctcttagttatgtgctttctgttctcttggttaaggtttgttcgcttgtttttgagacaggttctctctctcttgcccaggctgaagtgcagtggcgtgatgttgggtcactgcaaactccacctctggggttcaagctattctcctgcctcagcctcccgataagctgggattacaggcacccaccaccaagcctggctaatttttgcatttttagtagagacagggtttcaccatgtttgccaggctggtctcgaactcctggcctcatgtgatctggccgtctcagcctctcaaagtgctgggattacaggcatgagccactgtgcccagctttggttaaggtttgaaggtgtcacagggtgaactccagaattggggttcagcctgggagaccccttgggttcctggcttcacaggaaggaattcacagcctggttaacatggtgaaatgccatctctacacaaatacatatattaggtgggtgtggtggcacatgcctgtaatcccagctactcaggaggctgaggcacaagaatcacttgaaccccggaggcaggggttacaatgagctgagatcgcaccactacactccagcctgggcgacagagtgagactgtcttaaaaaaataaataagtagctgggagtggtggctcactcctgtaatcccaacactttgggaggctgagggggggtggatcacgagatcaggagttcgagaccagcctgaccagcatggtgaaacctggtttttactgaaaatacaaaaaattagccgggcggggtggtgcgtgcctgtaattccagctacttgggaggttgaggcaggagaattgcttgaacccaggaggcaaaggttgcagtgagctgagatcgcgccattgcactctagcttgggcaacaagggcgaaactccgtctcaaaaaaataataaataaataaataaaaagtagcctccataggcagagcagccctgagggctggtgggtggctctttttatggttattatggttatttctttattatatgctaaacaaggagtggattcttcatgagttttccaggaaagtggcagggaattcctggaacctagggttcctctttctttcagagcatatagggtaacttccagacattgccagggtgtttgtaaactgtcattgcacttgtgggagcttcctttagcatgctaatgtattataattagcatatgataagcagttaggatgaccaggggtcgctttcatggccatcttggtttgggtgggttttgaccggcttcttttactgtatgttttatcaactgggtctttgtgagctgtgtcttgtgaaaccagtcctgccaaactcctgtctcaaaggaagtgccttcatttcatcatcaacattcttaaaatttttttcctttttttttttttttttgagacggagtttcgctcctcttgcccaggatggagtgccatggtgtgatcttggctcactgcaacctctgcctcgcaggttcaagcgattctcctgcctcagcctcctgagtagctgggattacaggtgtgcaccaccatacccggctaatttttgtatttttagtagagatgaggtttcaccatgttggtcaggctggtctcgaacacctgaccttgtgatccacctgccttggcctcccaaattgctgggattacaggggtgagccaccgtgcctggccatgaacatcttttcatatgtttaagagtcatttgtttttactgtctgttcatatcttttccctattgttattctggttgttctggttgttagcattttgttttgttttgttttgttttgagatggagtctcgcactctcacccaggctggagtgcagtggcaccagccatctcggctcactgcaagctccgcctcccgggttcacaccattctcctgcctcagcctcccaagtagctgggactacaggcgcccgccaccatgcctggctaattttttgtatttttagtagagacggggtttcaccgtgttagccaggatggtcttgatctcctgaccttgtgatccgcccacctcagcctctcaaagtgctgggattacaggcgtgagccaccacgccaggcctttttgtttgttttttttgaggcagagtctcactctgtcgcccaggctggagtgcagtggcgagatctctgctcactgcaacctctgcctcccgggttcacaccattctcctgcctcagtctcccgagtagctgggactacaggtgcccgccaccatgcccggctaattttttttatttttagtagagacagggtttcactgtgttagctaggatggtctcgatctcctgacctcgtgatccacccgcctcggcctcccaaagtgctggggttataggcgtgagccaccatgcccgccttagtttttttattgatttagttttccttattgatttggagaaattatgtattaaataagctggccccttgtccgtacataagtgataaatatttcccacattttttatttgcttttgaatttatttgtgttttgatcatgttgatgttttaatatttttatataattgtgatggttaattttaggtgttgcctctactggattgaggaatacctagagaactagtaaagcattgtttctggatgtgtctgtgaggatgtttcctcacagtcagtggactgagaagggaagattcactctcagtgtgaatgggcaccatccaattgtctaggggcccagtagaacaaaaaaagagaggaaaggatttcctcttcctccttcctcactcccctcatccccagagctgggatattctcctcctcttgctcttggacatcagaattccaggctttccagacttgggactccagggcttacaatcaccctcctgcagggttatcaagcctgcagcctcagagtgagaactgtaccatcagctccactggttctgaggcttttgaacttggactgaaccacaatactggcatactaagatctccagattgcagatgccctcttgtgtctcccataattaccagagccaattctccttattaatcctcactcttatatttatatctctttggtatttttttttttttttgagatggagtctcaccctgtcacccaggctggagtgcagtgacaggatcttggctcactgcatcttccgcctcccgggttcaagctattttcctgacctcgtgatccgcctgcctcggcctcccaaagtggtgagattacaggcacgagccaccgcgcccggccgatattgttctatagttttgcaaaatgttaccttggttgaaactgagtaaagcatacaaggaatttctttgtattattattattattattattattattgttattattttgaggcagagacttgctctgtcacccaggctggagtgcaatggtgccatcacagctcactgcggccttaacctcctgggcttgggtgattctcccacctcagcctcttgagtagttgggactacaggtgtgagccaccacactggactgatttttatattttttgtagagatgggatttcaccatgctgcccaggctggtctcaaactcctgggctcaagcaatctgcctgcttcggcccctcaaagtgctgggattacaggcgtgagccaccacacccagcctgtgttattttttactactgcatatgaatctgcaattatctcaataaaattttcaattaaaaatgcaggcaatacagtagtttagaaagtaaatactaacagtcttctctctctgtgcctactctagagaatttcattccctagagagaatgttaacactataatatatatttttccagacttctttctatacttccacatttttctaaacaaaagtggggctgtgctatttatgtatctcagtagcttatttcattcacataaaaaaaaaccagacatctttccatagcatttagggttgccagatacagcaaataaaaatacagcatgcctatttaaatttgaaatggctgatcttttagcataggtatgtccctaatatgttgctattttatttagtaatactaatgggagtaggcttacttaattcttttgataaataattgcataatattcctctgtataacattttgcctttgcctaataatgagggtgctctttacatcacagtgttcatcgtcattctcattaatacagagagtctcttatatttcttttttttcttttttgagatggagtctcactctgtcaccccagctggagtgcagtggtgcgatcacagctcatggcaacctctgcctcccgggttcaagcagttctccctcggcctcctgagtagctaggattacaggcgtgcaccaccatgcctggctaatttttatatttttagtagagacagggtttcaccatgttggccaggctggtctttaactcctgacctcatgatctgcccacctcagcctcccaaagtgctgggactacaggcatgagccactgggcgagacggagtcttgctctgtcactgggctggagtgcagtggcacaatctcggctcattgcaacctctgcctcccgagttcaagcaactctcctgcctcagcctcccgagtagctgggattactggtgcccaccacgaggcctggctagttttgttttttttttttagtagagattgggggttttaccatgttggccaggctggtctcgaactcctgacctcaggtgatccacccacctcagcctcccaaagtgctgggattatagacatgagccaccaagcctgtcctaaaacttttttttttttgtggtcttcctctgttgcccaggctagagtgtggaggtgccatctcggctcactgcaacctccaacctcctgggttcaagcaattctcatgcctcagcctcctgagtagctgggatgacaagcgtgtgccaccatgcctggctaattttttgtattttagtagagaaagtgtttcaccatattgcccaggctggtcttgaactcctgagctcaggcagtccacccgccttcgcctcccaaagtgctaggattacaggcgtgagccaccacacctggccggtaccttaaactttaattattctaactcctatatttaattcagcgaacactaagaactgcagtggaaaaagccttggctttggatccctggctctgcttcttactagatacctaaccatcttttatttttatttattttttactttaatttagagatggggggctgggcacagtggctcatgcctgcgatcccagcactttgggaggccgaggtgggaggatcacctgaggatgggagttcgagaccagcctgaccaacatggagaaaccccgtctctactaaaaatacaaaattagccaggcgtggtggcacatgcctgtaatcccagctactagggaggctgaggcaggagaatctcttgaacctggtaggcagaggttacagtgagctgagatcatgccattgcactccagcctgggcaacaagagtgaaactccatctcaaaaaagaaaaaaaaaaaaattagaggtggggtcttgctctgtctgtcacctgggctatggtgcagtggcatgatcttagctcactgcagccttgaactcctgggctcaagtaatgcttccacctcagtctcctgaatagctgggaccacaggtgtacaccaccatatctggctaatacctcatgtccttcggccttagtttcctcatctgtaaaatgggaatagaaataattattttacaggattagaaataatgtatttacaaccctgtaatctagtgtctagcagagaaggaaacttaagaaataaatcattgtttattatagtaatgttaagattctgtggtgggtactaagggataaacagagttaagattcctgaaatgttttgttactttttttttttttttctgagacagtatcttgctctgttgctcaggctggagtgcactggtgccatttcagcttactgtaacctctgcctcccaggctcaagcgattcccctacctcagcctcccaagtagctgggactacactataccttgcttactttttattttcatataattttttttttttgaggtggagtcttgctctgttgcccaggctggaatgcagtggctctccgcctccccagttcaagcaattctcccgcctctgcctccccagtagttgggattacagtcacacatgccaccacgcccggctaagtttttttttttttttgagatggagtctcgctctgttgcccaggctggagtacagtggcgcggtctcagctcactgcaagctctgcctcccaggttcatgacattctcctgcctcagcttcctgagtagctaggactacaggcacccactaccacgcccggctaattttttgtatttttagtagagacggggtttcaccgtgttagccaggatggtcttgatctcctgacctcgtgatcagcccatctcggcctcccaaagtgctgggattacaggggattacaggcgtgaaccatctcgcccagtcttgattttttttttttctttttttgagacagagttttgctctgtcaccaggctagagtgcagtgacacgatctcggctcactgaaacctccgcctcctgggttcaagcaattctcgtgtctcagcctcccgagtagctgggactacaggcgtgtgccgccacatccagctaatttttgtatttttagtagagatggggtttcactatgttggtcaaggtggtcatgaactcctgacctctggtgatccacccacctcggcctcccaaagtgttgagattaacaggcgtgagccaccactcccagcccggactttctcttatataaccacctaacaacagttcagttatcataattacaaaatttaacaaattcctgaagtagtttctgaattcaaatccctaaagtatttgtaatagctttttaaaactatttccttttctagcaggactgtgaccaaaaccctaattttctatggcttcccacttgcccttggattggatgtaaaatctgtgcatggcttgttgcccgaggctggctaacctgcaggcccacagaaggcaaagggctttgcactgagaggcgccttcagagactggacgccagcctttttctcccgttccactgatgactcagccacacatggcactgagactcgtggcattcactctgccaacagagaagcacagctctcaccctgctttggcaggcctggcacactcctatggtggcccagcgtctgctctggctttctctgaaatgtaaatccattcttttcctggtcagcacacctcccagctctagcctggcacacaaggctctctcactgggtcccctgcttaccagctcttcctctcctgcctttttccatcctgtgctccacccaactggcctttctccacggtgacttgtgttttctcgccccctgcttctgcacacatattttcccctgcctggggaatgctcttcttcccccgttggatttttctattattttcaaggcctggctccagtagaaaatatttcaatcacttccctctgagctggaaacaagatagctacctgcacttgtatttagcacttctatggggtccttcattagtgttagccaactgtagtatgggcctgtctatgggtctggttcctctgtctgtgagctcccttgggcagaaaccatgtctcatttcttcatttctctggtattgccctgaacagggcctggcacagggtagacatgggtgactgatgaaagaatgaatagcacaaattaccctgtgagagaggggcaggcttttgagtatagagatgatgcatggatgtagcacataaatcatttaaaagactgttgtgggttttattattgctgctaatggtgttattcttggtagagatgttacattcggccaggtgctgtggcacactgtaatcccagcactttgggaggccgaggtgggtggatcacctgaggtcaggagttcaaaacaagcctcgctaacatggtgaaacctcatctctactaagaatacaaaaaattagccgggcgtggtggtgcgtgcctgtagtcccagctacttgggaggctgaggcaggtaaatcgcttaaacccaggtggtggaggttgcagtgagccaacattgtgccactgcactccagcctgggtgacacagtgagactccatctcaaaaacaaaacaaaacaaaacaaaaaaaacaaagagatgttaagaagttacatcccggccaggcatggtggctcatgcctgtaatcccagcactttgggaggctgagatgggcagatcacgaggtcagaagttctagaccagcctggccaatatggtgaaaccctatccctactaaaaatacaaaaattagccgcatggtggcgcacgcctttagtcccacctacttgggaggctgaggcagaagaatcacttgaactggggaggcggacgttgcagtgagcccacagcactccagcctgggtgacagagcaagactccatctcgaaaaaaggaaaaaaaaaaaaaaaaggatgttacatcccaaatggcctgacctacccagtcaggccatttttttttttcttttgagatggagttttgctctttttgtccaggctggagtgcaatggcgcgatcttgggtcaccgcaacttctgcctcctgggttcaagtgattctcctgcctcagcttcccaagtagctaggattacaggcatgcgccaccatgcctggctaattttgtatttttagtagagatggggtttcaccgtgttggtcaggctggtcttgacgcctaacctcgtgatccgcccacctctgtctcccaaagtgctgggattacaggcgtgagcctgcacagcggaccagagatcttgatgctcttcttgtaactgttttagggtaccatgaactatacccgtaattagactgcaaacttaattgataaatattgtgtgtgttctgactgcttcactggctgattgttccccgtctctttccctctcctcaggcgttcctattccctgagacacaacaatgttgaaattaagccaattaataaccctacaatggcctctaagtgttcaagtgaaaggaagagtcacacatctgtcacttgaaataaaaatctagaaatgattaagcttagtgaggaaggcatgtccaaagctgataggctgaaagggaggcctcttgtgccaaataattagccaaattgtgaatgcaaaggaaaagttcttgaagaaaattaaaagtgctactccactgaacacatgagtgataagaatgcgaaacagccttactgctgatagatagtagtctggatagaagatcaaaccagacacaaaattccttgagccaaagcctaatccaaagcaaggccacaattctcctcaattctgtgaaggctaggagaggtgaggaaactgcagaagaaaatttggaagctagcagaggtcggttcatgagatttaaggtaagaagctgtaggctgggtgcagtggctcacgcctgtactcccagcactttgggaggccgaggcgggcagatcaactgaggtcaggagtttgagaccagcccaaccaacatggagaaacatcgtctctactaaaaatacaaaattagctgggcgtggtggtgcatgcctgtaatcccagctacttgggaggctgaggcaggagaatcacttgaacctgggagggcgagtttgcggcgagtttgcggcgagccgagatggcgccattgcactccagcctgggcaacaagagcgaaactccgtctcaaaaaaagaaaaaaagttgtctctgtaatataaacgtgcgcagtgaagcagcaagtgcggatgtagaagctgcagcaagttatacagaagatttggctaagatcattgatgcaggtggctccactgaataacaaattttcaatgtagaggaaatagttctaggttggaagaggagccatctagaactttcttagctaaagagaagaagtcaatgcctagcttcaaatcttcaaaggacaggttgactctcttgttaggagctaacgcagctggtgacttggagttgaagccagtgtgcatttgccagtctgaaaatcccggagcccttatgaattatgctgaatctactctgcctatgctctataaatggaacaacaaagcctagatgacagtataactgtttatactagggtttactgaatatcttttttgtttgtttgtttgtttttttgaggcagggtctcactctgccacccatgctggaatgcggtgacgtaattatagcttacagtaacctcgaactcttgggctccagtgatcctcctgcctcagtctcctgaagagctggtattaccagcatatgccgccacagctggctaaggtttactgcataccttaagcccacttttgagacctacttctaagaaaaaaagattcctttcaaaatattaatgctcattgataatgcccctagtcacccacgagctctgatggagatgtacaaggaaatgaatgttgtttggatgtctgctaacataacatccattctgtaggccatagatcaaggaatgattttgactgtcaagtcattttatttacaaaatacattttgtgaggttacagatgccatagatagtgattttatgctggatctgggcaaagtaaaatggaagccttctggaaagaattaactcttctagatgtcattaagaacatttatggccgggcacggtggctcacgcctgtaatcccagcactttgggaggccaaggcaggcggatcatgaggtcaggagatcaagaccatcctggctaacatggtgaaaccccatctctactaaaaatacaaaaaaattagccgggcatggtggtgggcgcctgtagtcccagctactcaggaggctgaggcaggagaatggcgtgaacccaggaggcggagcttgcagtgagccgagaccacgccactgcactccagcctgggtgacagagtgagactccatctccaaaaaaaaaaaaaagaacatttatgattaatgggaagaggtcaccatatcaacattaacaggagttgggaagaaattaattccaaccctcatggatgactttgaggggttcaagacttcactcgtggaagtaactgcagatttggtggaaacagcaagagaactagaattggaagtgaagcctgaatatgtgactgaactgctgcaatctcatgatccaacttgaatagatggggagtttcttcttacggatgagcaaagagagagtgctttcttgagatggaagctcctcttggtgaagatgctgtgatcattgctgaaataacaacaaaagatttagaatattccataaactttgttgataaggcagtggcaagatttcagagaactaactttgaaggaagtcctgctgtggatgaaatggtatcacacagcatcacatgctacagagaaatctttcatgaaaggaagtgtccatcgatgcagcattgttgttttattttaggaaattgccacagccatcccaacgtttagcaaccaccaccctgatcaatcagcagcatggaggcaagaccctccaccagcaaaaagattatgatttgctgaagattcagatgaccatgttaaattaagtttagcataaagctgcctccttatgcattttaagttcagactaacaatttatttctttctctctctccctttctctcccttcctttcctttcccttcccttcccttcccctcccttcccctcccttccccttcccttccccttctcttcctttctttcttttctctctctctttctctctttctctttttttgagacggagtcttgctctgttgcccagcctggagtgcagtggcacgatctctactcactgcaacctctgcctcccagcagagagaatcaagagattctcctgcctctacctcctgagtagctgggattataggctcgcgccaccaagcccggctaattttttgtatttttagtagagacagggtttcatcatgttggtcaggctggtctcgaactcctgaccccaaatgatctgcccccgcccccccaccaaagtgctgggattatagatgtgagcctttgcacctggcctaacagtttctccatacatagtgaattgtagacaactacaattgtaaatgtgtaaagagactgtaaccttgtaacaagtagcgagtctcagtcaatcacagcagcggagttttggccaatcacaggtggccaactgtttaaacagtgctcaaaatagtcagaggttgagttgcaaccaatccagctgtttccatacttgactgcaatttctgtaagtcattttcctttttctgtccataaatgttatttgaacatatggcagcccgaatcactctgaacctattttggttccagggattactggattttggactcattctttggtcaattcaactctgtaaagtttaatttgtctaaagattttctgggccggatacagtggctcacgcctgtaatcccagcactttgggaggctgaggcgggaggatcgcttgagcccaggagttcgagaccagcctggccaacatagcgagatcccgtctctacccacaaataatttagccaggcgtggtggcgcgtgcctgtagtctcagctactggggttcttattcctcgtggcaacacattttggagagggggaggtattcctgtctttgctgggtgggagaacggccagtgggcaagggaggacgaaaatgagaactgtgactgccagagggcacgtcaattttaggaagagaacgtaagaaagttgggttctgtggagacttggcatatccacgccacctggaaaatcatcacgtgccctccggggcaagaccaaggcctcaagtcacccctcgcagcccagtggacctcccggccatccctttcacggctccacagcgaccgcgagccgttgccccggtgagaaccccccggcactgtgcgcgcccccgcctgccgtgcgcgtccgcttccctgggatccggcgccgcgcgcgcccccgccgcgtccccgccccttccggcccgggagatttgattcccttggcgggcggaagcggccacaacccggcgatcgaaaagattcttaggaacgccgtaccagccgcgtctctcaggacagcaggcccctgtccttctgtcgggcgccgctcagccgtgccctccgcccctcaggtcagttctcccgcctgcccgccgcagtcgcagttgatggctggggtctgggctgtgcggggcgcagcggcccaaacccagtttgctcctggctctcgggagactggaggatttcatcggagccccgcgctttaccagccctgttccctggataagatatttgacctttccgacccgcggttttcttctccgtaagtggggataatgaccgtgtctacttaacagggttattgaagaggtgttcaggctaagcgtttgccacctaggaggctgcgatagacgtgaattcccatttcccgtttccagtttccgtgactcttccccgcgaaaaaagttgacagaagggtttcgagttttttctgtttgtacaactcagtttactggggcagtgcaataaaaaaggagatgtgttatcactaccttttcagagtccaaatccatcctctcctatcatctccccagagtagtggcttcagaggctcacactaaaaggggaattttttttctttttcttcaagacggagtttcgctcttgttgcccaggctggagtgcaatggcgcgatctcggctcaccgcaacctccgcctcccaagttcaagcgattcttctgcctcagcctcccgagtagctgagcttacagacatccgccaccacgcccggctcattttttgtatttttagtagagacggggtttcaccacgttggccaggctggtctccagctcgtgtcctcaggtgatccgcccgccttggcctcccagagtgctgggattacaggcgtgagccaccacgcccggcctaaaaggggaattttcaccgaatgctgtatcagtaataggagcagcaggattgctcccaccaagaaacctggtgtagggttgtgggagctggaaagggtagactcagggaaggctgcccaagagaggaatcaggtccctagcacttaggacgggtaattacctttggtatttctcctttgttagtggaatgaggtgagtatcaggagcctggattgttgtttagaggccagtgttcctaactttggtttaaattttggtttctgtttcccatggagtctggctagaaaatcagaaaaatcagaaaagcccttactgggccttcgtgggcttgtttctcccaagggtctgtcctttctgtgtaactactgtggaccaactagatgggcagatcaatcccaatgagtgcctcattgttggtgctcccagaagcctttgcaagggagcagggcaggatgctaattaaatgtgttacaggccacattataaaccattctgagcccggcgtggtggctcacgcttgtaatcccagcacttggggaggccgaggtgggcggatcacttgaggccaggagttctagaccagcctggccaacatggcgaaaccccgtctctactaaaaatacaaaaaaaaaaaaaaaaaaaaaaattaaccgggcatggtggcgcatgcctgtaatcccagcaactggggaggctgaggcacgagcatctctggaacccaggaggcggaggttgcggtgagccgagatctagctactgcactccagcctaggtgacagaacgagaccctgtctcaagcaaataaacagacaaaacccaaaaaaccattctgtattctacttcctgtttgaaattatcctcagcatcagtgtctttccaagctctgtagataaggtaaatgtatttatgcggcaagtaatagaatagcccaaataatattgttaaaaaatgcccccaatttgttgctatcctttaaaatttaaccataaacgtcttctcattatcccaattccttgctcttctgagaagttaaagaccccaattataggccgggcgcggtggctcacgcctgtaatcccagcactttgggaggccgaggcagatggattgtgaggtcaggagttcaagaccagcctggccaagatggtgaaaccccatctttactaaaaatacaaaaaattagccgggcgtggtggcgcacacctgtaatcccagctacttgggaggctgaggcagaattgcttgaactcagagggcggaggttgcagtgagccgagattacgccactgcactccagcctgggcaagagagcaagactccgtctcaaaaacaaaaacaaaaacaaaacccaattatatatacccccaattcttctatttatttagtcaagcccagaagggcactcaggtgtctgattggggtctaatttccttcttcattattcacagttgagaggctgtcttccgcgttgactgataatatacctccttcagcagctacaaagttgggttactctgttctcaaggcttttctgtattctatattaacaaactctagaggataaacagggcacatgagaatatttagaaccagctccacattcacaaagatttacaaatcaagtataatctgctattagtgtaggagtttgtaatgtaagcaccagttttctcacattgcagcaacaacgatattcccttgattcagtagctataatctaggcccacattggtattactcatccaaagacatgatgtaatttgagagaagcgggtagatagagaaaatggaagaaagaaagaaaaaaaaaagtgcatggcttcagtcttaccttagttgttaaataaacaacttgcccatctctgctagttttccagaggccatgactgggatgtttataactcttttgggagaagtctattaagttaattatgacactcttaaatccctaatctgggaagtgaattccagcatcttacaaattgctttctctttctgagtgacaatttgaaatagcccagtcctttgcatggaatgtaaacatgtgcattcagatttatagtccagtgttcctccatttccattctcctgctctcttttttcttctgtatcaggattccaaagatttctgagccttaggttgacctctatacttttactgtttttattgccttttggaatttcttagtcctatggttcctgtttgtttttaggatgaggttccagtttatccccacatttgccccactgacaaatgccctttaaaatatttctgaattagtgttgctgtttaaagtatttaatcctgtgccttcaggtgcccagtgagaataaatttgtcctctgtgatatctccttgccttgagtaactttttctactccagtggaagcagaatgtttcattttctatcaacagttttccctcagtactgggacctgaccttgcttcttctaatgtttgcctactgtgttcatgcagatttcgttaggttaaatgttcaacctacttattaagttgggtccagtgtgatctcttcctaggaaatggcttaatattgtttattttatcagaatgtcgttttgcatgttatctttttgtgtgctatttctgctttgatgttgaagactgaaccttgttttttaaagctgatttaatttttttcttgagtgtcgatatttttccttctaaagcttctgctctagttttctattcattgaccaaattttttttgtttgtttttgagctggagtctcactcctgtcgtgcaggccagagtgcagtggcgtgatcgcgggtcactgcaacctccacctcctgggttcaagcgattctccttcctcagcctccctagcagctgggattacaggtgtgcatcaccacgcccggctaatttttgtatttttagtagagacggggtttctgcatgttggtcaggctggtctcgaactcctgacctcaggtgatccacctgccttggcctaccaaagtgctaggattacaggcgggagccattgtgcccagccgttttttacttgctgataataattttctttttctctccaagtaaaatgattcatggaatcagtgtttcaggcatagaaaaatgatatttttaaaatgtcctttgtggcttttggggttttgataagttcattcagaattttttccacctcaattttaagaagactactcatcattgtatgaagggccttctcttattaagctctgtcttcctttataagctcaccacacttctgaggttgaactcacactctaggtcttccaaattcatggccattattaaggcttagtaacatgctagtcactcagttctggataagggcagggtgaagaacagagaatttgaaggtagtttacgtggcacctgccactcatcagtttgaggcttaaacaggcttgcttggccagggcgatggctcacgcctgtaatcccagcactttgggaggccaaggagggtggatcacctgaggtcaggagtctgagaccagcctggccaacatggcgaaaccccatccctactaaaaatacaaaaattagccgggtatggtgttgttgttcgcctgtagtcccagctacttgggaggctgaggcaggaaaatagcttgaacctgggaggcgcaggttgcagtgagctgagatcgcactactgcactgcagcctgggcaccagagcaagactccatctcaaacaaacaaacaaactagccaggagtggtggcatgtgactcctggcctcaagtgatccacccacctcagcctgccaaagtgctgggattacaggcgtgagccactgcacctggcctcgactagattttaatttttaatttttatttatttttttgagacacagcttcgcttgttacccaggctggagtgcagtggcatgatctcggctcaccgcaacctctgcttcccgggttcaagtgattctcctgcctcagcctccctagtagctgggattacaggcatgggccaccacgcctggctaattttttatatttttagtagagacggggtttctccatgttggtcaggctggtcttgaactcccgacctcaggtgatccgcctgcctcagcctcccaaagtgccgggattacaagtgtgagccactgcgcctggctgttttttatttttagtagagacaaggtcttgctatattgtcctggcttgtcttgaactccaggcctcaagcaatcctcctgccttgacctcccaaattgctgggattacagacatgagccaccatgcccagctatctttacgcttcttccttttgccactcctagctgtaggtttggtatggggaagaccttagctatctatgttttcaacatttcaaatatttgtcttttgcttttaagtctttacaactgttactgattttgtatggtgtgagatagagatccaatgtgtttttttttttccttcacctcatggctaatcaattgtcccagctccagagctgcatttccatcacctgttacctctaaaagcagcctcagttcagtacctgtcaacttttacttcctctaggatctttgcacctaaattccctctttctggaatattctccgtctatttctttgtgggctatgactgttaaggcctacagaccaaagaccacatctgtagtaaaaatcattagatgtatttagtttgctgcgcaagagaaaccatactcttgagaattttgggtagtctcagagtgagttgaaaggggcagaatgagggaagaatgaggtgggcctgaggatgtcattgaagacaatgaagtcagtcaaataaaggatctttattttaacagccttgtatggaaacattgtttatatggttatgttcagattctattgaaaccattgttcaagttttgataggaatatcacagtctgattactggcagggctgattttctcaattctcatcctttgaattagagcttggcttaaatgttaccttctcagaaaccactgttgcttatttttatttcagtatttagtatagataataataatagtaattattattttttgagacagaatcttgctttgtctcccaggctggagtgcagtggcacgatcttggctcactgcaacctctgcctcctgggttcaagcaattctcctgcctcagcctcccgagtagctgggattgcaggcgcacaccacaaggcctggctaatttatttatatatttatttatttatttatttttgtgagatggaatttcgctcttgttgcccaggctggagtgcagtggcacgatctcggctcactgcaacctccgtctcctgggttcaagcagttctcctgcctcagcctcccgagtagctgggattagaggcatgtggcaccacacctggctaattttgtatttttagtagagacggggtttcaccatgttggtcaggctggtctcgaactcccgacctcaggtgatctgcccgtcttggcctcccaaagtgctgggattacaggcatgagccaccgcgcccagcctaatttttatattttttagtagagaccgggttttactatgttggccaggctggtcccgaactcctgacctcgtgatccgcccaccctggcctcccaaagtgctgggattataggcgtgagcctctgcacccggcctataaattataagtattaatttgttgtctacttatttgccttttgtcttctccactagaatatacactccatgagggcagaatcatatttcttctccattatagccctagtgccaagggcaggtttggcatatcataggtgctcagtaaatatctgtatgaataaatgaataagagcaaattcaagagttttctagaactgcattagcagtttttccagacacactgctgatctctaaaagtcaaccacgaggttattttccacaagtaagatggagatggtatgagtgtgactttgtatattaatgtgcataacagggccctacttagctctatggtttttaaaaaataaactacttaattttaaaactcagggagacaaaatcaataagatctacctaattttttttacaactaatttttatttattatttgatgtataattaacagtatatgtaacccacataagttgtgaagcataataataaaatacatatcatatacataataaaattgtgtatgactggggtcttagtttgggttttcctgatgactactgataattttttcatgtcttcttttttttttttttttttttttattttgagacagaatctcgctccgttgcccaggctggagtgcagtggcgtgatctcggctcactgcaacctctgcctcctgcctcagcctcccaagtaggtggaactacaggcgcgtgccaccacccctggctaattttttatagctttagcagagacagggttttatgatgttagccacaatggtctccatttcctgaccttgtgatccacccgcctcggcctcccaaagtgtgggggttacaggcgtgagccaccgcacccggcctttttttttgagacggagtttcactcttgttgcccgggctggagtgcaatggcacaatctcagcttactgcaacctccgcctcccaggttcaagtgattctcctgtctcaccctcccaagtagctgggattacaggctcctgccaccatgcctggctaatttgtgtatttttagtagagacgggtttcgtcatgttggtcaggctggtctcgaaccctgacctcaggtgatctaccctcctcagcctcccaaagtgctgggattacaggtgtgagccaccttgcccagcttcgtgtcttttttttttaaattattttttcttcaggtagcctcccgagccagagtaggctcagagacacccttttccatgtttttgttggccatttgtgtttctttgagaaatttttttttttttttttgagacaaagtctggctgtttcgcccaggctagagtgcaatggcacgatgtcggctcactgcaacctccacctcccgggttcaagcgattctcctgcatcagcctcccaagtagctgggattacaggtgaatgccaccccgcttggctaatgttttgtatctttagtagagatggggtttcaccatgttggccaggctggtctcgaactcatgatctcgtgatctgcctgccttggcctcccaaagtgctgggattacaggcgtaagccaccatgcccggctgagaaaagttttttgtatcatttgcttattttgctgttgagtttttcttattgttttgtcagagtttatgtgtttcctgtgtacatccactattatatttgttgcaagtatcttctcacatttatggttttctttttttgatggtgtctttggttgtatagaagtgcttagttttatttttattttttttatagatgtggtcttgctatgttgcccaggctggcctcgaactcctgggctcaagctgtcctcccaagtggctgacaacacacgcaccactgtgcccagctgaagttcttaattttaatgttgtttaatatattaatttttttcattattattattagtactttatttaagtgatcctctcctatcctgaaataatgacaatattctttaaaaagttttaaaggtttatgtttcatactttttaagtctatctggaattcatttttatgtatggtgtgagataagaatcctttttttcatatggccaataatcagttttttcagtatcatgtaaatgcataagacttatttagatttgcagttacaagaatggaggagatgatccggtattatttcctttattgattatgtactctctgtcttctaggttctttttctaattccaaataaacttgcaagaggactatgaaagattatgatgaacttctcaaatattatgaattacatgaaactattgggacaggtaattgttatttttttttggaggcagtggatagatcaactatttgagagtatagattatttgggtaggtgtgagctttttcgtctaacccacacagttttaaaattcttctacctacttcagtaagaaaaagtggagcaagcagagaggagaatagtaggagaagccctgtaggttattgcaaggactttgacttttattctaaataatttattctaaatatttcttttatttctttttttttttgagacggagtctcactctgtcgcccaggctggatggagtgcagtggcgcgatcttggctcactgcaagctctgcctcccgggttcacgccattctcctgcctcagcctcccaagtagctgggactacaggcgctcgccatgcctggctaattttttgtatttttagtagagacggggtttcaccgtgttaatcaggatggtctcgatctcctgacctcgtgatccacccgcctcggcctcccaaagtgctgggattacaggcatgagccaccgcgcccaggcttcttttatttcttgacttttattctaaattaaagtcattggagagttttgagttaaggggtaatttgacctttgtttttacagagttgctgtggctgcttggtagataaaaggttggatgaaggagggcaagagcagaggcagggagatgttagcagactattgcgataattcaggtgttgatgctagagatgatggtggtgtggatgagggtgatgtaaaagcagtgaaaggggtgggacattttacacacacatatgtacacacctatgtgtgtatgtttttattaaggtataacatatagtaaaatatgcaaagtgcaataatctcagtggagttttacacatatatatgtatacacatacccatatattccctgtgcggatcaagacatagaccgtttccagggagtatctgcctgctttcccccaaggtagccattgatatattttgaggacagagctaatgggatttattgatgggttggagtgctagagaaagagaagggctaaggatggttccagggtttttggcctgagcaccagggaaaatggagttgccctttgttgaaaggaagaagaccatgggagagactactaggaagttctttttggaaatgttaatttggggatttcttttagctgcctgagtggagacatttgtccagcttttggttcagttttgaaaaataattgcttatcttcaaagtttttttttttttttggagatggagtcttgctctgtcgcccaggctggagtgcagtggtgcgatctcgggtcactgcaagctccacctcctgggttcatgccattctcctgcctcagcctcccgagtagctgggactacaggtgcccgccaccatgccaggctaattttttgcatttttagtagagacggagtttcactgtgttagccaggatggtctcgatctcctgaccttgtgatccgcccgcctcggtctcccaaagtgctgggattacaggcgtgagccaccgcgcccggcctcaaatatttaaaactgagtggaagtttcatataatttgtctttggcctcagcaactttatattgtgttctagcagtgttaattataaaggaaatttaattgcaggattattcataaagcagatttctaaagtgagttctgttttttttttattacaaagtttgagatacactatcatggttaaaaaaaaaaaaaccttcagctagacattggataacaagcagcaacaggaaaaaaaagccacaaacttctaggaaaatttggcttgatagagtcttttaaaattattatatataaaaaggtgtttgtgcctgagtccttgcttatgctttcataatacattttcctacttaggtggctttgcaaaggtcaaacttgcctgccatatccttactggagagatggtagctataaaaatcatggataaaaacacactaggggtaagtttagatttatttaaaaaatagtccacttatagatcagtttcgtgaattaaaacctgaattgttctaatgttctagttactgctcttagaataatatttttataccttttaaaaaacgtatagatctgtggttttaaaaagtaatctgggggaagggattactttgttcttcagattttaacgcagtgcagtgggacatatttgaagtctgtagcatccatctgcagtctgtagtctgtaggtgtttctggatattaatgtgtcccatctttcttttcttttctttattattttttatttttttttgagacggagtctcgctctgtcgcccaggctggagtacagtggcgcgatctcggctcactgcaagctccgcctcccgggttcacgccattctcctgcctcagcctcccgagttgctgggactacaggcgcccgccactacgcccggctaattttttgtatttttagtagagacggggtttcatcgtgttagccaggatggtctcaatctcctgaccccgtgatctgcccgcctcggcctcccaaagtgctgggattacagtcgtgagccaccgcgcccggcctcttttcttttctttacttttttttttttttgagacggagttttgctctgtcgcacaggctggagtgcagtggcgcgatcttggctcacggcgacctccgcctcccaggttcacgccattctcctgcctcagcctcctgagtagctgggactacaggtgcccgccaccatgcctggctaatttttttgtattttttttttttttttttttagtagggatgggatttcactatgttagccaggatggtctcgatctccagacctcgtgaaccgcgtgcctcgacctcccaaagtgctgggattacaggcgtgaggcaccgcgcccggccccatctttattttcttatgatactcttactaaatataaatcattttggtactatagataggcaaatagataaatattatgtcctagcttttttttttttttttttgagacagtctcactttgttgcccaggctggagtgcagttgcacaatcacagctcactgcagcctgtacctgctgggcttaagtgatcctcccacctcagcctcctgagtgggtgtgaccagaggcacatgccactatgcttgcctaatttttaaacatttttctagaaacaaggtcttactctgttgcccagggtggtctcaaactcctggcctcaagcagtcttcccatctcagcttcccaaagtacagggtatgtaggggtgagccactgtacttggcctgtcccagcattttattcaaaatggctttagaagttatctaattaaatccttttccaaatcagcctctttttcctctatgtgaattcttccagggggaacagcttgttatctcctaaagcagcccattcagtttgtggtcttggctacaatgtataaaaagttatttttatgttgagataaagcctgtctcttttggtggtttttctggggcttctgtacccattccagtgtttgaagtcaccttgagtcatcttttttttctaattccttctaccattctttgtttttttttttttttttttttttgagatggagtcttgctctgtcaccaggctggaatgcagtggtgcgatctcggctcactgcgacctctgcctcctgggttcaaatgattctcctgcctcagccacctgagtagctggtactacaggcgtgtgccaccatgtccagctaatttttgtattttcagtagagacaggatttcatcatgttggtcaggctggtctcgaactcctgacctcaagtgatgcacccacctcggcctcctaaagtgctgggattacaggtgtgagctaccactcccagcctaacattttgtaattgtccttaattatcaaacataaaaaataatttttggttgggtgtggtggctcatccctgtaattccagcactttgggaagctgaggccagaggattgcttgaggccaggagttcgagactagcctgggcaatatggcaagtcttgtccctacaaaaaataaaaaaaatttagccaggtgtggttgtgcatgcctgtagtcccagctacttgggaggtggtggtgggagggtcccttgagcctaggaggttgaggctacagtgagctgtgattgcaccactgcactctagcctgggcaacagagcaagatcttgtctaaaaaaagtttttttttgatgtttttattgttggaatgagatagggcttaatattaattgttacctacttttttaattgttaaagatataagttctgattaacacataaataagtcaaagggagccaggcactgtggctcacacctgtaatcccagaactttgggagaacaaggtgggtggattgcctgagctcaggagtttgagaccagcctgggcaacaaggtgaaagcccttctctacgaaaaatacaaaaaatttcgctggacatggtggtacacacctgtagtcccagctacttgcggggctgaggtgggaagatcacttgagtctgggaggttgggctgcagtgagccgagatggtgccgctgcactccagactggatgacagaacaagaccctgtctccagaaaaaaaaaaaaaaagtcaaagagtatgtaagtagttttgttacagcaatgtcattaaatcatttgaatttcttcctaaatatatgctaaaatcatacaatgaccagtataagaaattatttttaattatctgtcagtggacaattcaggctttcctccagtttttttgttttattcaattttttgttttctatttattaatctaagaaaaaagcattaaaaccatttttcttgagcatttaaacatgagtatcaattagattaattcccttaagcagtttaaatttcagttataactttagtatgacttactttaacacttcaaatacttaaatagcaaacaaaatgttattacaaaatgtgttatcacactgatgctcaaaacttattctaaagcgtaatatgacattaattcatgatttctaaacttgtttttatattttctgttgttattatgctcattttagttattttctaggattttaataatattttgattacttccatggttttatttatttatttatttatttttgagatggagtcttgctctgtcacccaggctggagtgcagtggcacgatctcggctcactgcaagctctgcctcccaggttcacgccattctcctgcctcagcctccagagtagctgggaccaccacgcccagctaatttttttgtatttttagtagagacgggttttcaccgtgttagccaggatggtctcgatctcctgacctcttggtccgtctgcctcagcctctcaaagtgctgggattacaggtgtgagccaccacgcctggccgattacttccatggttttagtcatcaggcttcctccccacaaagaaagaagattatcataccaagatagtgaaagttacagttgattctttgtcaagacatgatatctagttgcatagtcctggataactgggtcctgagacactggccattaagacggagtccctttttattttatttgtttttcaagatggagtcttgctttgtcacccaggctggagtgcaggggtgtgatctcagctcactgcaacctctgcctcctgggttcgagcaattctcctgcctcagcctcccatgtagttgggattacaggtgcctgccaccatgcctggctaatttttgtatttttagtagagacgggattttaccattttggccaggcttgtcttgaactcctgacctcgtgatccgcctgcctcggcctcccaaagtgctgggattacaggcatgagccactgtagagcccccccgcctttttttttctgatacggagtttcgctcttgttgcccaggctggagtgcaatggcaacctccgcctcctgggttcaagcgattctcctgcctcagcctcctgagtagctgggattacaggcatgtgccaccacgcccagctaattttgtattttttttttttttaattttttcgatacagagtctcgctgtgtccccaggctggagtgcagtggcacgatctcggccactcccaggttcaagtgattctccttgcttcagcctttcaagtagctgggattacaggcacccgccaccatgcctggctaattttttcgtgtgtgtttttattagagatgggttttcaccatgttggccaggctgatcttgaactcctgacctcgcgatctgcccgcctcagcctctcaaaagtgctgcaattacaggtgtgagccaccacacccaatcagagtccttttttttttgagatggagttttgctcttgtttcccaggctggatcgatctcggctcaccgcaacttccacctccagggttcaagcaattctcctgcctcagcctccagagtagctgggattacagacatgcgccaccatgcccggctaattttgtatttttaattttgtgtttttagtagagacgggctttctccatgttggccaggatggtcctgaactcctgacctcagttgatctgcccaccttggcctcccaaagtgctgggattacaggcatgagccaccgcgcctggcccagagtccctcccttttttttttttttgagacggagtttcgctcttgttgcccaggctggagtgcagtggcatgatctcggctcaccgcaacctccacctcctgggttcaagcaattctcctgcctcagcctcccgagtagctgggattacagccatgcggcaccatgcctggctaattttatatttttagtagagatggggtttctccatgttggtcaggctggtctcaaagtcccaacctcaggtagtccgcccaccttagcctcccaaagtgctgggattatacgcgtgatccactgcgccctgcctcagggtccctttttataatgaagttttacttgttacttgatgatatctctaggcttctgtcctttaaagttttttcagcttggcttatcttcctctccccacccaactttttattttgaaagtttcaagacctcagaaaagattggagactgagacagtgaatacccatatacctttcacctaagttcactggttttttgctcagcatgcttcttaaacggtgttgctgaggctgaaagtggtagctcaggcatgatgactgagtagtgtttctgtcattttccttgtttggaatgctaaccttctaaggagtctgagattgttttctggatgttgtactgttgacccacattgaacctgtctttcataaaatctccaatgccctttttatgcacatgcaaataaattttgctatatttttctgtagtgttgaacagtttttggggggctttttgatagcttttgctacttagtattttttttttttgaaacagagtcttgctctgttgcccaggcgggagtgcagtggcgcaatctcggctcactccaagctccgcctcccggattcacgccattctcctgcctcagcctgctgagtagctgggactacaggctcctgccaccacgcccggctaatttttttgtagttttagtgagacagggtttcatcgtgttagccaggatggtctcgatttcctgacctcatgatccgcccgcctcggcctcccaaagtgcgggattacaggtgtgagccaccgtgcccggccagctacttagtattaaagctgttagtattggagcttggaacaccacctgaataagtttattgctcattccatatgatgttttgtcacagagtgatttgccccggatcaaaacggagattgaggccttgaagaacctgagacatcagcatatatgtcaactctaccatgtgctagagacagccaacaaaatattcatggttcttgaggttagtagtatgttccagatacctgaaaacatttgatcactttatcaatagtaaaagagaaaagtacatttcacctgaaagattagaagagatgttaagcgacttacctgttttgttccatttgtaacaatttagattaaatagatgtatataataagttggagattcaatgtaaatgtcatttttctaatacacccctaatggggtagtatggtttactagatagaatatgttagaattttctcctagagggaaggactcattctagtttttttttttttttttttgagacggaatttcgctctgtcgctcaggctgaagtgcagtgatgccatctctgctcactgcaccctccacctcccgagttcacgccattctcctgcctcagcctcctgagtagctgggactacaggcgcccaccaccatgcccggctaattttttatatttttagtagagacggggtttcacgtgttagccaggatggtctcaatctcctgaccttgtgatctgccctcctcggcctcccagagtgctgggattacagacgtgagccaccgtgcccagcctcattctagttttatatggtatattaatttcctagggctgttggaacaaattactacagacttggtggcttaaagcaacagaaactcattgtctgacagttctggaggtttgaagtctgaaatcaaaatgttggcaaggctggttccttctggaggttctgagagggaatctgtttcctgcctctttgctagttgttggtagttgctggcagtccttggcactccttggtttatagatgcaccactcccatcttggcctccgtcttcaaatggtgttttcctctctgtgtagctgtgtctctgtccaaatgtctctcttcttaaaaggacccaaggtttaggcttaccctgatccagtgacagttcaacccccagcactgggtagcttccagtgtcttttatgtaaaccaagcaatttcaagttttaacttgccatttttgtcttgaaagatgtctttagaacttgtattattcaacttctttagttttcgttagtctcagccaaataatatgtaatttgcacatgattttcacaggatagcactgttttaaaagcatattttaaaaatcataattttggccgggtcctctcatgcctataatcccagcactttgggaggctgaggcgggaggatcatttgaaaccagtggtttaaaaccagcctcagtaacatagcaagaccctgtctctacatacaaaagaaaaaagaaaaaaaaaagccgggtgtgatggcgcgtggtgcgcacctgtcattccagctcctcaggaggctgaggcgggagaattgcttgagtccaggagtttgaagctgcagtgagccacgttaatggcactgtactccagcctgggtgacagaacaaacccctgtctctaaaaaataaaaacaaaaaaattataacgttgaatgttttggatctagagctattgtatagtagtacattgtattactacactgtagatctacctacatggtccacattttaaaacctctttgattttaaaacctctttggtaattttaaaacctctttatatttttaggtgatccctttgttcaaataaaattcttagggccaggcgcagggggtcacgcttgtaactgcagcactttgggaggccaaggctggtggattatttgaggccaggagttcaagactagcctgggcaacatgggaaaaccgcatttctacaaaaaatacaaaaacttagccagttgtggtggtgcatgcctatagtcccagctacctgggaggctgaggtaggaggatcacttgagcctgggaggcagagcttgcagtgagctgagatcatgccactgcactccagcctgggtgacagagcgagactctgtctcaaaaaagaaaaagaattgttaaaatctcccaagcatccatgaacctaggagaaaatttaaaaggtacaagagagtggccgggtgcagtgtctcgtgcctgtaatcccagcactttgggaggccaaggtgggaagatcacttgagctaaggagttcgggactagcttgagcaacatagtgagaccttgtttttacttaaataaaaaaagaaaaaaaggctgggtatggtggtgcacacctgtagtcccagctacttgggaggctcaggtgaggagcctgggagatataggctacagtgagctatgattgcaccactgcactccagccttggcaacagagtgagaccctgtctcaaaaaaaaaaggtacagggagtatatattaaaaaacaaaatcctctctttcccctacatcccagtcatccaatattctttaatttttaaattttattatattgttaatagaaatgggggtcttggcctgttgcccaagctggtcttggactcctggccttaagcgatcttccctccttggcctcccaaaatgttgggattacaggcgtgagcaactatgccccaccctagtcatcacatttcttttcttttttttttttttttttttgagacggagtctcacactgtcttgagtgctggagtgcaatggcgtaaccttggctcactacaacctccgcctcccgggttcaagtgattttcctgccccagcctcctgagtagctgggattgtaggcacgtgccatcacccccggttaatttttgtattttttagtagagacggagttttaccatgttggccaggctggtctcaaacttctgacctcaggcaatttgcccacttcagcctcccaaagtgctcgggattacaggagtgagccaccgcgcccggccctcaaattttcttttctctgagccattcatgtacttttcttgtgtctcttgtagatacctacatatattttatacgtatgtgtattttatatgtgtgtgtgtgtagcttacacacacatggtgtgacacaaatggtcacaaattattactttgcaccttgtttttttcccaggtaacaattgatcttagagaccatctgagcacattcagatattttagacatttttatttctctttattttgtatttctttatttgaaaatatgaagtaggctgttttctttttgtaaaacttactgtataacattaaaacatttcctattgaggtataaatttacatataataaaatgtacacattaggtatgcagtttgacaaatgtatatacccatgtacctcccaccccaaagtataaaacatctctatcacctcagaaagttttctccagcccttttgaagttttccctgtaaccatagccaccctgcccttaccagcaactgctcatctgatttctatcacagcagatcagtttaatctattctagactatgatgtaaatgactcatacagtattcttttgcttattcttttgttaggcttcttttgctcagcataatacttttgtaagccactatatcaatctatagtcttaataacttagtactggacattgtttcatatcagtttgtaaagagcttcctcttttttttttttttttttaattattgcctagaattccattccgtgtcatagtttatatagtatcagcatttaggtctgaatgctgttattccccacaaattcgtatgttgaaacttaatccccagtgtgatagtattaagaggtggggccctttaaggaggtgattaggttatgagggcagagcccttatgaatgggattagtgcctttatacaggaggctttagggagcctgtttgctcccttccaccatatgagaatacatagcacatgccaactgtgagcaacagaacctcactagacactgaatctagtggcaccttgatgttagacttcccggcctccagaaatgtgagcaatacatttctgttgtttataaattacccagcgtaaggtattttgttatagcagcccaaatggactaagacagttgtttctagtcttttgcttttacaaacactgctgctgcagtaaatgatctttaaggtacgttttttgttgttgttgttgttgttgctgttgttgtttgttttttgagacgaagtctcactttgtcacccaggctggagtgcagtggtgcaatcttggctcactgcaacctctgcctcccgggttcaagcgattctcctgcctcagtctcctgagtagctgggattacaggcgcccgccaccacgcctggctaattttttgtatttttagtagagacgggttggccaggctggtctcgaactcctgatccacccacctcggcctcccaaagtgctgggattacaggcctgagccacggcgcctggccaaagtactgttttttgatatgagtgagtacatctataagagcagtaactaaatgtggaactgtgaggtcaagtctatatgcatttgtaattttaattgatattgctaaaatggaaacccagctcacagaaaagtggagaaagttttctgtgccctgggaaagggatggaaagccttgagctttgtgctctggtacctgttctgcagcctctgagatacctctgtagacctgggctccttctggtacagattgaaaaccactggtctttgggatagagaaacaataattactgctggctttttaaatttcaggtaattacactgaatgagagtacattaagatgagaatggcttttaatactttgctataaaaatataaaaccctgggtgagctttttaaaatcacagtggtagttggttttacttctacttactggtaataaaactgttcgaagaaagagttattgttctcattcctggagtcattattgacttgtttgatcctgagagtgtacttttgaatataccttactcggttccattccctataaagtcgaattaataatatctctgagttaagtgtacttttttattttaaatttctgtgaagtgattttttaagttgtaacaatatctgtgattccattgctgttgaagtactgccctggaggagagctgtttgactatataatttcccaggatcgcctgtcagaagaggagacccgggttgtcttccgtcagatagtatctgctgttgcttatgtgcacagccagggctatgctcacagggacctcaagccagtaagtgactgcatcacagttagatgctcaccttcagcgtcatttacctgttatttttaggtttacaaatgatctgattaggaatctatctttggtttgctttttgttgttgttgctccagtcatacctatcagatttcttttttcctcttactttttttttttttttttttggaggtggtgtctcactctgtcacccaggctatagtgcagtggtgtgatctcggctcactgcgacctccgcctcccggattcaagcagttcccctgcctcagccttctgagtagctgagattacaggcacagggcaccatgtccggctaatttttttatttttagtagagatggggtttcaccatgttggtcagtctggtcatttttttggagacggagtctcactccgtcgcccaggctggagtgcagtggcgcgatctcggctcactgcaagctccgcctcctgggttcacgccattctcctgcctcagcctcccgagtggctgggactacaggcgcctgccacaacacccggctaattttttgtattttttagtagaaacagggtttcactgtgttagccaggatggtctcaatctcctgaccttgtgatctgcccacctcggcctcccaaattgctgggattacaggtgtgatccaccgcgcccggccaggccagtctggtcttgaactcctgacctcaagctattctttcgccctggcctcccaaagtgctgggattacaggtatgagccaccgctcctggccttggtaggctttttggatgcatttatgagcattctgtgtatctgtcaattgtgtgtgactttataaatgtcttgtttttttttttttttttttaagcaagatctcactctgtcacccaggctggagtgcagtggcatgatcagggctcactgtagcctcaacctcctaggctcaagtgattttcccacctcagcctcccaagtagctgggactacaggcgtatgccaccatgcctggctaattttctgtatttttattttatatatgtatgtatgtatttatttatttttatttttatttttgagactgagccttgctctgttatccaggctgaagtgcagtggcgcaatcttggctcactgcaacctctgcctctcaggttaaggtgatcctcttgccttagcctcctgagtagctggaattacaggtgcctgccaccactctcggctaatttttgtatttttagtaggcctggggttttgccatgttggccaggctggtttcaaactcctgacttcaagtgatgcgcctgccttggccttccaaagtgctgggattacaggcgtgagccagggtacctggccggaaactatctttttccatctgtttatactgaactcgtcgatttcaactcactcttttggtttaaatttgcttttggcacaaattgtgtttgcttgtagttgactctcagaacaccaaggagaaaataggagaaaatggtttatgctagtgagtcttatggggaagtgatagagtgatcgcccaggctggagtgcagtggtgcgatctccgctcactgcaagttctgcctcccgtgttcacgccattctcctgcctcagcctcctgagtagctgggactacaggcgcctgccaccacgcccggctaattttttttgtatttttagtagagacggggtttcaccgtgttagccaggatggtcttgatctcctgacctcgtgatccacccgcctaggcctcccaaagtgctgggattacaggcgtgagccactgcgcccggccctttttgttttttttgttttttttgttttttttgtttttttttttttgagatggagtttcgctcttgttgcccaggctggagtgcaatggcactgtctcggctcaccccaacccccgcctcccgggctcaagcagttcttttgcctcaacctcccaagtagctgggattacaggtatgcgccaccatgctcagctaattttgtatttttagtagagacggggtttctccatgttggtcaggctggtctcgaactcctgacctcaggtgatgtgcctgcctcagcctcccaaagtgctgggattacaggcgtgagccattgtgcccagcccttcttttcccttatatacttcttgtcatttcgttagtttctagtcattttcagtttgttgtacccggactttttaacagaaacaaccttaaatcatttttactcattttaattaatttatttatttttaaaaagtgagaccaggtctttctgtgttgcccaggctggtcttgaacacctgggctcaaataatcctctctcatctgccttcagagtgctgggattacaggcatgagctgccacacctggccttaagtcatttttagaaatggctagaggtgggatgtgatataaggaagtcagtatacagttatcaaaatatctttgttttcccaggaaaatttgctgtttgatgaatatcataaattaaagctgattgactttggtctctgtgcaaaacccaaggtaagtgcagaaataagatgcatctatgttctttgtaaatgcatttatttcttagtgtgtgattttgtcctgacttccacttattctttattgagcttggttgcatccattgagaagaatgttaaatttcatcccaggtatgggtagtttttgtaagttctctagatgatcataacatgcaatcaagattgagagtcactgccctagttctaggattggtcctgctgaagactccatgggtatgctgtgagaatttgcagtgcagaggtgacttgaggctattacagcaagaatgctgacttgaccagtgcttgcagtttgagtatattgccactagatgatgcctttgtttgtttagataaaagttgagaatttagtgcaaatctgttatccaaatggttctataactaacaattagttacattttgagaaacaatccgctttccttttaaaagaaggaaaaagcccatatgcacttctaaatttataactgttatatatttccttaatttgcattccatggttatgtattggtgttctccagcataacttctctttgaggtgactttgaactttctggctctgctgtctgcagcagatctcctgtgtggctgcctgttggaagcttcctctggagttctctaatcatggtactcacaatctctaaaatgagctgtctacactcattaagaatgttgaaattgcagacttgtctcgggctttggtaatcccataactgtttcctgccctgatcagaattagctaggtgcaaagggaagcagattttgcccctttggcagaaagtctgattctttctgattcttctctccttcccttggctctttagaaactataagtggaaccttttttctgggaaccaaatgctagaaggcaggtttttttttttttttttgattgacaaacatataaagaaaaaacatactttgaacagataaactggtttaagttgttctccatgggaggcagtggagaaggtttgtgacagaccctgtgagccttcatttatggctgccacggattacacacatagacaccatctaaggaaagtggggttgcctgggagaggattgcctcagccttcttccaaggagcacactcctgggcatgttgtttcagttgtaaatgacatctcacaattcacaaatcctttgccagctgtaagaactctatacagctgttggactgtagctttattttcattatgtcttggtatttctgtgggagggcagaggaggatgagcagattactcattttaacagaactggaagctaagggagtgatttataactgcatctagaaaacagactttcaaggcactgttctatgtaacatattgcttttttccctctaagaaaatagagctcttctgtatttgtgaagatttcatactggagataaggtccagtaaataaatttttccccccgggatacttggggatggaaagacgtggatgcttggatatatgctgggcttatttatgtatgtgggtatttagggaagtatgaacctgatttgactgagctaaggggaaaggatttgttcatgccaggttgtagtggtgttgggaatccagagaagcagagaccacacgtgcatgcacacatgtatacagagtattgtgttggctgcagaaatcctttattatgtggggtggtttttcatctagcttctctttgcttgtgctcaaataatttttatcggccaggcgtggtggctcattgcctgtaatcccggcactttgggaggccgaggcgggtggatcacctgaagtctggagttcaagactagcccagccaacatggcaaaaccccgtctataccaaaaatacaaaaattagttgggcatggtggcacgctgcgtgcctgtaatcccagctactctggaggctgaggcaggagaatcacttgaacccaggaggcagaggttgcagtgagccgagattgcgccattgcactccagcctgggtgacagagtgagactccgtctcaaaaaaaaaaaaaaaaaaaaaaaagaatgtttatcaaggtttaattctcttaagcgttgtaattaataagtttcatttttatcttattggcagggtaacaaggattaccatctacagacatgctgtgggagtctggcttatgcagcacctgagttaatacaaggcaaatcatatcttggatcagaggtaattattcattgattaattcattatataatcagcagacatttatattggtcacctgtagtgagtcaggcactgtgcgttgggggtataatgatgaagtaagaaataatcttgttaatcagagttcagtctatttggagagtgagacatgattacttataaatgaaattaataacttgcaataaatatagtaacatatacttatgaagcagggatatttctggtgtccttgttgtggctgcttttgtattaaatagtgccatagtttggactggttagtctagctggatagaacaaaagacgaaggttccaggctcagtttcagagatgctggttagcacagagaaaacctgtgcttcgtccatccagagctgactctccaaggccagcagccctgtgtaggagtccaggctgagaaggagtgggatttgcctgatttatatttgctgtatctcaaattatcaaattagctcctctcattctctggagtactagttttgctgatgtgagtgtcataagattaaaaaaacactttagttgtgaaaagctcaggaagtgctcaaacaggtttcctatttcaggacatgtccaaatctttttttgttttgttttgttttttttttttgagacggagtctcactctgtcacccaggctggagtgcagtggcgcgatcttggctcactgcaacctccacctcctgggttcaagcgattctccttcagcctcccaagtagctgggattacaggcaactgccatcacgtttggctaatttttgtgtttttagtagagacgggtttcaccatgttggccaggctggtttcaaactcctgacctcaaatgattcacccacctcagcctcccaattataggcatgagccactgcgcccagcctccaaatctttcttttcttttggagatggagtctcactctgttgcccaggctggagtgcagtggcacaatctccgctcactacaagctctgcctcctgggttcacgccattctcctgcctcagcctcccgagtagctgggactacacgcgtccgccaccacgcctggctacttttttttgtatttttagtagagatggggtttcaccatgttagccaggatggtctcgatctgctgacctcgtgatccgcctgcctcggcctcccaaagtgctgggattacaggagtgagccaccgtgcccggctctggcctccaaatctttaatgtgctcttgtacagtgtgatccttcaggaaaggaacatcacagataacagctggttctgattttatttgcctatgggatccacttttgatggagagcatcttttggaactagcataaggaactttgggaataccaggttacttcataaaatgagaagatgggaactgtttccggtgactttttattttgatataatctctaacttacaagatagtgcaagaatagaatgaggaactttggtatatcttttactcaaattcacagttatttacatttttccttatttgctttatcattctctatgtttatatatatgcatgtttttttttgaatcatttgagagttagctagaaatatcatatccttttattactcaatatttctatatatatttttcctaaaagcaaagaccttttcttttataaccacactttagtatcaaaatttaacattgatacaatttatttaattcataattcatattcaaatggtattaattgtaccaataatgtcctttatagttttattttccccccagtctaggatatggtgcaggatgcatttagttattgcatttagttattgtgtctctttagtcccttttaatctggaagacttccttaggctttctttattttttttgatctcagcatttttgaagaagccagttatttagtagaatgtacatcaatttgaatttatttaatgtttctttatgattagattcaggttatgtatttttggcagaaataccacaaaaatgatgttgtagccttcttagtgcattataggaaagggaccaaatgttttctgaacgtttatcatagtcctggaatcatgctggatactttttatttttaattgtggtaaaatacacataacataaaatttaccatcttaactgttttaaaatgtatagtttagtagtactgaaatacaatcacattgttgtgcaaccgacctccagggctcttttaattttgcaaaactgaaactttatacctgttaaacaattcttcatttctgcctaccctattcccctggcaactacccttctgccttctgtctctatgaatttgactaatctaggaacttcatgtaaatggaatcatacaatatttgtctttttgtgactggttatttcacttagcataatgtcctcaaggttcatgcatgttgtagcatgtatcagaatttcctttctttataaggctgaataatattccattgtatgtatataccacattttgtttattcattcatccattggtagatacttaaattgcttccaccttttggcacctgtgaataatgttgataggaatatgagtgtacaagtatctctttcagatcctgctttcaattcttttgggtatatattcagaagcggagttgctggatcatattgtaattctatttttaatattttgtggaatctccatactgttttccatagtgagtgcaccatcttacattttcaccaacagtgtacaggagtttcacatgggctgggcgcggtggctcatgcctgtaatcccagcactttgggagactgaggtgggcggatcatgaggttaggagtttgagaccagcctggccaacatgatgaatccctgtctctattaaaaatataaaaattagctaggcatggtgatgcgcacctgtaatcccagctacttgggggttgaggcaggagaatcgcttgaacctgggaggcagaggttgtagtgagccgagattgtatcattgcactccagcctgggtgacagagcaagactgtctcaaaaaaaaaaaaaaaaaaaaagagtttcacatgctggatacctttaataattttcaattaagctctacagactttttttttttttttttgagatggagttttgctcttgttgaccaggctggagtgcaatggcatgatcttggctcaccgcaacctcagcctcctgggttcaagcgattctcctgcctcagcctccagagtagctgggattacaggcatgtgccaccatgcttggctaattttgtatttttagtagagacaggatttctccatgttggtcaggctggtctctaactcccgaccccaggtgatccgtctgccttggcctaccaaagtgttgggattacaggcatgagccaccacgcctggccacagacatcctttttagtgaatactgttaccctatcccataagataaagaagatgaagaaactgaggctcagaaatttggtgcctttgcagggtcacacagctggtgactgagtgagatttgagtggagtgaggtactgtttccactattccatttagtttcccagaaggagtgataatcgtatgcctgatctcacaagattcctagaggtgatgagaatctgctgatttgagtgtatctgggtttttcctatgtaattttaaattgttttcttgtccgtgttagttcaacttcctgtccttctcagagtgtctaaaggatagtggactgaggagtcatttgagatacttactaaatgatgcagagctcagggtggtaactccctcagagattttggtttcgttttctgagatggggctttaagaatcttcatttaaaatactaataaaatagttgattctgatgttcacagtcctgatcatgctttaaggacatgttccattgtaaatatctctaatttcttcagtaatttttcatgggaaatggtttcagttctctcttcctcccaattattttatcttttttttttttgagacagggtgtcactctgtctcccaggctgaagtgcagtggcatgactatggctcacggtagcctttacctcctagactcaagcagtcctcccacctcagcctcccaagtagctgggactacaggtgtgcactaccacacctggctaatttttaaaatttctttgtagagatagggtcttgctatgtttctggggctggtcttgaactcctgggcctaagtgatcctcccgccttggcctcccaaagtgctgggagccagttattttttcatgtcaactggtagtttatggatttacttgcatttgctttggtttttttatgattttagttaatttattctcatattcaattcaaaacagcgaagtaaaggtactttcagttaactgaaaaatgctttttctgctttcttttttctaataagtgttggtagcactatggggatgttattatcattttatccctctttaagtttaaccctagacataatctttctgttgacttcttgtgtgtttttttgtttgtttgtttgttttttgagacggagtttcgctcttgttgcccaggctggagtgcaatggtgtgatcttggctcactgcaacctctgcctcccgagttcaagcgattctcctgcctcagcctcccgaattgctggaattacaggcatgtaccaccctgcctggcaaattttgtatttttagtagagacggggtttctccatgttggtcaggctggtcttgaactcccaacctcaggtgatctgcccacctcggcttcccaaagtgttaggattatgggtgtaagccaccgcgcccgggctttttttttttttttttttttttttttgagacaaagtctcgctcttgtcccccaggctggagtgcgatggtgcaatctcggctcactgcaacctctgcctcccgggttcaggcgattctcattgggttcaggcgattctcattcctcagccttccaagtagcttggattacaggcacatgccaccatgccctgctaatttttatatttttagtagagacagggtttgactcaaccctggtgggattgagtgggagtggaaggactgcttgagtccaacaggaccatattggccaggctggtctcgaactcctgacctcagctgatccgcccaccttggcctcccaaagtgctgggattacaggcgtgagccaccatgcctgacccttttttttgagacagggtctcactctgtcactcaggctggagtgcaatggcgtgatcttggctcactgcaacctccacctcccgagttcaagcgattctcctgcctcagcctcccgaattgctggaattataggcatgtaccacgccgcctggcaaattttgtatttttagtagagacggggtttctccatgttggtcaggctggtcttgaactcccaacctcaggtgatctgcccgccttggcttcctaaagtgttaggattatgggtgtgagccactgcgcccagccattatttatttatttatttttttgagacgaagtcttgctcttgtcccccaggctggagtgcaatggcctcctgagtagctggaattacagacatgcaccaccacacctggctaatttttttatctttttagtagagacagggtttcaccatgttggccctgctggtcttgaactccctacttcaggtgatctgcctaccttgcttcccaaagtgtggattacaggcatgaaccaccatgtagttcactctttcctgtgcaacctctttgctttgaattttttttgagatggagtctcgctctgttgcccaggctggagtgccatggtgtgatctcagctcacttcaacctctacctcccgggttcaagcaattctcctgcctcagcctcccatgtagctggtatcacaggtgtccactaccacacccggccaaattttgtatttttagtagagatggagttttaccatgttgaccaggctggtcttgaactcctgacctcaggtgggaggtggctggttttggcctcccaaagtgctgggattataggtgtgagccactgcacctgatctgctttgaatttaataccatgaatgagtgtcataccatcatgtctcaatttatagattaaatatttgacatctcggaggcgtaaatggtcaatttctgacctcctgcaacttggaagagtaatcaagtgtttgcttcaaagcaaattgttcacttgagacgtcatagtagagtcctaataatttgatatgatttggtagacaggactaggggttagatttggcttatctagtataagtactacccagatatgtgatgctgctcaagttattttaactgttttctctttcttttctttctttgttttcttccttcctttccttctttcctctttttctttttttgctcttaaaacttgcctaagcctgggaggcaaatgttgcagtgagctgagattgtgccactgcaccccagcctaggcaacagagtgagaccctgtctctaaaaaaaaaaaaaaaaaatttcctaaggctcaaatgagagtaagagctgtgacttctcctcagctaatggtggcatcattactgactaaggccaaatactgcttgaacaaatagttactgcttaggactcatgggacacatggatatcacatataaaggttaagctcttttctgggattttgagatttgtaggactatttgtgctggtaggctaatttctagtgtctctctctctctctatgtatatatacatatatatttgaggtttgtaggactatttgtgctggtaggctaatttctagtctatatgtatatataatatatacatatgtataggtgtgtatataatatatacatatgtataggtgtgtatataatatatacatatgtataggtgtgtatataatatatacatatgtataggtgtgtatataatatatacatatgtataggtgtgtgtatatatatacatatgtataggtgtgtatataatatatacatatgtataggtgtgtatatatatacatatgtataggtgtgtatataataaatacatatgtataggtgtgtatataatatataatatatacatatgtataggtgtgtatataatatataatatatacatatgtataggtgtgtatataatatatacatatgtataggtgtatatatggacatatatgtatatatggacacatatgtatatgtatatatggacatatatatgtatacatgtatgcatatatgtatatatggacatgcatgcatatatatgtacatatatacatatataatatatataataaataatctatataatatatataaataaatgatatatatttttagatggagtttcactgtgtcgcccaggctggagtacagtggcgtgatctcggctcactgcaacctccgactcttggattcaagcgattctcctgcctcagccttccgagtagctgggactgtgggcatgcgccaccatgcccggctaatttttgtagttttaggagagacggggtttcaccatgttggccaggctagtctcaaactcctgacctcaggtgatccacccgtcttggcctcccaaagtgctgggattacaggcatgagccaccaggcccggccacctctacatttgaaaagtcaatcattgaactttattaaagttctctacatagaattttatagtacaacttagtcatacttgctgattatcaataaattttaagacatcctcatgcctgtttacataatcttcatatgtaacctaaaccttcagtagcactgtagaattgtctcatcttcttatcatgtccaatccagcccagcctactggaaattattttctgttaagtgttagagtccagctggaggagagtgcattaaattggaagtcaggaggtcttcctgggtggcctccaattgactgggtgactttaggcaagcctccttagcttcaggttctctgactatagaataagcaggttgaaatggttgatatctgagttcttttttagctttgcgacaattctgtgattggatcaagagtcctaccattctgaaatatgtttgaatttttgtttcagtaatttttctttttccctctttctctcaggcagatgtttggagcatgggcatactgttatatgttcttatgtgtggatttctaccatttgatgatgataatgtaatggctttatacaagaagattatggtgagtattacaaggcatagaatttcaatgtagaacttttctataccgaatagtatatgctttcattcataaatgtacaaaaacaggcataaaagttattctctgctgttagaagtcaaaatcttagttattctttgggagtggttaaggagtgggcttctgttctgtttcttaatctgggagttggctacacttgtatacagtagtttccccttgtcagcagttttgctttctgcggtcttagttgcccatggtcaactgcggtctgaaaattggtgagtttgtgtaatacagtaagatattttgagagaaagaggcacattcaggccgggcgcggtggctcacgcctgtaatcccagcactttgggaggctgagactggcagatcacgaggtcaggagatcgagaccatcctggctaacgtggtgaaaccccgtctctactaaaaatacaaaaaattagccgggcatggtggcgggtgcctgtagtcccagctactcgggaggctgaggcaggagaatggggtgaacccaggaggtggagcttgcagagccgagattacgccactgcactccagcctgggcgacagagcaagactctgtctcaaaaaaaaaaaaaaaaaaaaaaaaaaggcacattcacataacatttttaacagtatattgttataattattctattttattatgttattgttaatctcttattctgcctaatgtataaattaaactttatcaaacttgtgtatatatatatatatatggaaagaaacatagcacatatagggttcattgctatccgtggtttccggcatccatgggtgtcttggaaagtattacctgctgataagggggactacagcattcagtttttgaaaactcattgaggtgtactcttacgttatacaaacttcttttttttttttggagatggagttttgctcttgttgcccaggctagagtgcaatggtgcgatcttggctcaccgcaacctctgcttcccaggttcaagcgattctcctgtctcagcctccctagtagctgggattacaggcatgtgccaccacgcccggctaattttttgtatttttagtagagtcggggtttctccatgttggtcaggctggtctcgaactcccgacctcaggtgatttgcctgcctcggcctcccaaagtgctgggattacaggcatgagccaccgcacccggcccaatatataaacttctatacatatacttcttcaatgaaaagcttaacaaaataaaaacagaatgctgtgtcaaatcacattttccttttgacttataaaataagaacctcctcttttctttttttggaagataaaattttggcttcaggttataataaaaccacaattgagatcacctactgtaagctttgttaaaatcctatatatcagagacagagagtagataagttgttgcttggggttaggggtggagagtgactgcctgtgagtatgggttttctttttgggatgatgaaaacattctggaattagaaagaggtgatgattacacaactttgtgaatatactaaaatctacactttaaaagggtaaatattatggtatgtgaattatgttcagttaaaaaatcaaaaaaatcacaggaaggaaaataggaaaattatttcaaagcaaactaacaaaagaagacatgtaaagaggaagaaagaacatcttgtgttccatagcaaactgaggtcagactagcagagcagcatctctgaatgcttcactctctttcttcttcttttttttttttttttttgagataaggtcttgctgtgtcacccaggctgaagtgcaggagtgcgatcatggctcactgtagccttgaccctctgggctcaagtggtcctcccacctcaacctccccactagctgggaccacaggcactgcaccactacatccggctaattaaaaaaatttttttgtagagataggatcttccctatgttacccaggctggtctcaaactcctgtgctcaagtgatcctcccacctcagccttgcaaagtgctgagattacaggtgtgagctactgtgcctggccttctgaatgcttcttgaatccaattctgtttaacaaatatttcctgaatttctgctttatataagatgctgaaaggcatagaaaagatctatgaaactttattattgtccaccagggcctgatctcttgttggagacaggtataagctatctaaaaacggcaaagggtgaggaatgccatattataacagagtgtaaatgaaattaatacaggagttggggtggctctgggagggcatcttagaggaagtgaggtttgagcaggtctttaaaagaagggtggaagtgtttcagaaagggatgtgggcaagagcattcctgatagtacaggtagcatgagcaaaggcatagaagtgggagagacgtggggaggaatgggcagttttttgtagctggaccattggatctctaacaattagatgaggagactacctaaagcaactctcacttctaggaagtagcatacagtgttgaaagtggtagacccagttggcttgttgcccactccatagaacaccaagtctaaggacactgagttcaatcttcaacttttatttgacttatagtttttcctatatcccaccttggaagattctttaaagttgattcccaagcttcagagaatagctttggaaagagatggaattgcaatagttccaactccttgaagactgaggagctctgattctgcaggatcaaaaagaagcagtgtgagcggtagctattaacaccgctttggggacccatgtgtgtccaggcttctccttgtgaaggggagataaatgaggcagtgggctggaggccggcctcctagagcctgctgctgtagccaagacagcttgttttcctcctgtcacttcttgagctttcttgaactttgctgggtagcactcgttgctttggcttctgcatgctgactgtggcagcagttcctgactccatagagccatacctgactgcatccacatcaggatacaggggagagtagggttaggatctttttgtggctttagctccagtcaacagaagtggtctttgggcagctcagtaacatttatccagttatacttttacaaaatattaggttggcctcttgaattcttccctctttttgctacttttttctgtaaagtagggctgtgttttttattctgaaataattgtattctagtataggttgagtatccctaatctgaaaatccaaaatttgaaatgctccaaaatttgacactttttgagtgctgagttgatgctcaaaggaaatgcttactggagcatttcaggttttggattttcggatttggcatattcagtcagtaagcgtataatgcacatattccaaagcctgaaatctgaaacacttctgttcccaagcatttgggtaagggatactcggcttgtattataagctgctaggatattttaccctattcttgttttgggaactccatcccaaagaaataagctgacagatttctccaaagtgaactagaattgaatctgctagctggtgtaacacggaatattacacctcctagacttctagaaagactgtggaaacagataatggtagaatttcactgttggaaagcacctgggaaatcatgttttctgacccttgttgcttgttttatatttaatcctcactaaaatgtctcctgccttggctatgtccatgtactctctctcagggtggggaaagttagctaatggatttaattcttcctaaccatagttgcacattagaattgcttggggtgctttaaagagtattggttccacccccagagcaattaaatcagaatatcattgaggtttttgaaattcagaagcttcagaatctctactttctatctgtggactttggtaaattatttagcctctctgtgtcttagtttctttgtctgtaaaaatggatgaaataacacggcatagggttgttgtgaagattaaatgagttaatccatgaaaagcatttagagtggtgctcaataaatgtagctattattattattattattattattattattattattttgagatggcgtctcgtgctgttgcccaggctagagtgcagtggttagattcggctcactgcaccctccacctcccaggttcaagcaattcttctgcctcagccttccaagtagctgggactacaggtgggcaccactatgcctggctaatttttgtacttttagtagagacggggtttcaccatattggtcaggctggtcttgaactcctcacctcgtgatctgcgctcctctgcctcccaaagtgctgggattataggtgtgagccactgtgcctggctgctattattgttttatttttgtttgtttgttttgtttttttctgtgacagagtctcgctctgtcacccaggctggagtgcaatggcgcgatcttagctcattgcaacctccgcctcctcagttcaagcgattctcttgcctcagcctcctgagtagctgggattacaatcatgcgccaccgtgcctggctaatttttgtagttttagtagggaaggggttttgccatgttggccaagctggtctcgaactcctgacctcaagtgatccaccaccttggccttccaaaatgctgggattacaggcatgagccaccacatctggcaattatttttgagacaaagccttgctctgttgcccaggctggagtgcagtggcgccatcttggctcactgcaagctctgcctcctgggttcaagcaattctcctgcctcagcctcccaagtagctgggattacaggcgagtgccaccaagctcagctaattttgtatgtttagtagagatgaggtttcaccatgttggccaggctggtctcgaactgacctcaagtgatcctcctgccttggcctcccaaagaggctgggattacatgcatttctaaatgagatttgccagtattttgtccaggacttaaaattggctcaaaaattaatgtgtacttttttgggaactatctttgtatgtttggttttggtttcatgatttgtattagccccataaagttacattggggagtattctttcttttacttttcttggggagagcttgacaatttttttgtggatgttttgtagaatgtgcttggaagttcaactccacctgtgccttctttatggaaagatttttaactaacatataacatttaactaacatagatcataacatttcatttgaagctctctagtggcctctttctcatctcgagtacaagccagtgtttgccctgtgtgctgtgggttttcccccgtgtaatgtggcctcccatcacctcactgccctcatggtctactccctgcctcacttgtgccacccacattgtcctccttgttgtttcttttttccccttttcctggaacacgctaaggtgtgcctgcctcagggcatttgtacttaccctttcacctgaaatggttttctcccggagagatgctttgttccctcccttctttcaggtctctgttcaaatgttctctaatcagaaagacaaccacttgtttatgtgttcatttgtttgttcatttactcatttattcgatgtcatttcaccttagggaggagtaaaatagttaccaaacacctaatatgtgccaggcacttttctagatgtgtggggtatatctgtgaataaaacagatgaaagatccctgtcctcgtggagtttatcttctagtagtggggatgtagagaaagacaataagcataacaagtaaattttactaaaagatgatatgtactttggaaaagagaaaaaaattgagtaggatgaagaggaatcaggagtacagatgggggagttgtggaggaaagggccagtaggttgcatgattaaataaggtggtcaggataaacttcatggaggcgagatgtaaggagacttgagggatgtgagagtgtcaagtggatatctaggagaaaaatatttccggcagagggaacagctagagcaaagactgggaggtaggaacatgcctggtgttgtcaagggagggtgagagggccagtgcagcctgagtttagcaagtgaggagggcagtaggaaaggaaaccttgggaacaggagtcaagctgctttgggctgggtaggctctcataaggactttggcattttttctacgtgaaatggggagccattggaggcttttgaggacatgatttggtttagtttttaacaggatcacactggctgctatgtggagatgactgtaggaagtgaagagaaccagggcatctggtcaggaggatattgtaatgattcagataagagatggtggcagtggaggtggtaaaaagtgggtagatactagatgtctttttttttttttttgagacagagtctcgccctgtcgtccaggctggagtgcagtggtgcgtcttggctcactgcaacctccgcctcctgggttcaagtgattctcctgcctcaccctcctgagtagctaggattataggtccttgccaccatgcgtggctaagttttgtagttttagtagagatggggtttcgccatgttggccatgttggtcttgaactcctgactcaggtgattcacctgcctcggcctcccaaggtgctgggattacaggtgtgagccactgcttctggcctggatgtcttttttaaaaaattatttttgggttttttttttttttttttaatttatttttttattgataattcttgggtgtttctcacagagggggatttggcagggtcatgggacaatagtggagggaaggtcagcagataaacaagtgaacaaaggtctctggttttcctaggcagaggaccctgcggccttccgcagtgtttgtgtccctgattacttgagattagggattggtgatgactcttaacgagcatgctgccttcaagcatctgtttaacaaagcacatcttgcaccgcccttaatccatttaaccctgagtggacacagcacatgtttcagagagcacagggttgggggtaaggtcacagatcaacaggatcccaaggcagaggaatttttcttagtgcagaacaaaatgaaaagtctcccatgtcttctactttctacacagacacagcaaccatccgatttctcaatcttttccccacctttcccgcctttctattccacaaagcccccattgtcatcctggcccgttctcaatgagctgttgggcacacctcccagacggggtggtggccgggcagaggggctcctcacttcccagtaggggcggccgggcagaggcgcccctcacctcccggacggggcagctggccgggcgggggggctgaccccccccccacctccctcccggacggggcggctggccgggcagaggggctcctcacttcccagtaggggcggccgggcagaggcgcccctcacctcccggacggggcggctggccgggcggggggctgacccccccacctccctcccagacggcacggctggccaggcggggggctgacccccccacctccctcccagacggcacggctggccaggcggggggctgatccccccacctccctcccggatggggcggctggccgggcggggggctgacccccccacctccctcccggtcggcacggctggccgggcggggggctgacccccccacctccctcccggacggcacggctggccaggcggggggctgacccccccacctccctcccggatggggcggctggcctggcgggggctgacccccccccacctccctcccggacggggtggctgccgggcggagacgctcctcacttcccagatggggtggctgctgggcggagaggctcctcacttctcagacggggtggttgccaggcagagggtctcctcacttctcagacggggcggccgggcagagacgctcctcacctcccagacggggtctcggccgggcagaggcgctcctcacatcccagatggggcggcggggcagaggcgctccccacatctcagacgatgggcggctgggcagagacgctcctcacttcctagatgtgatggcggctgggaagaggcgctcctcacttcctagatgggatggcggccgggcggagacgctcctcactttccagactgggcagccaggcagaggggctcctcacatcccagacgatgggcagccaggcagagacactcctcacttcccagacggggtggcggccaggcagaggctgcaatctcggcactttgggaggccaaggcaggcggctgctccttgccctcgggccccgcggggcccgtccgctcctccagccgctgcttcccgggcggcgctcgccggcgcggtggcaaagaaaaaaattatttttgtattaacaaaattaaaagtaaaagtagacctgtatatacaaagggtaaagtaaaattgaccctttgtatatacagtaaaattgaccctttgtatatacaggtctatgaattctaacacatatatagattcatataaccattgccacagtcagaatgtagaacagtctggatgtcttttgaaggcatagctaacatgatttgtgcatggattggatgaggggagtaacccgagtagctagaaagttggaaaattattaaaggtatctagcatgtcaaactcttttttttttttttttttttaaggcagagccttactttgtcacccaggctggagtgcagtagtgtgatctcggctcactgcaacctctacctcccaggttcaagcgattcttctgcctcagcctcctgaatagctgggattacaggctcccaccaccgcgcctagctaatttttgtagttttagcagagatggggtttcaccatgttggacaggcttgtctcgaactcctgaccttaggtgatcagcctgcctcagcctcccaagtgttgggattacaggcgtgagccaccgcgcctggccataaaacctgttttcttagaggcaatcattgctatcacgtttatcagatttttacgtatttttttcagacattagcctgcatatgtaaggaattttatatttatatattttctctttctgctacccccttcccagttttttttttttttttttttacacagatggtagcataccataaacactgttctgcactttgttttcctcccttagcagtgtgtcttggaaatcatagcacttcatacccacctcagagcctcttcattctttttatgactgcatagaattgcattgtatgcatgtaccataatttatttaaccagtcctaggttaatggacatttaagtaatttccaagtagtcatttgtacattgtgaatataataaatctgtaagaaaatttctagaacagttggtgggtcaaagatatgtgaattagtaattttgatagatattgccaaattgcttcccagtaaagtcctattggtttatgcaactaccaacagtagcataataatgccagtttctccatacccccccaccaatacagtgtatcactgtttttgattgttatgtttaagacttatttttgctgtgcaggaatttttagtttttatttagtgaaattcatcaatctttttctttttttctttctttttttttttagagacagggtcttgctctgtcacccaggctggagtgcagtggtgcagtcatagttcattgcaacctcaatttcctgggctcaagtgatcctccagcctcagcctcctgagtagctggaactacaggcgtgcgctaccacacttggctaatattttttgtagagataaggtcttgctatattgctgaggcttgtctctggcctcaagtgatcctcccaccttggcctctcaaaatgttgggattataggcatgagccactgtgcccagcctgtcaattttttattgtcatatttggaagggctttttgactttattttttaaaatatctgtgttttcttctagtgtttttatggtttcactttttaaaaatgtttaaatgtttgattcatctagaatttgctttagtatgttttcttgactttaaacatcataaaaaaaactgtagagatttgctttcacattctggattctggattttaaagatctaattgtagaccaggtgtggtggctcgtgcctgtagtcccagcactttggggggctgagttagggacatggcttgaggccagaagtttgagaccagcctgggcaacatcgtgagactccgtctctacaaaaaataaaaaaaaaattagctgggcatggtggcatttgtctttagtcctagctactcaggagactgaggtgggaggattgcttgagcctaggagttcaacgctgcagtgagctatgattgcaccattgcattccagcccaggccatagactccatgtctttaaaaaaaaaaaaagggcccagtggctcacttctgtaatcccagcactttgggaagctgaggtgggcagatcacttgaggccaggagtagcctggccaacatggtgaaaccccatctctactaaaaatacaagaattttctggtcgtggtggtgcatgcctgtaatcccagctactttggaggctgaggcatgagaatcatttgaacctgggaggcagaggttgcagtgagctgagattgcgccactgcactccagcctgggtgacagacagaggctcctcaaaaaaaaaaaaaaaagaaaaagaaaattgaatcatgatgtcaacgtagccatatatacttaagatttgaggttcatttttaacaatagtgtatataagtccttatttaaaatagtcttgctaatttcaagttttgcagacaacttgttaaatctaattaggtatttttttaactttgtgttttggttgatatcctaaaagtagaagtgtcagctccattactgtttgcttgtattcatagtcttcaatctgtggtttctttgcaagagttttgagccacttgtctattcaatgaggatttagcttcattaaaccgtatactataatctgtaaatccatgtaactgtgctcctgtaaagcactgctttgcaataccattctttcttaagagtgtctcatagtgtaggttatatagggactagtgagcgtactagtgccgatccatgtactaaatattaacaaagctcaatttcttatttattagatagatagaaaattaatataaatctttgaagaccgccagtcaagaatgagtgaatggtcaactctaagtatttttttttttttttttgagacggagtcttgctctgttgtccaggctggagtgcagtggcacgatctcagctcactgcaacctccgcctcccaggttcaagcaattctcctgcctcagcctcccaagtagctgggattacaggcgtgtaccactacacctggctaatttttgtatttttagtagagacagtgtttcaccatgttggtcaggctggtcttgaactcctgacctcaaatgattcacctgcctcagcctctcaaaagtgctgagattacaggcatgagccactgtgctggcctaactctacgtattctttaggcagtcccttgataagtataatacctctcagccaggttattgagtgtcagtcaattagggattattctacctggaaattacttgaagttatgggtattctgtgatgctgaataagaacaagaggggccatgagtataactggggctaggattggcattcttctgtaaacattgagccttctaaccatacttacttcttggttatgagatactatgccataaaggataactagagtcattttatccagctaaaattttgcatattcaccttgaccataaaaagtctcaataaagatgtatgatgtgtaaaacaaaatgaggtattatgtagatttaaaaaaaaatggaatgataaagttttcagtgagttttgaaccccccaaaaatatgtagagagtgggggagatgccttctgcaggccaggtctaagtgtctgtaggtgtccagaaatggagttctgtgtttgagttgtgctgaatgaaatctcttctgtctagagcatctgcagcagtcttttggtggtttaattctttctgcttttttctctacttccttgtttcccccctccaaatggatagagctttctgaagtgtgtgtgttgcatatctttgtggctattgcacatggttgatcagaaaaaataaaatgtttgctggcgtgcatattctcatccttttgtcacaaaagtaatacttaacatgcatgagttttgttacttaccaggctgtgctctaaatgaggtggttgctattattgtcttcctcttacagatgaagaaatgaagggacagagaccttaaataacttattcagggtcttatagctagtgagtagcagagctgggatttgaaccctagcagtcaagctggcagcccattcttataaccacaatgaaatattgtttctcagctctgtagttgctagtcacctaagaatcacagatgcctagaggaagaaggatcccctcccaagcatctttttatgcttattaatttgggaaatttcccagacatcccatcttttctgatttactaaggctacaagttagttctcccaattcatttaggtattactgtgcataggctttcccacgcattttaggtgtcaccccgcaaggatacttactggtccttgtttccttcatcagcagcattagagcattgcagtaatcagttattttcaagatccattccagctctgagtagctataagttctttgacttctgtttcttcacattcaatttttcttgtttcagcctagcattctcttcctttttttttttttttttttgagatggagtctcgctctgtctcccaggctggagtgcagtggcgtgattattggctcactgcaacctctgcctcctgggttcaagcgattctcctgcctcagcctccagagtagctgggactacaggtgctcaccaccacacccagctaatttttgtatttttagtagagacggggtttcaccatattggccaggctggtctcgaactcctgaccttgtgatccgcctgccttggcctcctaaagtgctgggattacagccatgagccaccgcacccagctgcattcccttcttttgagattttgaatcttgattctgcactcatgtagtaacagctgtccctgccagcattgcacctgccaacatttgcacatttcttaaatatccctaaactaagttgttcattaaaaaactgaatagaggctgggcgcagtggctcacgcctgcaatcccagcactttgggagactgaggtgggcgaatcacgaggtcaggagctcgaaatcagcctggccaacacggtgaaaccccatctctactaaaaatacaaaaaaatttagccgggcatagtggtgcatgcctgtaatcctaggtactcaggaggctgaagcaggagaattgcttgaacctgggaggcggaggttgccatgaggtgagatcacgcctctgccctccagtctgaatgacagagtgagactctgtctcagggaaaaaaaaaaaaaaaaaaaaaaaaaaaaaaaaaaaaaaaaaacttgagtagaacagaaccactccctaagtgttccgagtattggtttttagttttattctgtttcagctatgcttaactaagattttgtagacttacccacaaagataagtaactgttattttacttacctaccacacccagctaattttcgttattatacttcttttagaccaagaaactaaagcacagcaaggttaaatagcttgtataaggtcacacagctagtaagaggtagatcctggatttgaacctagccaatttgttttcagagcctttcttaggaaacagggccagagagactgaataccttaccctgttaataccttactgaaatggaactattcatggtgatcctaatttattgacttaactctaacctttgctatatttttacctgtctggaccttaatcctctatgctgtttatttgtcttcatttgttgttactgcaagttcacattcatatggcagccatggaattcatactattatcagtatattgtttcatcaataaaaggtgaatgtaccaacatacaaacttcagtgttttctacttttatttatttgaatgcactagtagatcctagattaatcctttgagggagagagcttaccttaaaataataaaaaagtatatcctaatagtatatgtgagattcaagttctgatatttttgaaaaatcaaatatctttgcagtggaatgaatatggtagaaaatgtctaattcttgttcagtggagatttggccttcctaattaatagtatttactaatacttgtatattctttgtttctcctactctgaatttcattttttagtttttcatgtatttgcaagttgaaaattgattcaaattaggacttttatgcattattgtggaatttaatttcacacattatagattttgaaatttattgtaatcttggctcagaactattgttccgagtcgcagtgtaatacagtctgctggttgaatctaattaaggtgtcgtatcacttgcatgcagtatgtatctttgcctagaatgttctaaaattcctcacttgggaataacactttcctcagttcttggtttgattgaaaaacccagcaatatttgacgcaccgtatgtaactcttgtttaaaaggcagacttcgtttatcttttgcatttgttgactattttaaccaaaatgctcaactgcactttctagcatgattactaatggcttgagtattaatcttattaatgttacctatattcatttgtcatcactgcattcaaagacaagcacgagtgtactccagctgtggtatacaaatattagggaagtataaataatttagcaattgaaaattgagtagtttgaaaataaaattgctgcctaacaattacaatttataattttaaggaaaatgagcaagttgtctctttatgaaattatatttttacaattacggagtttactacagcattatgattatgtattggtgagatggcctgcctctcttagaacagtgtgaaaaacaatttcaagccactggaattcccaggattattttgcttagtccatagatcttttctccctctcttcacttggattctcccactgttatctgtttcttgctctcctttgcaagttaattgtcccttaaataaacaaacacaaattctttaaagaatagcagaaacaagggtcctatctctgaccattttttgctctgtaacagtgtttctcaacattaacactattggcatttggaccacataattctttgttgtaggggactgtcatgcattgtaggatgtttagcagcatccattacctttacccactaattgctaggggtaatctccaagtagtgacaattcagaatgtttccatacactaccagatgtccccttgtaggacaaatcatccccagttgagcaccagtgccctacaatattgaacaagtacttaatctccctggctgacagttggtttctccatttgtataatgtggttaatagtccctgcctactacagagggtaaaatatatgtacaagtgttttgcgcattttaaagcacggtgtacaaataagagatttggttaagcctggcagcagagctcatttttggactctattttggccagtatttcagcacagagaatgaagttgagaatgtcaggacatggtaatgagtcacaggccttatgacccacttgtggatgatactctacagaggtgttctgcccaaataggggaattggatggggacattgcaggaggtgatgtgaacagggcttgcctagacgatgtgtaccttaccagacaatcctgagattctgagatagctgcagtggggcagtgctccattgggaaggcctatgacattcctcagaatgcctttagcctttcttgctgcactgagtatttagcacttttggatacaaggcttttggccaatgtgtccatctctggccctcaaaaaaggaatactactttttgaatattcctatctcctgtttatttcagattcaatacatatttattgtctcttacatgcaaggcagtatgccgagtgctttcacatatattctgttggtttataatcctgtaagtggcattagttgtatcgcagataataataatggtagtaatagtatcagcagcagcagtcgaagctaacatttatcaagctcttactgtgtccatggtactgtgctaaatgctttatgtatactaaatcattgaaccctagcaaaatttctatgcagtaggtatcgttattatacttcttttttttttttttttttgagatggagtctcgctctgtcgcccaggctggagtgcagtggcgtgatctcggctcactgtaacctccaccttccgggttcaagtgattcttctgccttagcctcccaagtagctgagactacaggcacgtgccaccacacccagctaatttttgttgttatacttctttttttagatgaagaaagtaaagcacagcaaggctaaatagcttgtataaggtcatacagctagtaagaggtagatcctggatttgaacctagccaatttgttttcagagcctttcttaggaaacagggccagagagattgaataactcttacaagcccatggagccagtaagaggcggaactgggattcaaatataatatatgactccaatccattcctgttccaatgtgccaaacaccacacttctcattcacttgttttctctgcttctttctggataggattgcttccatggtgccagcttatagcaaagcacaggggaatctattaaaagatactttaagaattcaaaataggttgataaaaaggggtgataaaaaggcaaagaggaatttggaatcagtatggtagagctctctttatttagtactttggtctgagtatttatttttacatttggtttctgtggagtactcctacttttagttaagagtacttttcagaattgaaaggcataatgtctcctattatgatagtttcagaatttaaaggcataatgtcttttttattatgatagatctggttatgggcctgttatttgtgtgttggagcagaccagaaagggctgaaacctggaatcagacttgtccttgaggtggacagatgctggtatgggggaggtgatgtgaagcagctaaaccctcatagatagtgtatgagtttcctagggttgttgtaacaaaatactggagagtgatgggttaaaacaacagaaatccattcttgtgcagttggagggatactgttcaacccagtacagatagtgtccagagagtaagcagcaaacggctttgcaaacagcagagggaagaccacccagagtacagggaatgaagctgatagaggacactctaggagcaggctgtgatcagagactcaggcagctcacggccttttgatcagcacataggaagctctttgttccaagctgatctccactctctatgggaccctggcaagagcaagctgaaatatttgagaccgggcaaataagcagtttgccaagaaagagaacaaggcaagtcctcaggactgggatcacgaaaagcctgggtctcaggaataaagtaaagctcagatacgagagtggggccaagtaggtcagggccagtcatgcagcaactgtgactcactactgctgagtcccagagagttggctagagcatctaaaacccctccttcccagggataggcatggagcccaggcagcagtgagccttcagattggggtccagttggctgtagatgaagcgtggtaggggagaaataaattcaaggcttcattgctgtagttcaaaaacaaactttgagccagctaggtggctcatgcctgtaattccagcactttgggaggctgaggcgggtggatcacctgaggccaggagttcaagaccagcctggccaacatgatgagaccctgtctctactaaaaatgcaaaaattagccagtcatggtggtgcatgtctgtaatcccagctactcagtaggctgaggcagaagaatggcttgaaccctggaggcagaggttgcagtgagcgaagattgtgccgtgagacttcatctcaaaaaaaaaaagaaaaaattatgaagggttacattcatcgcagaattgtttatgatataattaggaattggtctatgacaaactccagagggcctccaaaatgaatgaaagacaaaatgcactgaataagggttctaggttagaaatataagtgcaagtgtggcaggccaggtctcactaatgcaggcctccattacaactgtcccagcactgactgagtggctaggttatacactaaaagctgattgagccagtgcccttataccaaggctggaatgtaacaaagagcccaccaagagttttgcctaggcttttccagggccttgaagcatgacaagataacgaaggaattcttctcaggacccttttaggatgaaacaaattttttgggggtctgaagaaagcacaaacaatttctttggagtctaaaggaactccccaaacctttatgatttagcaggatacaagataagggtaatcaccctagcacctagacccatttagattaagtaaacttactgaggctccagaaggtcttcgggactcagaccttagttatagcttaaaagaagttagtcacttacgtttttagataaatgcacacttacacgtagacatatagcttagaaggtgtataggctctggagaactttgtaattttgagttggtctggtgataatttccaggccttttccctgtggctggttacagaaataaaaactcttcctccccagttcatctatatcttgttattgggcctcaagaaatagcagcccaagaggccgggcatggtggctcacggctgtaatcccagcactttgggaggctgaggcgggcggatcacctgaggtcagtagttcgagatcagcctgaccaacatggtgaaaccctatctctactaaaaatacaaaaaattagctgggggtggtggcaggcacccgtaatcccagctactctgcaggctgaggcaggagaattgcttgaacccgggaggcagaggctgcagtgagccaagatcactcattgcattccagcctgggcaacaagagtgaaactccatctcaagaagaaaaaaaaaaaaaaaaagaaaagaagtagcagcctgaccctcagtttagtctgggaacacaaagaagacaaggacaagcacaagcgcaaacacacacacacacacacacacacacacacacacacgccaactgtaaatgaatgcggctagaaggatggaggcagataggtgaggaagccattgacttgtaccagcattggggttctctgttcttatgaactgtctaggatataattcttacagaatcagtccaccttaaaggtgaagtggaaaacagacaggtatggatcactcagagtcctaagatgttatggcaggctggctttcaattatgttaaagaagtaatgaaagtcccagagaagcattgtcaaacaatgaatctaaaaagaaagggtcaaaaatcagcctctctgatgagagtagatggactgacctacaagtgtttcctaggaagaacagtagctttcattttacaaatgacttttaatattattacatttttattccctttatcgaaagcactcagtattacccagagaacccattctctctctctctctttttttttttttttttggagacaagagttttgctcttgttgcccaggctggagtgcaatggcgcgatctcggctcactgcaacctctgcctctctggttccagtgattctcctgcctcagcctcctgagtagctgggaattataagtgcccgccaccacacctggctaattttgtatttttagtagagacggggtttctccacattggtcaggctggtctcaaacttccgacctcaggtgatccgcccatctcagcctcccaaagtgctgggattacaggcgtgagccactgtgcccagcctgagagcccattcttatttatcccttgccagggcaccttaacacttgccagagacagaaactgacaaagtcttttttgtttgttttgtttttgagacggagtttcactcttgttgcccaggctggagtactatggcacaatcttggctcactgcaacctccacctcccgggttcaagtgatttttctgcctcagcctcctgagtaggtgggattacagacatgcgccaccacgcctggctaatattttgtatttagtagagacggggtttcaccatgttggtcaggctggtctcaaactcctgacctcggccttccaaagtgctgggattacaggcatgagccactgtgcctggctcagagtttgtttttgaattgtagcaatgaagccttgaatttatttctccctaccaagcctcatgtatggccaactggaccccaacctgaaggctcactgctgcctgggctccatgcctatccctgggaaggaggggttttagatactctagccagctctctgggagtcagcagtagtcagtgacagttgcctgtgacctttggaaaaggctttttctcaatttgttgttaactttgttaatgaattttttttttttgagacggaatcttgctgtattggcaggctggagtgcagtggcgtaatctcagctcactgcgacctccacctcccggattcaagcaattctcctgcctcagcctcccgagtagctgggactacaggtgcgtgccaccacgcccggctaatttttgtatttttagtagagacggggtttcaccatgttggccaggatggtcttgatctcttgacctcgtgatccacctgcctcagcctcccaaagtgctgggattacaggcgtgagccaccacatccggccaatgatgttttgttatacagaaatatcaaacgttaattttgtcatatattactctttatagttgttggctttgctgtcatgtctagaaagattctaaaaataatcactcatactttctttaagtactcttatggttttgtattttcttttttttttttttttttgagacggagtctcgttctgtcgcccaggctagagtgctgcagtgacacgatctgggctcaccgcaacctccgcctcctgagttcaagcagttctcctgcctcagcctccctagtaggtgggactacaggtgcccgccaccatgcccagctaatttttgtatttttagtagaaacaaggtttccctgtgtcagccaggatggtcttgaactcctgacctcgtgatccacctgccttggcctcccaaagtgctgggattacaggtgtgagccaccacgcccagcctggttttgtattttcatttaatctgggtggaattaattttggtatgttctatgaattacagttcaatcaatttctctcaaataattaacctgttatcttagcatcattaaacaatgtgatttctgctgtgagaaactgttgtattgcttcctctgaattgggaaagaggatgtgtgtggtaagtgtgtaaagagatattctatcatgtattagcatttagccaagtccctgatcttttctttgatgacttggtggccataatttctgagtatactaggttgtatacatttgccttcttagtctcttttagtcctaaaagaggtatttaccttagaaagtggctttcactagttttcctcaaagattgtgaattctgttttgtggatgacctgtttttaaccatagcctatgtactgtcaccaaatatgcttttctgctgcttcattttgtcaactgataattgctctgaaattataaactaataattgtttcagcagtataaaaatagactacagtgtatacttactgtccatttaatactacagattccaaagctgtatgacatttttgttttctactgttatgttctttgtgctctagcccttctctgatatgtggataatttagaggcaatgatagtatttaatatgcccgattttttctttaaggcaagaaattgtttttttttttttttttttgtgatggagtctcgctctgtcacccaggttggagtgcagtggcacgatctcggctcactgcaacctccgtctcctgggttcaagtgattctcctgcctcagcctcctgagtagctgggattacaggtgcctgccaccacgactgactaatttttgtatttttagtagagacagtgtttcaccacgttggccaggctggtcttgaactcctgatctcaggtgatctgcccgctttgacctcccaaagtgctgggacttcaggtgtgagccaccacgcccagccaagaaattgattttttttagttaataatgtttaccaagtattgtagttgggtgaagtcttcaagcttaaaagtaaacctccagcatgttattacctaaggaatttgtgtcaaggctgattgaacctgaatctcttaaatgctttgtttttgtagagaggaaaatatgatgttcccaagtggctctctcccagtagcattctgcttcttcaacaaatgctgcaggtaaactttatttttaaataatagaagtctattgtaattgtttggttcaacttttaagatatctgtggtgctacatcatttcctattagcttgaaaaaaatcccactcatatctaccttgaaaatatcctctattagatcctttcttaattatgttgtaaacctagtttattttagacacctaccatatgttatagctggtatggtttttcttactttgcgaattttctgttttctctaactagttcttgttccactctcttttattccaaaattattgattgattgattgattgatggagatagagtctcactccttagaagaccctcaggttggagtgcagtggcgtgatcttggctcactgcaaccttcgccttctgggttcaagtgctttttctgcttctgccttccgagtaggtgggattacaggtgtgaaccaccatgcctggctaatttttgtatttttagtagagacagagttttcccatgttggccaggctggtctcgaactcctgacctcaaggtatctgcctgcctcagccttccaaagtgctgggattataggcgtgagcctctacacctggccccagctcttttttttttttttttttatttagatggagtctccctctgttgcccaggctggagtgcagtggcgtgatcttggctcactgcaacctttgcctcccaggttcaagtaattctcctgcctcagcctcctgagtagctagtactacaggcgtgtgccactatgcctggctagtttttgtatttttagtagagacgaggtttcactatgttagccaggctggtctcgaactcctgacctcacgttttctgcctgcctcgacctctcaaaatccaaagtgctgggattacaggtgtgagccactggcttttgtttttttgagacagagttttgctttgttgctcaggctggagtgcaacggtgcgatcttggctcaccacaacctccgcttcctgggttcccaggttcaagtggttctcgtgcctcagcctcccaagtagctgggattacaggcatgtgccaccattcctggccaatttttgtacttttagtagagatggggtttcaccatgttgtccaggctggtcttgaacttctgacctcaggtgatccacccgccttggcctcccaaagtactgggattacaggtgtgagccaccgcacccagcctggcctctttttttaaaaaaaaattttatagacagggttttactctgtcgcccaggctggagtgcagtcatatgatcttggcccactacagccttgacccccaggctcaagtgttagttctacttcagcctcccaagtaactgggaccactggtatacaccaccacacctgactaattttttgtgttctttctttagttttcttttttttttggttgtttttaaattttatttatcacttcattccttataattactttcagcaaactgtattttttgtagagatggggtttcgctacgttgcccaggctggtttcgaactcctgagctcaagcgttctgcctgtcttgatctcccaaagtgctgggattacaggtatgagccacggcatcccgccttttcccaactcttgctcattaagtatgttagtagatactgaataaatacttgaatgagttgatgtactattgaatgggccctgttacctagtgcagtggttctcaaacttcagcagatatcaaaattaccccgggcttgttaaaatacagattgctggcctccagccccagagtgtgtaattcaatagatctgaggcaggactgaaattttgcatttctaacaagctcccagaagatgctgatgctgcaggtcttggggccacactttgagaaccacagatttattggaatgagcctctgagggtgaaagataggagtgctgaagcctaggtaagcactctaccaattaatcaatgtatcacctaatctgatctataaaatgggggttctgagcctggcctcactgctatgtagtgttataaggacaaaatgagattgataggaaacactttgaaaatatgagtatcttcttagtgcaatttttttttcattatgtattcagaatatcttctggttttttcatctattaagtcatctccatcttttattcaaaatttacctcaggctcactcaccttgattaagtagggccagaccaccaaatctccgtaatgagattgaaaatgccttactctttcttctagactccaaaataacgttaatctttgttgattaatttttctctccttacatttgaaaattacaaatggaaaggtgtgcttttcaacttgttctgtgtgattgtaagctcattggaggtagagattgcatattcagtatgaatgccctgcattgtggctgcttgaatgtttaattggtgaatatttcccgtgaataggttttccagcaaaagactattacatcatacaatagattgaacttcacgaataatgtccataccaatgaagttcatgtttgttaaacatttatcttctaagcctgtgttggttgctatagttttcttgcctctgttgcctttttaaaagaatttcttccaaggccattttaaagtctttgacagcatttttgtgatgataaagtttacatctgttctgatgcatttttagttttcaggaggaaaggtgttctatgttctctatttgaaatgttaatctctagctactttttaatggccactaggtggacccaaagaaacggatttctatgaaaaatctattgaaccatccctggatcatgcaagattacaactatcctgttgagtggcaaagcaagaatcctgtaagtaaaatgaaatccagtagaatttttttttgactttgtgtggtctttgggtgaattcagaacctacaatgatgtggtctaaatatacaagaaaatatattaatcagattggtgtttgggagacttgtaacctaatggacagtggttccttaaccccatctgcaaatgagaattacctgggaccttaaaaagaaatgcctgctccccatcccagaacacttaatgggagtttttaaaagctcccaggtgtttctcatgtgcagtcagtcacagtgctctgggaatcttggacaagttacttaactttgcagaacctatttattcatctgtaaaaagtaggttaaaccagttctacttcccagagaagttatgagggtacagtagttctcaaactttttagtttgaggatccctttatactcttaatatttatttattcattaaaaactaatatgataaaactattgcatattaacacaaatatttttatgaagaataaccatttacaaaataaatttagcaaaaagaatgacattgttttacaactttgcaaatttctttaaagtctggcttaatagaagacacctgtatagccacctgcttctgtgttcagtctgttttgataggttgttttgattgaagccaaggaataaaatgcagcctcacacagatatgcaataggaaaaggaagaaaaattctaatagccattcagacagtttctgatagcccattaaaacttgacaaatggtagtttcttaaagggtaattgcatgtggaatctgaagccatatcaatgaaattttgtactgtattccataaaatccattgttctgtccattggatcttttcctcacataacatgatgcattggttatttggaaaacactggtttgctgagttatgcaaatcttccaaacgttaacacatttcgttatacaacattaaatcacattccttaaaatcactactgatctcagtagaaaagtctttaactattggaaagcactcaagatcatggtggcaaataaaagttttctaaattctaatttttgcttaaaagctaaaattctatcattgacaacaaatatgtcattctccttgaactgacaaattcccttggttcatttttgagaaaatgtctgctgaacatttaagtctaaataactatagttagtccgtgttctttctcatcaaaatggtgttctttgaaaaaaatggctaattaggccaggcacggtggctcacacctgtaatcccagcactttgggaggctgaggcaggcgtattacttgaggtcaggagttccagaccagcctggccaacatggtaaaaccccatctttactaaaaatgcaaaaaattagctggcatggtagtgcctataatcccaggttctcaggaggctgaggcagaagaattgcttgaactcgggaggcagaggttgcagtgagctaagagcgccaccgcactccagccttgggtgacagagcgagactctgtttcaaaaagaaaagaggctgggtgcagtggctcacatctgtaatcccagcactttgggatcccaggcgggtagattatgaggtcaggagttcgagaccagcctgaccaatatggtgaaactctgtctctactaaaaatacaaaaattagctgggcgtggtggcacacacctgtaatcccagctactcaggaggctgaggcaggagaatagcttgaacccgggaggagagtgagactccatctcaaaagaaaaagaaaaagaaaaaaatggctaattgagctcataattcagtcatacaggtgcttttcctcgagacagctatcaaactttggtattgtagaagtacattatgctacttcctatttagtcacacagagtattaaaaacgtactcagaaatgtaataaaattaatatattttactggtttatcaaggaaattcttaattgaaactggcttcttttcgaactatgggtatatgacaaagaatacaatattttagtacagtttggtgccactgcattgattcatactaaggtgccagcaatttatttatttaattttaatttttttttttttgagtgggaatctcgctattatcgcccagacgggagtgcaatggcacgatcttggctgactacaacctccgcctcccagtttcaagcaattctcctgcctcagccacccgattagttgggattacagccgcctgctacaacgtttggctaatttttgtatttttagtagagatgggatttcaccatgttggccaggctggtcttgaactcctgacctcaggtggtccgcctgccttggcctcccaaaatgctgagattacaggcatgagccactgcacctagctgccagcaattttatcactgcatttgtaccatccatacaaatgtcaacactttgaaaaatgaaaaataatattattataaaaatagtttgaccttggagactctcaggcatctgcagaccgtgctttgagaactggtctaatatgcgtatatgtaaaaaaacataaacaacaccaagtgttatttaagtttaaacaatttaaaaaatactatttctacattgtttttaaaaaatgcttttttttttttttttgagatggagtctcgctctgatgcccaggctggagtgcaatggcgcagtctcagctcaccacaacctccgcctcctgggttcaagtgattctcttgcctcagactcccgagtagctgggactacaggcatgtgccaccatgcctggctaatttttatatttttagtagagacggggtttcactgtgttggccaggctggtcttgaactcctgacctgcctgccctggcctctcaaagtgctgggattacaggcgtgagccactgtgcctggccttaaaaatgctttttttcaaacaaatggccacttggtaaaaatgtggatattactataggacttggatattttgtgtattagttattgctgcattaaaaactaccctgaaatttagtggcttaaaacaataatttggctgggcacggtggctcacgcctgtaatcctagcactttgggaggccgaggcaggtggatcacctgaggttgggagtttgagaccagcctgaccaacatggagaaacccgtttctagtaaaaatacaaaatcagctgggcgtggtggtgcatgcctgtaatcccaactactcgggaggctgaggcaggagaatcacttgaacctgggaggcggaggttgcagtgagccaagattgcgccattgcactccagcctgggcaacatgagcgaaactccgcctcaaaaaataaattaattaaaaaaaaacagtaataatttacagttctgtggaccagatatttgggctgggttcagctgggctgttcttatgtaggccttacctggggtcgtggctacagtcatcttgtaactgggctgaatggtccaagcctcactagaaagactggctgtttcctgggccacatgtgtccatcaggctaacctggacttttttatgtagcaactggatttctttctttctttctttctttctttctttctttctttctttctttctttctttctgtctgtctttctttctttctgtctttctttctttctgtctttcttgtctttcttgtctttcttgtctttcttaccgagtctcactctgtcacccaggctggagcagtggcacgatctctgctcactgcaagctctgcctcccgggttcatgccattcccctccctcggcctcccgagtagctgggactacaggtgcctgccaccacccggctaattttttgtgtttttggtagagacggggtttcaccatggtagccaggatggtctcgatctcctgaccttgttatccgcctgcctcggcctcccaaagtgctgggattacaggcatgagccactgcacccggccagcaactagatttcaaaagaagaaagaggataagccctagtgctctagcatttttcaagcttctgcttgcattgtacttactaatgttccactggccaaagcaagccatgtgacaaagcccagagccactatggaaggtgtatctttcaaggttgtacaattcttattccctatttatagataagggaacggaaaaatgaaaagcaactatttaagatataaatgtagtgagaagagtggcattgctttacatctttgccaatttctttgaagtctgtcttattagaagacaactcatgtgcttctgcattcagcctgttttgataacatcgttttgattgaaacaaatgaagaaaatacagcctcacacagatatgtaattagaaaaaatagaagtattttaatagtgtttccagataattggggatattctctgatatgtcaccaaaacttttgcagtggactaggacatgtgcatgaatcaacacaacagcttagaggtgtgtctcagatatgccacagcatagaattggtagagctgtggggtatttgctttctggaataatcacaccaatgtaaatatccttcccagtagccagctcgtcttggaaagatagactatacttgctccaagccctttctcactgttctgcccactattaatgggccatgtggcctgagctgaaatcactcctgattctcctatgactgtcaactcctaaaacttctgttatctaaattcccccagccctacatgacatctttaatatctattgagcaaatataacataattctaacagcaaccacaccaagatcctaagaaaagcagaatgtgcaagtgtctgagcagtgtagcagcagaaccagggaagctgtgatgtgccccttgtgaggtggagagagtgggtggtgcaaatgcctgtgttcagccattgggggtcatcatttctccatgtgcggagggctttgcacatcttctcagccatgatcctaataggatagaatacattactgtttgtgttagatgccaaaatgaagaaagtctctgctttctacaaccccaagagtttttttttatttgggacacagtataaagtaaaatatataaagttatgagtgttccaaaagagtatacagtttcccttacatcttttttttgtttgtttttttgaaatggagtttcgttcttgttgcccaggctggagtgcagtggtgtgatctcggctcaccgcagcctcttcctcctgggttcaagcgattttcctgccttagccttccgagtagctgggattacaggcatgcgccaccacgcccagctaattttgtatttttagtagagacggggtttatccatgttggtcaggctggtctttaactcccgacctcaggtgatcggccgacctcagcctcccaaagttctggtgttacagatgtgagccaccatgcccagcctcccttacatcttaatttaataattgctactatttactgagcacgtagagtagaatagtgtactattttagtaagggctctctgtatattatactgtggtaaaatataggtagaactgttaggatagtacctttaagagtcaggcactatcctatgggctttatgttgtgttaactcctttaatccatttaatctgtacgccaatcctccgaagaaggtactattattgcccctttttgcagatgaggcaactgagacacagaatcattaagtaacttgcccatggtcaaacaacgagtaagtgtagaaccaggatttaaacgcacaccgaagggttctggaatggaatggatctgataggctagctgattcaagctcagggcccacgtcctgtgtatttgcagcctttgtggcgagcattgcttatctggtgtctgttgaagtagctactggagcagagtgatggagaggtggcattgtgttatggtaggaaaacctggggctaggaatgaaaaatgccagtcttaggcagatcacagtaacttttctgagtcttcattttatcacctctaatatgggtattctaatgtcaatctgtgtatgtttgggtcatgttttgccatttatagagtaactttacatgttgtatcattaatctcttttgcctgccttgcagagctgttacaggatcaaatgaattatatacaggagaggcataatgaattgttgttgctttttaaaggatttgcttttctctttcagtgttgtgtttcatcaagagtgaactattaaaaaaaattcagatttccttgaatatttaaggtatagatgctgtctgttctgtaactctacgcatgatcgcctcctaccattttcatacatagttctggtacccaagtattgcatcaaatagaaattatagtcagtttcattttctgccctggcgaacaggaaatgtagtaggcacagataatccaaaataattggctagcttttggtatgcagttttgtacttaatttgagtatgtgtggctgaggattcagagcgctttaagtattgatcctctttggaagacacagcttgagattaatcatgttttttagacccttggtatcttttctaccacactcatttcattgtttccagttcaggagcccagcagagatagtagaacctccttcttccatctcctgcctttctcacacatatgccttgtggtaaaggtacaggcaggaggctgcgggagagaggggttcttttacagttaaaaaaatattttttttttacacttaagatgatggagggaacctcaaaaatttattttcttgcttgagcagtgttgacatcaacaagaggataccaggtattaaggtgtctaggcttctgaggttgagaccatcttgaggggaaatctacagttctaggagcggtcatagtcaaagcagcacaatgaaaacttattcttagcactttggactttaacagtaccactagtataaacctttgtggtctctactttgtaacccatgaggttgtgcttataccagtcaataatgcaaggctctctcagtctgtttgagctgctgtgacaaaataccataaattgagtggcttagagagaacagaaatttatttcttgcagttctggaggttgggaagttcaagatcaaggcatcatagagctagagttctggagagtaaaaataaagaaaaaaaagatcaaggcaccagcagatttggtgtttgatgagggcccactttctggttcatagaatggctctttcttgctgtgtcctcacgtggtggaacgggagaaaggggaaaggcctctggagcctcttttctttcttttcttttctgtttctttttcttttttaaagagatagggtctcattcttttacctgggctggagtgcagtggcttgatcatacctcactgtaaccttgaactcttgggctcaagtgatcctcccacctcagcctcctgagtagctaggactacgcatgtgagccatcgcacctggctaatttttgaatatttttttgtagtaatggagtcttgctgtattgcccaggccagtctccaactcctggcttcaagtgatcctcccaccttagcttcccaaagccctgggattacaggcatgagccattgtactttggcctggggcctcttttataagtgtaataaccccatttatgagggcagagcccacttgtgacctactcacctcccaaagacccaacctcctaatactattacactagtgattaggtttcagcgtatgaattgaggggaaaaatttgtctttactgtttcttttcatgatggcagcctttctcttgagcttgttgttacaagtgtgatgttcaaaacaagggaagctcatgatattgccctgccttgtgctgggcagacctctctttcttgttatgtttggttctgaatacttcactttgatgtgtagtatcaacctggagtgtgatctaaagaaagggccagaatagtaaggggagttaatcattaaagtggaggttggcggaactagaaaacggaagacttgcagaggaaaggttgcttataataggaatacgcaaatttctgaaaggctcttttagcacagaggaaatagaattatgactgttggtgaaaataaccagtttttgagggcctactctgttgagatgttgtactaggcgcttgctctatgttgcatatattgcagggcacataccatctctctctagcagatgatgaaactgagactcagaggtgtggtcatgttcaaggccgcatggttattaagtcctgttgcaattaaaactaaggtctgtctaattcccaagcctgttagccatcagtttgtaccaattcccagtggacagagatcacagggagacagacctcaggcagcaggagggagatgctaaccattccagctgttctgtgtaccctggagaggaggcctttaagcagaacataaagcatccctcactcgggctgccataaagagagatttttttttttttttttttttggagatggagtttcactgttgttgcccagcctggagtgcaatggcttgatctcagctccccacaacctccgcctcctgtgttcaagcgattctcctgcctcagcctcctgagtagctgggattacaggcatgcaccaccacgcctggctaattttgtatttttagtagagacggggtttctccatgttggtcaggctggtctccaactcccaacctaagatgatccacccacctcggcctcccaaagtgctgggattacaggcgtgagccaccgcacctggcctaagagagttatgttggaaagatgaactttaaagttgtattcctctgcttctcttcctgtgtaatcttctgagctcccttccaggtccaggccaggctattcctgattcctgcctttttgttctcagtgatccttgcttggttctgagaacccatttccagccctacctttagtgaggtaccatcatgtagggattatttggataatttctgtccttaagcaaaatgaattttgtatagaggctcttacttatattcttttttaaagttgtggtccagcaaaataacgatcgtgtggcatctatggcaccatcgtaaaggctccttgaattgtgctaaacataaacataacctgaggtaccctgtgctctacaagtttgaatcactcttttaccagtctgttgtatagccactgattttagatgcctaggtggctgctctttgatgaaaataccaatgcaggtcttgtggtagggaaggggagtatacagtccctgggctgtacaacagaacttttttttttttttttttttttttttttgagacagagtctcgctctgttgcccaggctggagtgcagtggcacagtgtcagctcactgcagcctccgcctcctgggttcaagtgattcttgtgccacagcctcccaagtggctgggattacagatgctcgccaccatgcctggctaatttttgtatttttagtagagatggggtttcaccatgctggccaggccagtctcaaactcctgacctcaggtgatctgcccgccccagcctcccaaaatgctagaattacaggtgtgaactattgtgcccggcattgtacaaccgaactttaacaacagttgctcagatgatgatggggataaagagttgggaaagagcacatcttcttgaaatgcttgctggaatatgcttacttcttaaaagattatagagaatattgattcttccccaagaaattgacagattcatgttttacataatgatatttgattgtataaagtaattatgctgattttaaaatgtgaaaacattgaatatatttgtaattttttgttaataaagtgcataatttttttttgtagtttattcacctcgatgatgattgcgtaacagaactttctgtacatcacagaaacaacaggcaaacaatggaggatttaatttcactggtaagaaatacagcatgggctgggcgcagtggctcacgcctgtaatccaaacactttgggaggccgaggtgggaggatcacttgaggtcaggagttcgagaccagcctggccaatgtggtgaaaccccatctctactgaaaatacaaaaattagccaggtgtggtggcacgtgcctgtaatcccagctacttgggaggctgaggcacgagaatcacttgaacccgggaggcagaggttgcagtgagctgagatcacaccactgcactccagcctgggcaacaagagctaaactccatctcaaaaaaagaaaaagaaaaaaaatacagcaccaatttgagagtagtatcttttgtttcattgttctttattttatcagtacatgaaaaatagtatagcattttcagacctgtgattttattatgggtacaaatattgcatttaaaaaatatttacatatgatttccacacagtcctgatgtgtgctagatatcttctttaaaaatgaacactccatacttaaaacattgatgaagaagaattacagtgaaaaaataattaagaaacaactggccgggcacggtggctcacgcctgtaatcccagcactttcggaggctgaggtgggcggatcacgaggtcaggagatcgagaccatcctggctaacacagtgaaaccccgtctctactaaaaatacaaaaaattagccgggcgttgtagcagatgcctgtagtctcagctacttgggaggctgaggcaggagaatggtgtgaacctgggaggcggagtttgcagtgagccaagatcacgccactgcactccagcctgggcgacagagtgagactccatctcaaaaaaaaaaaaaaaagaaaagaaacaacaaactagtgcacaaagaatggacagagttctaattttgactactttaaagttctctaacatgcaactgggtttctgctgtggaaatgaggtaaacacaaagcaattttcttttcacctgaaagcaacagcagcgtcacgtcacccctaagtggacaaaccaaataccatgaaagcattatcatgatttctggtgttggattattttggctctttcagatgctcagtctctagatcatacctgtgttttgtgtgtgtgtgtgtgtgtgtgtgtgtgtgtgtgtgtgtgtgttttaagagatcaaggcagtcacagctgtctctaatgtgaagggtgacttgtacctcactttgttcctggcccagtactatgtcttctatcacctgtgatttatgtttgctttatctgttctttaacttgcaaggtggagtccttaagcaatttttttaaaaaattaaacaaagctttgctaaggcacaattcttttcagtaaggagaaaatataaaggaattc

SEQ ID NO: 58 - DNA, 180654 bp, Homo sapiens
gaattcctcgcattatctgcagcaatcagtcttgttcagcacagaggaggcttgattttaaagctaaacaaatttgcattttggaatgcaaccaaagctaggcacggtgcctcacgcctgtaatcccagcactttgggaggctgaggcgggcggatcacttgaggtcaggagttcgagaccagcctgtccaacatggtgaaaccctgtctctactaaaaatacaaaaattagccgggtgtcatagtgggtgcctgtaatcccagctactcgggaggctgaggcaggagaatcacttgaacccgggaggtggagtttgcagtgagctgagatcataccactgcactccagcctgggcgacagaatgagactctgtctcaaaagaaaaaaaaagaatacaaccagaaaaaaaaaatccgttattaaatattcaaaaaccacataaacttttagaagccccactctgcagggaataaacacaacattgctcaagaaggaatgaggttgtaagctgtagcgatcctggactattctggcaggcagatttctaatgtatgctttccacgaataaaagcaatatgaaagcacattaactgtttataaccgtgtcagtcctgacctgtgcattaagaagcttgtactgtatttggaacttggttttgaacaacagcgcctcctggtgtaaatgtcatgcataaatactttactagcatagtggcaatattctaatagaaatattgctgctctgatacttttttacttaaaaagcaagttaaaaacatgttttgggatgaggaaagtgatatggaggacttgtttaggttttatgtagtacagcattagggatattgataaagctgtcatttaagatgataaaaattcatctgcccttgcattgtacagctgtacttctataaagtgtcacagagtggggtctaccacttatttttttaatgaaatttatagccgggtgcggtggctcatgcctgtaatctcagcactttgggagtccgaggcgggcagatcacctgaggaattcgaaaccagcctgaccaaccaacatggagaaaccctgtctctactaaaaatacaaaaaaaaattagccgggcatggtggcgcatgcctgtagttccagctacttgggaggctgaggcaggagaatcacttgaacctggaaggcggacactgcagtgagtcgagatcgcgccactgcacttcagcctgggcaacaagagcaaaactcaaaaaaaaaagtttataaaatgatacagaagattgaacaatgaatttctcaaattgaaccatttgtgtaaccaagcacgtagatcaacaaataaaaaatgactgacagcccagatgcctcctcatgccctgaactcctgtaggtcacgactgcctggctagggtaatcacggtcacgtcttctcacatcacagatcaattctgcttgttgatatttctatgactggaacaatttgtaagaatattctcacaagtatattgaataagacacaagagtgtgttcttttggatcttattcaatacattagcaacatttacccatgttgcttggtgtagttggttttctctttgctgtataaaaaccattgtaaagctcaaccataatttatcatcagtcctatggtcgataaacatttggattgtttccagggttgggcttttatagcctgctatgaacattattgtacatgccttttggtgcccatatgcatgcattttattaggaatatacctagaagaagaatgactgggttatagcgcatgaactttagtagacaatgccaaccagttgtctaaattggttgttccaatttatattaccatcaacagcagatgagaatttcagtttgcttcacatcctcaccaacatatggtattgttaatctttctaattatagatattttctggtgggtatatgtcatcgtactttttaaaagcagctttattaagacacagttcaattatagataattgcaccatacaattgatccacttactgtgtacaattcagtggcttccagtatacttggagttgtcatccatcaccataatcaattttagaacattttcattaccccccaaataaactttatagcctttcattatcaccctcaactccaccatcccctcagctctagtctaccactgatctattaatactttctctgtagagttgccaattcttaacatttcatataaacagaatcatacaggccaggcacggtggctcacgcctgtaatcccagcactttgggaggccgaggctagcagatcacaaggtcaggagatcgagaccatcctggctaacacggtgaaaccctgtctctactaaaaatacaaaaaattagctgggtgtggtggcgacgcctgtaatcccagctactagggaggctgaggcaggagagtggcgtgaacccgggaggcggagcttgcagtgagcagagatcgcgccactgcactccagcctgggcgacagagcgagactctgtctcaaaaaataataaaataaaaataaacagaatcatacaataagtggccttttgtgtctggctgctttcacttagcatgtcttcaaggttcactagattttgattctccatgtgggacacaggttgtaggcttcctattccctttaagctcatctatctgatgatacatttcatagtgaatttatcttcatggacctaccaggaagcagtgctactctaaatcaatctgtgagagcatgactgaggtttatctttgactgcaggaatgagtgagctttgttaacattttctaggccaaattattttggccatcctttatgatgagacattctgaagtctcaagttcatttgttggaacagatccaaatgatttattgagttgaaacaaatctggctattttttgagaggggttttcgctcttgttgcccaggctggagtgcaatggcacaatcttggtcatcacaacctccacctcccgggctcaagtgattctcctacctcagcctcccgagtagctgggattacaggcatgtgccacgatgcctgactaattttgtatttttagtagagatgggatttctccatgttggtcaggctggtctcaaactcccaacctcaggtgatctgcttgcctcggcctcccaaaatgctgggatttcagggatgagccaccgtacccggcctgaattgggcttttctttcaagtatccctacagccgatcttattgctgacatctatgtagaggcatgggaacttccacccagctgaagaagatacacacgtgggaggtggccatgtgaagacagaagcagagattggagttatgtctacaagccaagataagccaagggttgctagcagccatcagaaactaggaaaggcatggaatgaattctcccccagagccatcacagaaaaccaactctgccaacatcttgacttttaacttgtggcctcaactatgagagaataactttgctttaagccatcacatttgtggtaacttgttatggcagcactaagaaatgaatacactaaagacctgatttcaaagctgcctggcataagctggtgctcaataaaagctcgcggagctgagttaggttgtgaatattccttagcaaggacctggacctctctttgtgtgtgttgaacaagaataactgaacgtgagctctttttcctgatttgtttccctaactaaaatttagtagcttggatcagagagatggtcccagtttcctgtagatcttctggaattagagtaaatgtgacctattttcctctttaatggcatcaaggctggggcattctgagtgtgaatcaccatggatagtgacacattttttattggcaaggggaccggccttattttggtagatgagttgttattttcctctgattcagcttaagtttagtactgatgtccaaaagcagaaaaggagaaaaagagccaattaggatgtctggataccatactgcttacactgactacagaaatgtctatcatactagggttaagtttgaactatcagaaatctgcctcagcacacatttggagaatttttttttttttaaagacagggcctcactctgtcatccaggctggagtgcagtggcatgatcagagctcactgcagcctccacctcctgggctcaggcaattctcctgcctcagcctccctagtagcctggactacagatgtgcaccatcacgtccggctttttttttttttttggtattttttgtagagatgaggtttcgccatgttgaccagcctggtctcaaactcctgagctcaagccatcagccagactcagcctctcaaagtgctgagattacaggtgtgagccaccacacccaactggagaactcttcaccagaagatatacaataaccaccttatttagccagactagtgggtcctggcagactcctaggtgtggaccattggttattaaccagtcaccatgtattgttcccatgtgtagaccaagaactagacatttgaaggggatgtggatttcttcttcctgaacaagtcacttcttctatatagtgggaaaacatccaaactaattctaccacatattttcagattataaggtgacattcaatattcctggctgtcactatgtttttcccttgttccttttcctatatttcctgccaaattaggagacagagatacatgaaaaggtcaagagtatgtgtgctgtagagtatctcaagaggaatccaccccatctcaaagtggggctcaagtttcctacccccaattctttggaatgctgaattttatgaggatcaaattatttttttttttgagacggagtctcactctgttgcccagactggagtgcagtgacatgatcttggctcactgcaacctctgcctcctgggttcaagtgattctcctgcctcagcctcccgagtagctgggattacagtaggcatctgctacctcgcccggctttttcttttttttgagatggagtctcgctgggtcaccaggctggagtgcagtggtgcgatctcagctcactgcaacctctacctcctgggttcaaatgattctcctgcctcagcctcccaagtagctgggactacagacatgcgccaccacacccagcaaatttttatatttttagtagagacagggtttcaccatgtttgccaggatggtctcgatctcttgaccgcatgatccgcctgccttggcctcccaaagtgttgggattacaggcgtgagccaccatgcccagccctttttttttttttttgtatgtttagtagagatggggtttcaccatgttggctaggctggtcttgaactcctggcctcaagtgatccacccaccttggcctccaaagtactgggattacagacgggagccactgtgcctggcccaattattttaaatagctgtgaattcaagcaaatatatctgaagatttactgacaaacaaggagctttgttcttgaatctatggcagcttcagagaaattaagactgctttaaaaatgagtattttctaatgtattgtagcaacaaaagttacattcaactatatatagaataaaatgttttaaaatcatactgtagtttgttaaggcatacaataatagaaagtcatcttgggatctcacgagtaacgttcaactctttagaaaccaggttaactctgcatagttctggtctagacctgtgccatctaacttggccactatgcacgtgtggctactgagcatttgaaatgtggctggtccaaactgagatgcatcatcaatgtaacatacacactggatttcaaagacttggtatgagaaaatataaagtatcttaatattacagtagaaatattttggcatattggactgaatattaaaaataatttcaactgtttttaatgtggctcacaaaatttaaaatcatgtggctaattacactttattgaacggccttgttcatccagttcattaaagtgtacaagagagctgaaacattggctgtgtgatgtgatcccattcataagaatctcatcctcccggccaggcgcagtggctcatgcctgtaaccccagcactttgggaggctgaggcgggtgaatcacctgaggtcaggagtttgagaccagcctggccaacatggcaaaaccccgtctttactaaaaatacaaaaattagatgggtgttgtggcacatactttgaatcccagctactcgggaggctgaagcaggagaatcacttgaacccaggagacagaggttgccgtgagccgagatcacgtcactgcactccagcctgggggacagagcaggggaaaaaaacaaaacaaaacaaaaaacacaactcttttctagggagtgactcaggccgccactacccaagcagacgaagagagctggcttttatatatgcttctgcatggaaaggccacatagcctatgcttacaggcccttggccagaaccatgcccctccatgacttatgtaagtagggtgacttgggatagtgcatgggtacttagcagtaaatgcctctgtcataagacatggtgttaagttttgggtttcttgaaacattcaaagttaaacacaagtactcttctacgtatgttggaaaaaggagggaataaaatcaggatgtggtcacttctgtcagaggagtactggagccagtcaagagggtaaaatcttaattaacaaagcctatgtagattgtttatatttccttccttttttagtcaaaggaaaactattatacaaacatatatggaaaatgacaagcagaggctcctccttccatattatgttgacagtaagttgtatataaactgtagctaatgtggacaaatctaaatagttgtctattgcagtcttgtagaaagaactctagttgaattctagttacctacgttatcttttttttttttttaccgccttcccaagatggagtcttgctgtcacccaggctggagtgcagtggcacgatcttggctcaccgcaacctacgcctccctggttcaagtgattctcccgcctcagcctcccaagtagctgggattacagacatgtgccaccatgcctggctaatttttgtatttttagtgagacagggtttcaccaggttggccaggctggtcttgaactcctgacctcatgatccgcccaactcagcctcccaaagtgccaggactacaggtgtgagccaccacacccagccttttattttttatttttcctgaagagacagggtcttcttgctattgcccaggctggagtgcagtggcacaaatatagctcactgtaacctcaaattcctgggctcaagtgatcctccaacctcagacttctaagtagctaggactataggtgtgcgccaccaggcccagctaatttttaaaacatttttgtagagatgggggtctcactatgttgccaggctctacttatgtatctctactgttcaatatgcatataccatgtttggctatactctttctgctatgttcttggcctttataaaaatataaatatggccgggcgcggtggctcacgcctataatcccagcactttgggaggctgaggtgggtggatcacgaggtcaggagttcaagaccagcctggccaaaatggtgaaaccctgtctctactaaaaatacaaaaattagccaggcacagtggcgggatcccagctacttgggagactgaggcaggagaatcgcttgaaccagggctgcagaggttacagtgagctgagattgagcaccccagcatgggtgacagagtgagattctgtctcaaaaaaaaaaaaaaaaaaaaatatatatatatatatatatataaaatatataaatatgtaccatatgttacaacgctagttacttttgcatttctaagttgtttacacaaatgcagaaatacagaatctggcagccagtaattcaacccagctctatcttcctgctgctatctatctctccatccccatgcatatacaacccttccccatccctaacacagtgacatgaaacacaacagatgttttaagtgtacatcatacatttattaccaacaaccctctcaactccaaaattgggcacagggattaaaaataaaaattcattgcactacttagtaaagcattactagtaactttcataaaaaatgtacaaactttgttaaaaatttatcaagccttcaaatgatttggttacagatatttataatacatacatttaaaactatatgttaactgatacaatggaatatgatttgagaaaatgactcagcaaatgattccaaaaaacacccctgtgagctttcacaatctgaaacggcaaaatgaggtaaccaaatgtaccaacagggggacaaacaaacagctttctaatgaaaaggcccaaagataatctgtgaaaaatattctcacaagtgagtcggtagatctcattcaaaattattctaagaggcccaaatttaagaatcttaacaaatcacatttcagatagtatataaaatctaaatatgctttcacattttccagattttgctcaaaaaattaaggacagaaaatcctaatatgagatcttgatacctggaggccttatttttttgaggggctgggggttaaaaaaacaccaaagatgacaattcatgccaaaaaacaaacaagaacccacaaaaaacccacagctgagttaagatggtaaagccaatattattttaggaggaaagaggacgaaggccaatgaaccaacatctgcctgctatctggtgcatcacccaaggtgaccaatggctgggcacaaataaacttctcttttgctagccacagagttgctcactgtggcaagcctgagctggtcagaacacctgtgtgtgtgttcctgatacacactaaccacaataagcaagtctgcacacatctctatgagccccatgcaaagacaagacattcccaaagatcagtcactagagtgcaacaacgaaattcaagatttgaccaaaacagaccctgctgcctcctaaattgccaattgcctctcaaaaacttacagaaaaagggacattataagaattcatagagggagagaagaaaaagctgctactcctagtcattagtacaatgtgctgtgttaattagatacctctatataaattagaaaaagtgctttacttgcatgcttcaataaaatgaatactgagtgtcgtagtgttagatctgtacagatataaattttttgcagctatataaaagtgtataagatgggcttttgccattttaaacatgattttttttcattaaaaaagattaaactatatgtgatttgtatgtagctgattattatgccaagaattttggtctttaacacactttttattcatcaggaacaggtgagggatatcctaatgatttaaaagtaacatgtgcattaaccatgtgcatttttaccactatttagaagtatttctgatgcactgacaaccctaggggcaaacacagtatgcaaaaccctacttgtaggactagatagaggcaacaatgtctcgcaaagggcaaaattgtgcttctgtgaattgactttacttaactctaggctgtgatgagcttatagacacttcaagggagggcaagcagcatggcagtaacaagtagttaacactgaatggaaaactgacacagagccaactgaaagttgagtggggctggcagcaagttatcacagtcctgactggaataatgcagcttgtgctattgcaaacaaagcaattacatcaactgcaggaagaggcagacaatgttgaatacactaaaagaatgagaaagtaatttaaacattgctggaaaaatgactttaaagtgaattatgctcaaagaacttactaaaaaaaaccccatacagctatgtattacatcaactaaatgaaggtcaactcctgtttaacagcattatttttttatacaaaaaccaaatcttcatttatactgcaagtattctggacacctgttgtattaaacttttctcattcaaacaaaaattaaaaggaaaggcagtaaaatatcaaaacaaatcaggtctaaggaacatgagctgtaacagcacttgatccatcctgaaaccagggtttcgatgagaagcacgtgtgatgaaggaagaactagacaactttcagaattggagtctggcaagtgaattaatatgaacagaaatagagttttcttaaaacaattgagttgcccacaggagcttgaacacagaacacatatgagaagtcaagctgaattaacaggttttgttctggtggaagtcaacaaggtgagacttcatgggactagtggtcttcttagaaatatattaatcaaatatcttcagaatagactagactacaaatctaaacattaaaaaaaatcacaggtactttctgtaagaaacttactggaaatgtaaaggaaaaaaaagtatcaacattcaaatcactgattgaaatgctaatattgctaactgatgatatatgatattgcaccttctttttggaaacagcaagttggagatttaaaaatttccacaacagaataaaaaaaaaccaggttcatggagcgagaatttgttacacttttttttcttaagtgacccacttaggaccaccaataaagagaaggtgacagctgcctgaagcaaaggaagaaggcttttctcattccattcactgggagggaaggggatggagtattcaatgcttgtaattgatgcaccctcagcaatcagtgtgcaacagcaaacacaagggaaaaaaaccagtgtacagtactagtgctgtttaaataacacaccagattatacattgcagcataattaaaactacacacacattcttggtacatgctggtatataggatctcatacacacgttagctaccatgccctcacacaagtagttgcacacactcacacagatacacttatcaccaacagtcatacgctgcgcattcatttccactcacagtttctgaaggctctatataaggtagattgctatatcatctgtagctaccactttttataaaagcacatgctaaaagatcacgtccactgtaatcttgcagcaacactcggaatgatcacacaaaaaccagggaatgttagtgcacacacaaaattaagctaaagaaaaagtctttggagttccaatcacacggttagtataacaatcccataactgtgaagactaattgtaagcttttatagttgattaagtcacacagtgcaaagaaaggtccattgacccttttggtaaagggagggctggaagccacacagattaagttcaatggatagtccgtatatacatgtgatgaggaacacccaaactaaatttgtgcttcttaggttggtcattctgaatcccgatgcacttctgaagcatcagctcggcaaattgggcaagtacgatttgcctacaaaacaaaaaggaaaacttgtttaaattgtgacacatacaatgaaacacattcaaagcaatggaactacttttacttcccacagtttttacattctttcttcctctgaagaggtacaaagcaatttttgcctttttttaacccataaacctccgaattagcccaggaattttttttttgagatggagtttcgctcttgttgcccaggctggagtgcaatggcacgatctcaactcactgcaaccactgcctcctgggttcaagcgattctcccgtctcagcctcccgagcagctgagattacaggtgcccaccaccatgcctggctaatttttgtattttagtagagacggggtttcaccatgttggtcaggctggtctcaaactcctgacctcgggtgatccacccaccatggcctcccaaggtgctgggattacaggcgtgagccactgcgcctggccgccatgaatgatttttagtaggtctgttaaaatatataaacaagattaccattgaccagtttggaccaagttaacaactgacattaaagtaaaagcttggttagtctttttttcccccgttttttgagacagggttaaaccctgttgcccacaggagcacagtggcatgactacagctcactacagacttgaactcctgggcctaagtgatcctcctgcttcagcttcctgaaaacctaggattaacaggtgtgtgccaccacacccaaccaatttaaaagacgggtttcactaagttgcccaggctggtctcaaactccaggcctcaaatgatcctcctgcctttgcctcccaaaatgttgggattacatgcctgagtcaccattcctggccccttggctattcttaatggaatgaagtcacagaaaacatttagtggtaccgaggaaagcttgattgtaaaataggtgactgactctatactgatagctctacttactcacctgttccctggctcctaaatttgctttctccatttcaacaaatgggaccataatttgtggagttgctaatgccagacacataagcatcacctgctctcctacttcctacaaccccattattcagcacataatcttatttctgcattacagtaattctcaaatcagtccctcttttcatctagttgctactatccattctctggcccaccatgtctttattctatctccctgtctctcagaaattacctcttttattagaacagtggccagaaatccttctataaaacagtctgttatatacttcccaaatgctttcaggatcacactaaactcctttacgcttcagagtggcttcacaacaagccgctcattgattttatctctgaacaccttttcttttcccactcttcctcacattccaactatcagccacacggaacttgtggttttctgattctctgtccgcacgtgtcagggatttacacatataatgctttccttttaaaataatttaagactctttgtcttcaggattgagtttgggctaaactagatctctggaactgtgctccctcagaactgactttatcttcctcaccaaatagtaaggttatctagttttatccaaaccggaacacttaatttaaaaaataacataaatttgactatattttttttatatagtcatggagccactgcacccagcctattaaaattcttttactgtatcacattttactgtatcacaatttgagactatgaaactatgaagagtaaaaaagcagcttttgtaaacttttttttttaaacattaaatagccaggtgcagtatataatcccaacactttgggaggctgaggtgggaggattgcttgggcccaagagttccagaccagtctgggcaacatagtgacacccagtctcgcttgagcctgggatgtcaaggctacattgagccatgactgtaccgctgcactccagactgggtgacacactgagaccctgtttcaaaatatatatatatatatatatatatatatatatatatatatatatatatatatatatatatatatatatatataaagaagcccctgcaataatttcactctggcatagccactcttaggatttgtgtcctttgtgcttttgttcatatatacaaaggagaaaatggtcagaattaaataaaaacactagatgtatttttctccatgctaacctctgaaaatagagctataattaggtagccttctaaactctcaaactgtggcctagcaagttcgggccttgtccctatataccatgaaaaaggacatactgattgtcaagaggtcatccattttggattttgtatagtcactcctatgttgttgactgcagttaatttttactggccttttctcatttgcagagatcatactgaaagctgtgtttccattttgtcttccttcctgtccactgagctatgaacttactctaatccatggtcaataaaatagaaaattcaatgtcatttcctttaaagatgtcatcactttaccttaagccatttgtcaacacacttggcatggaactcgtggttacagggtaagactctaagtagctgccttgactcaaaatcacacatgcatactacacacctaaaaaaagcaaaaagatcatttaaccacaaaaccagatggttttctattgttatgactactgaaacctacaagataatttattctgttatcaaaacgtcacttaaatttttaaacaaaattatcaaccaataccctgaaaaaattgtgatgttaaggcagtaagagttttgctttgctgacagattagcaagaaaatttctagttaacatcaagtcaatcttaataccaaagattctatactatttaaaaaaaaatggtattagaactggatgtccacatacaaaagaataaaggtggacccctacctcataccatatataaaaactgactcaaatggatcaaaagcttaagtgttaagagctgatctattaacctcttagaagaaaacacagtaaattttcatgaccttggattagacaatggtttcttggagatgacattaaaagcacaagaattaacaagaaaaaaagaaatgcagttgttcttcagtatttgagggggattgatttctaggacctgcaatggatactaaaatctgcagatgttcaaatcctttatatacaatggtatagtatttgtgacctatgcacaccctcccatatgctttaaaatcatcactataatacttaatacaatgtaagtgctatgtaaatagttgttatactgtattgttctttatttgtactatgtattgctctattgttattttctatttttattttttcctgaatattttcaatctttggttggttgaatacagagggcttagtgtaggctgaaataaaccaaaatcaaaatttaaacattttgtgcttcaaaggacatcactgaaaaactcaacaatccacagaatggcaaaacattttttttacactttttattattctattcctcagagatccctgttctgagagaagacatttttgaagataatttatctggtgagatctataatatgtataaaacctctacaactcaataatacaaagacaaaccaatttatggaaaatgaagcaaggatcagaatagacatttctggaaagaaggtacacaaatggctagtagcacatgaaaacacactcaagatcattagccatcagggaaatgcaaatcaaatctgcaggaaataccacttcacaatcactagactggctataataaaaaaaaatagacaatatagagtgattcaaagccattatttagctttggcattattcaatcccaaagtggaaacccaaatgtccatccatcgacgaaaaaaaaatatgatctatacaatggaatattatttggccataaaaagaaatgacttaccagtaaaagctacaatatagaaaaagttatgctaagtgaaagatgctagacacaaaaagaccctatattgtatgaccccatttatgtgtaatctatatagacacagtgtagactggggatggggaggaggcaccaaggtgaggtagaaatatgacgagtgttgccagtgggtgaggggttttgttttagggtgatgcaatgggtctaaatttgattgtggtgatagttacacagctctatgaatatacaaaaaaccactgaattgtactttttaaattattattatttttgagatggagtcttgctctgtcacccaggctggagtgcagtggtgtgatctcggctcactgcaacctccacctcctgggctcaagcaattctccctgcctcagcctttcgagtagctgggattacaggtgcctgccaccatgtccagctaatttttgtatttttagtagagacagggttttgccatgttggccaggctggtctcaagctcctgaccataggtgatccactcgcctcagcctcccagagtgctgggattacatgtgtgagccactgcgcccggcctgaattgtacattttaaatgagtggaattttatggtatgtaaattatatatcaataaagctatttttaaaagatcccatattaagcagaaattttaggtaagaacctcaaaactttatgtgcatgaattttcaatcttgtgtgaaaacaaacattctagaatgtgaattagaaacaaaattgctaagcaacataaaaatccagaacagccctaacagaactttctaagatgacagaaatgttctacatccataccacccaacacagcagctattagctagtacgactaagacatttaatttttaatttaattagctctacattgacttactggacaagcactggtttagactatgaaataaagataacttatctttatcaaagttatctctgactcctaagcattttctttcaattttttatttcctctcccaacttttaccttaatgactcttaagcttttatttcataaaggtagaaaaggaaatttagcagtgatgtcagaaaaatttacttacaaagtctgttctgactggtggttgttaggattgaaccgataagaaggaagttgttcaatatctgctttagtcagtccacgaggctttgcctctcccagtcgctctgccaggtttaacagggcctgcagcggtaaaagacgacatattttcatctatctttacattttgcattccaatactttttttttttaagagatggagtcctgctatgttgcccaggctagagtatagcggctgttcacaggcatgatcattgtgcactgtggcctcgaactcctgacctcatgcaatactcttgcctcagccttctgagtatctggagctacaattgcgtaccactgcagccctattaaaataattttttaaatgtttcttatgaaaaaatctaaacacatacaaaaggagaaaagtaacattaatgaaccttgatctatccattacgcaggtcaatagtccatggctaatcttttacctattacaatctatcctaaacctcaccttattttaaaacaaaactgaaagatggtatcatttcatttgtatcaagtgcatctgtaaaacaaagttagtaactttgaccctgtgagctggataattctttgttgtcggggctggcctggggactacaggatgttttgcagcattcctggcctccctctactctcagtgccagttaacaccccctagctgtaacaaccaaaaatgtttccacacattcccaaatatcccctaggggacaaactgtccccaggttgagaatcgctgctctaaaaagatagactttttagaatataaccacaatgacatcatcacacctaaaatattaacactaattctttaacatcaaatgaccaattaacgttcaaatgtctttgttttcaattcaaaactttaaaaagtagtttgttcaaataaggatccaaacaaatccgtaacttaccatggcctaatatgtctcaagactctttttcactcttaaatttgaagaaaccaggttaatgagctgtagaaattcccagtttgaaatctgctaaatgaacctcccatccctgacccactgggtttaacaaatcccttgcccccttgtcctataaatagggagatgtgaatacttataccataagacccatcgtgtccactggttatgttagcagccaatgatggaatactgtcaagatccattaattcattaaaaatggcaaaacagtaatattcttattttatcattcttcatttattagaatacctcatattaaacaatactcagaataatttaggtagaataggataaatgagaccacctaatttcttttatgaagtatccaccatcaactcatgaactttaacatatttgatgtgtttcaatactgtaattattatgcccttttttttgagtcagagtcttgcttcatcctccaggctgaagtgcaatggcatgatcttggttaactgcaacctctgcctcccaggttcaggcgattctcttgcctcctcctcctgagtagctgcccagctaattttttgtattttttattttttagtagagacagggttttgccacgttgaccaggctgggcttaaactcctgacatcaagtgatccacctgccttggcctcccaaagtgctgggactacaggagtgagccactatgcccagccaattattatgcttattgattttacaccagtacctcctttccttaatgactctaataactcatttggtttatctcgcaattagtctgccttttgtggactgcttttctccattttttcaggttgcccagggttaacagaatgggtaacaaataatgacagatgagagaaacagaaataaattccccaaatgtcaacagttaatgtaataactgtgtgttttattatgatactacaactttgcttctgtgtcaacattatttagataattgcgtcatctaaataatttgttcccctttcactagctccccagcccttctaaatgctggaatagaaagtaaattgccaggccacacatggtggctcaagcctgtaatcccagcactttgggaggctaaggcaggcagatcacttgaggtcaggcatttgagacccacctggtcaacacggtgaaaccccgtctctactaaaattacaaaaaaattagacaggcatggtggcgtgcacctgtaatctcagctacttggaagactaagggaggagaatcactagaacccgggaggcagaggttgcagtgagccgagactgcaccattgcactccaagcctgggcgacaaagggagactccatctcgggggggggggggggggggggggggggggaagtaaattgccaaattgatggtgattacaatatataaaatttagataaaatttatgatatcattgataatgatcttttatatctcttagtacacaaaggtcaacaaatacaatttgtgacagaatatgttaagttcttacagtataaagactacacaggcatatttcactttactgcgctttgctttactgcatgccacagatacgacctttttaaaacaaaaacaaaaaattgaaggtgtgtggccaccccatattgagcaaatctattaattcaatttttccaacagtcatgtagtcatttcatatcctggtgtcacattttggtaattctcacagcatttcaaactttttcatatctgctataatgatctctgatctttgacgttactattgcacttgttttgtggtaccacaaactgtacttgtataagacagaaaacttaattgataaatgttgggtattctgactactccactgaacgactggctattcgcccatctctctccgtctcctgcggtattcctagtctctgagacacaacaatattgaagttatgccaattaataaccccacaatggcctctaattgttcaagtgaaaggaagagtcacatgtgtctcactttaaaaactagaaatgattaggccgggcacagtggctcatgcctgtaatcccagcactttgggaggctgagcgggtggatcatgagatcaggagatcgagaccatcctggctaacacggtgaaaccccgtctctactaaaaatacaaaaaatgagccggtcatggtggcgggcgcctgtagtcctacctactcgggaggctgaggcgggagaatgacgtgaacccaggaggcggagcttgcagtgagccgagattgcgccacggcactccagcctgggcaacagagtgagattccgtctcaaaaaaacaaaacaaaaactagaaatgattaagcttagtaagaaaggcatgtcaaagcggagacaggccaaaatgtaggcctcttgcaccaaaccagtaaccatgttctaaaggcaaaggcaaagttcgaatagaaaaagtgccattctcattgggcacagtggctcatgactgtaatcccaacacttggactagccttggatggcaaaaccttatctctgaaagaaaaaaaaaaaaatccacaaaaattagccaagtgtggtggcatgtatctactgtcccagctacttaggaggctgaggtgggagaatcgcttgagcctgggaggttgaggctgtactgagcggagttcgtggcaatacactccagcctgggtgacagagtaagaccctgtctcaaacaaaacaaacaaacaaacaaaaagaaaacagaaaagtcactccagtgaacgcacgaataagaaagcaaagcagccatattgctgatatggagaaagtctgagtgatacagatagaaaatccaaccagccacaacattctctttagccaaaacctaatccagaacaaggtcctttaattctatcaatgttgagagaggtgaggaagctgcagaagaaaagttggaagctagcaaaggctggttcatcaagtataaggaaagaagccatctttataacaacgaagtgcaaggtgatgctggaaatgctgatacagaagctgtagcaagttacccagaagctctatctaagatcattgatgaaagtgaatacactaaacaatggattttcaatgtagacggaacagccctatattggaagaggatgccatctaagattttcatagctagaaagaaaaggcggcagtgcctggcttcaaagaacaggctgactctttttggggggataacacagctggtgactgtaggctgaagccaataatcatctgccattctgtgggcccttaagaaattatgctaaatctacactgcccaataataaagcctggatgacaaaacgtctgtttacagtatggtttatggaacattttaagacaacttgagacttgttcaagagaaaaagattcctttcaaaatattactgctcaagtgctctgatgaagatgtacaaagagatgaatctggttttcctgcctgctaacacaacattcactctgcagcccatggaataaaggattctcttttctctagattcttgccaatacttactgactttttgaaaacagccatcctaacaggtatgaagtgatattttattgtggttttgatttacatttccctgattgcaatgttgagcaccttttcatatacctggttggacattttgtgtcttctttgagaaatgtctattcaggtcctccacccattttttttaaattgggttattcattttttttgctactgagttgtgtaagttccttgaatattttaaatattaaccccttatcagatgtttttcatattttctcccaacctgtagtctgcctttcattctgctgtttctttcttttgcggtacagaagccttttagttcaatgtagtcctagttatttattttagcttttgttgcctatgcttgtggtgtgatggccaaaaaaccaatgccatggccaatatcgaggagcttttcccctgttttctttcagcacttttatcatttcaggtagtaagtttaggtctttaatctattttgagttaactttcacgtatggtgtaaaggtccagtttcattcttttgcaggtgggtatccagttttcccaacatttcttttttctttttcagacagtcttgctctgtcactcagcccggagtacaatggtgtgatcttggctcactgcagcctccccctcccgagtagctgggattacaggcacccgccaccacgcctcgctaattttagtatttttatagaaacggggtttcaccatgttggccaggctggcctcgaactcctgacctcaggtgatttacccgccttggcctcccaaaatgctgggattacagggtgagccactgcgctcagcctcccaacaccatttcttaaagaggctatccttcccccattgtgttttcttgggtgccttgtcaaaaactggttgactgttgtgttcctttctattcgcagttcctaaggttcagaacatgcatggtcttataatttattgccttacctattacaacatctaaatgggtttccttgtcaccattttctaaccactcccatcgattacttcacagtagtggcagagtttggactcttcacaagtactgatgccataaagcaccaaaaacatttagtggctccttcctcctccacaatattcaaaatcatgtccactctgtagcaagcactgaaggacaaccaattgagcttttcaatcaactgccgattttctcccttttatgttaaccacagaccatctgttgattctcaagaatgtctagcccttctctgcctaaatcttaaagatgaaaagcttatacattatttaagatctagctcaaacattttggcttccacaaaatcttttcagcatgcctaatcaaaattcactgttttctcatttgcattctcattggaattgtacgtaattctaatagagcaccaatctacctacctgttatcatagctatgtggtattacatattcaaatatccttaaacatgttaaaacatttttatgacatgtttgtatcttgaaatccacaaagtgtttacctaatacatgtttagatcaagcttgttgaacacatggcttgcatgtgacccaggatggctctgaatgtggcccaacacaaattcataaactttcacaaaatgagatgtattttttgcaaatttttaaaaggttattggctactattagtattagtgtatcttatgtgtggcccaacacagtaattcttcttccaatgtggcccaggaagccaaaagattggacacctgtggtttaaagagttaagtagaataatactttcatgcacacaatattccccaaattaattcacaattcatctactaacctcgtaattttctacttctccatcttctacatctaattcaaagctgaaagttgggcccactgcaggtggcactggaagcattgatctgcagtgaaaacaatcacactagcattgatatgttagtacattaaatcaatgaacaggacagggaggacagaggccagtgctataaggatgaagaatggttagtgttaatctgacaaatttaacaaaacatatgcaagaactgtacaataaaaactgcaaatagattgctaggataacttaaaggtgaataaacagaaatataccacataagaagattagaagactcaatatcattcagatgtcactttctccttaaaataatctataaattccatgcaatacctaccaagattgcagcaagcacttaagtaaaaactcacatgctgatttaaaaatttataaggaaatgcaaaagaccttaaactgaaacattttaagaccaaattgggagacatactatatctgacattaagatagaaagataaatagagaaaacggggagagagaggaaggaaggaaggaaaaactatgaccacagtgtggtaacgtaagcacgtggccttctggtataaaaactgtatttcctagcattcccagaaagtaattatagacatgtgactaagttctggccaatgtgatacagaggcaggggttatacgtgccacttctgggacatatccttgagaggagcaggtaggcagaggaatctatttttatttttgctaggtggaatgtcatatgactagagcctgagaggccaccttagatcttatacaggaagccattaacattgttcatagtcacagggctaacgaaatcatcgttgagctgcctacttctagactttattatgtgagacagaaataaataattactggcagggcgcagtggctcacacctgtaatcccagcactttgggagggtaagatgggcggatcacctgaggtcaggagttcgtgagcagcctggccaacatggcgaaaccctgtttctactaaaagtacaaaaattagctgggcatggtggtccatgcctgtaatcccagctacttgggaggccgaggcaggaaaatcgctggaacctgggaggcagagcttgcagtgagccgagccgaggtggtgccactgcactccagcacagacttaagagcgagactccatctcaaattaaaaaaaaaaaacaacaaacctacccatgggaatttctgttacagaccaacttaatccaaatagagtagttctaagacatagaaataaataaatttttctcctttctccctaagaaaaacagcactaaaagctgaataatcaagactggtggtaagtgttatcagttgtaaaagaggcagaaaatcttaaccttttctgcttcttgatctgttaaacctattttttggctcacagatttcttccttccccatttctcctatgttactgttctttctttcagccttaactggctcctcccaccccaccctttaacattaagtaaagacaaataactaacacaccaaaagctatagacacaaagacattcacaaaggaaagagaatctcaagagtttcaaaattcagaaatcattaagataagaaagaacttacaacacatatggcagtaagctgggatgataagggggaggtggtattggctgctgggatcggtatctactacgtcctgtaagcctccgaggcataaatggaggataaggctgcaaggggaaaaatgttaagatttagaatcactctacgtttacaaatagcctgtcaaataaagtatctaattaaaaaaagacttaaacagtaaagttctttattgttcaaagttttaatattccttaaatactaacttattaatggatgcagcaaccattttaaaccatacactcaggtgtatttctaaatataactttccaactgaatgctgtcgagaatacatataattctaaatatggtgaattatactaaaacataactcagaacaagtaagttgccaaagcaagtaattaacatagtactctgtgaaaacttactactccaaaggacacctcctgatgcaaaggatcatgtgttaagaactgcaagggagctgatggaggtaatgttggggggtgggctgatggagggtaagtaaaacctcctactggaagatgttctcctaagagttccacttcattttctatcctttgcagaggctgaggagggggaaaaaaaaacacatatatgtatatatatatatacttcctgtgtttagatagattatgctttataataatcacaaatttaaaatcccaaaatgtctttaaggccatgcatctcttgatattcacatgaatctaaaattcatacaagtaaacatataggctacagtaaaatcttcctaactttgatttcaacaaggtttaaaacatgttatcaaacatttccattaccctctatttattttactatttgaaccttctcttaaaatgagaaggcaaaaagtcatcgaataagccaattatagcaaaattaaaattactttttcagtcatagcaccctgacctaaaggattttcagacatttaacctttcacagatgaaacaaaacaggatgtgcatttataaatcagaaacagggctaaatgagatatggtacagaggcattatgctgtgcagaaagattatgggcttctggacattagaatcttggtactgtcaccaatcagccatgttaactttcagataaattacttaatctgaacctcagtattgtcatctataaaaccggcatgctcagagcctacttcaaaagtgtgtagttaacactgggaaacaagagggaggctctgtctcaaacaaaaacaaaaacaaaagccacaagaaaacaaagaacagttcattgagatataactgacatatgataaaaggaattcaactgaatggatttttggtatattaacagttatgtaaccatcaccactatctagttccagaacattttcatcagcccaaaaagaaactgtatacccattatcagtcaatccccatttccccaagccatcagctttccattatttatttatttattttttgagacagagtcttgctcttcttgcccaggctggagtgcagtggcgccatcttggctcactgcaacctctgcctcctgggttcaagcaattctcctgcctcagcctcctgagtagctggggctagggcgcccgccaccacacctggctacttttttgtatttttagtagactttagtagagacagggtttcaccgtgttagccaggatggtctcgatctcctgactttgtaatccaccgcgcacggcccagctttccatttttatgtatttacttattctacacgtttcatgtaaatggaaccagttcatttaaataagcaagaagctatgtctaccttctctgcttaacataatgctttcaaggctcatctgtttcgcagactttatcaatgcttcactcctttttatgagtgagtattacattgcatggatataccactctttcgtcacccatttatcagttgacagacatttggattgtccactctttgactattaggaatagtgctattactacatttgtgtacacattttcatgctgatgttttcaactgaattctcttaggcacatttatttttaaatgctagtctgacttcttcccttagttacagaatagcaacatgttattcaaatataagtaaatactaagctttaatttggaagcctatgcatgcttgagagaaatcacaattgcttacactatgacaacactagtgaaaacaaagtcttgatatggctatgtgactggacctttaaaagaattccaaatttagatacaagtgatagctaaattttgctttagccttgaattcccagatactggaagctgagaaggagaacatcctggcacaaatcctatcctatttccaagaaaagattgtcttgcagaagcaattctacctcttctgatgagccaaacttgcgtcataattgcttctacagttttcaggacagcagcctctttggtacccagcatggtatagaaatccttagtaaacaatggtaagactgctacaataaactgtcaagttctttccacagagctgaaatcttccactttagccacttctataggttatctctcctgtttctccttaatgtctgatggtcttgatgctgaacctggcctatcaaaacaactggaccttttttcctgtgcccttctttgtacttatatagtacttatatctcccagtgtcccaaaataataggcctctcaactatatcccagtcccaagacagaattaactatgttaacagactacctcatctgcttttcatcacaacatagtgaaaaaccaggccttcagaaaaagtaactcaagttcagaaaggttaatttccttgcctaaatgaatacaaatattattctaacaagtattaataattttataatattttcattttccaatttagaaccacataaaaagaaaaaaacaatacaactaaaaacttttcttcagatttacttcctgaaggactgcagatgtaatagaacacaaatttagacaagtgacattaaaataactagaaaaatttaagaaaccagaaatttaaggtaaacgtttatactaatttgtatatgtttggattcctttaattcaagaaccagaagaatgcctaagttattacgtttgtttgtttgtttattttggagacagagtctcactctgtcgcccaggctggagtgcagtggcatgatcttggctcgctgcaacctctgcctcctggattcaagcgattctcatgtctcatcctcctgagtagctggaattacaggcacgtgccacaatgcccggctaatttttgtacttttagtagagacagggtttcaccatgttggccaggctggtcttgaactccagaccctaggtgatctgcctgcctcgacctcccagggtgctgggattacaggagtgagtcactgcacctggccaagttactatgtttaagcatgccatttaaacatagtaacttaggcattcgtctggttcttaaatccactaaggttatatacctggcctaaacattctgaaaaaattaaaaattagttaaaaactaaacattctgacataatagtagagatacctaccgatcgtgattgctgtgtttggaaagggacaaactggcctggtggtggcaaatgaggaggatgatggggagaaaggtgaggaggatgtataagaaatggatcactagaaataaggggtgggaatgcagcatatggtactggtaagtgctgaactgaacatgcctgaagcatctgtaagagaaaccattacagtttggttaaaaatatcagaatatatgattaatttaaaaggatagtgagattaaaatctgtcattgtcacacctctcccaaaatcatgaaaatgtttttaatagcttatattaacaatgaaataccagtgtattttttaatctactagtaaagtaatggtactaataactattctgtattttatataatttttataaattggttgaaatccttgagccttttaaccatctatgaaaaagggttggggcgggtgtggggggggcgggggggaagtgctgcaaagaagaggaaactctctctagttggtttaagatgtagcaaacactaccggtatttcaagaaactccccttttcaatcctgtagaaatctttttcttcctaggattttcataagagcacaactctcaactaattgccttataatctctcagtattttagttcccaaatttggtacaatgtttctattactgagaaactaagcctgagtaaattaatctgttaagttagtattggtataagtgtgcacttgctttaatctcacattcagagcaacgtattaagagttacatttaaattttgctgtgatttcctttgaagacattgttgaccttagatacatcatttaaatacagcgccctcatttctgaaaggaggctgaactgagattaaagattaaaggacaaagcataagcttcagaggcaagaaaaaaaaagttagtgtgaatctctactctcctatactagctgtctctacggcactgagcaagtcatatttaacttttcagattcagacactagaaaatgggggatgatgctactttcatcataggtttcctatagtaaggaataagacaaagcactcaaagtgcccattaaaactcagtaagtgctgagactcttaagtgttgaacaataaggtctctgagacttaggctgaccttcattggctttaattataaacggtgttgacatatgagaaaacatggtttgaccctcaggatatccaaatatatgtataagttaattaatgtaaaaatatatccggttataaagctaattttcttaaatggttactataaggatattattgagatttttattgcaataaaattggcctttttacttgaaagtgaaactacaaagacagtctcttaaattttgtttgcttatataatgcagttagcccctctaaagagggtaagagtcgggaagttacaaaaccaaattcaggctggtgtgcttaatagtaatatctaatgagaacaaagatagagacttactggaggaggcacactacagacagggaggtgctgtccactgaaaaccacagagcatcctgggacctgctgtgtactacaagcagggatgtgctggcctgtgcagagtggaatcccatgtggtgccactgttgttactgtgtaagaaacagggactgttccttgatggagctttaaaggaaaaaacaaatgaacaaactttagctgtttagataaaatgttaactattcaaaatcaacatttggtcatttattggctcctctctcagctacacggattttcacaatgtactctccaatagtttcgaccagaatattcattgtctttgtaggggagagttgactatttcaagagtatatactatttccacaaaattggggctaaactcctccctcaaatgacttgaaaagcccagggaaataatggattactatattaactcttctagcctgtcctataaaggcagaataaaaagaactggaatcattaaagcttgtatcttccattatttggtcacattcaaaacaaattttaattacaactagtgaaacaatgtaaagtatatttttaaaaaaatgaaatctcatttcccgcctagccaatcttattcccatcctacctgccacccagaggcaaacgatgctgataacatatccttcttctctttctccatgaacatatgaaagcacaattacatataaaatgtcacatttatttttgttttcttaacagaaatgagatcatactaccctgcaactttgtttttccatttaatactacattgcaggtatgtatgcaagggagttaaaagtaacttgttctctttggtactagccagatattttaagaaacacttgcttaacacagtcctatcatatggtgtatcaacacatgttcaaattgttttcaactcttttgccaatataaacacaactgaaaaaatatgatattagtttggccaggcacggtggctcatgcctgtaattccaacactttgggaggccgaggtgggcagatcgctggaggtcaggaggatgaggccagcctggccaacatggtgaaaacccgtctctactaaaaatacaaaaaattagctgggagtggtggcgggtgcctgtaatcccagctacttgggaggctgaggcaggagaatcacttgaacctgggaggtggaagttgcagtgagctgagatcgcgccattgcactccagcctgggcgacaagaaaactaatttttttttcaatcctgtcttatggggctgaaggaagacttaatttcatctgaggccaaggcggaagctttggcctcccaaagtgctgggattacaggtgtgagccgctgcacctggccccatcgatcctctaggttgtcataatcatttgtaatttttttatttaagaggtatatgaatctattgcttgttgtgtgtaatgaaaatattttcctagtctatgttttatcttttgatgagatcctttatttaatggcatatttttgtcttttgtgatttttttttttaaatgtagccagagtgtagctttggggtttcctttactgatgaggttataaacatatattcctgtatttcctaattctttagtttttcgtattccaaaagacttatttttgtttataaagtagggctctaattttgcttgcacatggacaattatacttgctccatttattaaaccatcttcttgcctctacagtgaaataccatctttttaaaaattcattaagtacgcacacattcctggatttcatgctgctttaactacagtatcttactggaagagttagcatctggtaagaaattcttctcaccatacatcttttcattttttggcattgtcacacagttattcttacgtataaaatcaattttattcacttccaaaacccattagtattaagattgtactaaatatgttattttacaaaggactgaattttatattaagattttttttttttttgagatggagtttcgcccaggctccagccttgtcgcccaggctggagtgcaatggcacaatcttggctcactgcaaccaccacctcctggtttcaagcaattctcctaccttagccccgccccgagtagctgggactacaggcgtgtgccactacacctggcttttttttttaaattagagacagggtttcaccattttggccagtctggtcttgaactcctgaactcagatgatctgcctgcctcagcctcccaaagtgttaggattataggcgtgagccaccgtgcctgacctatattaagactttttatacccagaaacattatgccattacgttgaatatcacggttctgtctttcaagaagaaattaagtcttccttcaaccccataagacaggattgaaaaaaaaaattagttttcttcaaaaagattattaaatttatttctcaaagtttattattaaatttgttcctcaaactgtggttctgttataatgacaagaggttattttactctatttgcatgtcaaagcggttagtgttagtacgaagataatttttatctatattatcttgaatatatcaaccttaccaacttttaaattctggtatttttaaaaaacttagaatctcctttcctaggtatacaactacaggatgagcatcccttatctgaaatgcatgggaccagaagcattttggattttttggaattttagaaaatctgcattatacttaccaatttggcatctctaatcccaaaatctgaaatccaaaatgcttaaaataaacatttcctttgagtgttgagtcggtgctcaaaaagttagattttagagcatttcagatactcaaattaggggtgtccaacctgaataaggttcaacccaactatcatctttttgtgttagcaaactagaaccttcaaaaataatgtgtataagtacctatatcctatatctgattttaatggaaaagtatgatgaattttaccaataaaactattgatttctaataaacagcctttgtcacaaataccacccccctaccccgaccaactgcacacacattttttttgagacagagtcttgatatattgccaacaatggagtgcagtggtgccatcacggctcaccatagcctcaatctcctggggctcaggtgatcctcccaccacagcctcccaagtagctgggactacaagtgcatgcgaccacacccagttaatttttgtattattatttttgtagagacagggtttcactgtgttgtccaggctgttctccaacttttgagctcatgtgatctgcccacttcagcctcccaaagtgcagggattacaggcatgaaccaccgcgcttggccaagtaccatattttgctgaatccaagacatcagattgtatagtcattttttccccatactaagaaaaatacttctgttttactggagtgcagtggcgtgatctcggctcactgcaacctctgcctcctgggatcacaccactctcctacctcagcctcccgagtacctgggactacaggtgcctgccaccatgcccagctaattttttctgtattttttgtattttttagtagagacagggtttcaccgtgttagccaggatggtctcgatctcctgacctcgtgatccgcccgcctcggcctcccaaagtgctgggattatagacgtgagccaccacgtctggccagattgtatagccattttttccccatactaagaaaaatacttctgtttaactaacataacgcttggtcacttataaattttatatatttattagaagcactttaaatgagatcatacaacacttgagcattcaaaaaaggaaaatataagtgaaataaagtagttagttctgatagttcttcactttcagagtctgactctggtgaatcacttttaatttcagtgtcattgtctggttttcccacaaaaggttcagtgccatcaagggagttggtgatgcagcgtttcttaaaactatccataaaagaaacaaaagctacttgatgctagattcttaagtcaggggtgtaattatatagagcttgtctacttttgactcctgcttggaggtttatgttaaactcacctcctgccacaccccctaaacactaccacttaatccctatgggttaactgcaagacatatgatgcacagcacaagcaatgaagactgtgttacaactactgcttggctgacaccaagattaagatgccatcaattgcgagaagcatccatcccaaattcagagatgttaaaatatggaaatagtacattttaaaatcaatgaatagggccgggcacagtggctcacgcttgtaatcccatcactttgggaggctgaggtgggtggatcgcctgaggtcaggagtttgagaccagcctggtcaacacagtgaaaccccgtctctactaaaaatacaaacaattagctgggcgtggtggtgggcacctataatcccagctactcgggaggctgaggcaggagaatggcttgaatccaggaggcggaggttgcagtgagccaagatcgagccattgcactccagcctaggcaacaagagcaaaactccgtctcgggggaggggggagaaggagtttcatatttcttttcagaaacttcattgtaaaatactttgtaaaatacaatcaaagtaccaaagtacataaagcacgaacatcaagactacaaaaaaaaaaaaaaaatcatcagatgaacactcatgtaaccatcacgtaggtcaataaacagaacatggccaaaatcccccaacgaccccctccaaggaccctttcctggtcaaaatgatctcacagccactctttgatcccagttatcaaaggaatcactatcctgatttttctggtaaccattttttttttcttttgagacagagtcttgctctgtcaccaggcaatcttggctcactgcaacctccacatcctgggttcaagccattctccggcctcagccttccgagtagctgggactataggcgtgcatcaccacacccagctaatttttgtatttttagtacagatggggtttcaccatgttggccaggatggtctcgatctcctgacctcgtgatctgtccgcctcggcctcccaaagtgctgggattacaagcgtgaggcaccacacccggccctaatctgtttttctttatggttgaaccactgaagcttgaaccccaacctagtcttttgttggttaaataccttttcgctgtcttcacggtgattaattgtttcagtctatgagacaggggtcttgctctatcatccatccatccatccatccatccttatctacctatgtatctatctatgagatgggggtctcactctgtcacccaggctgaagtacaatggcacaatcacttgggctcgagggatcctccagcctccgcctcctaagtagatgggactacagtggagcaccacagtgagaacttttgatgaatacaaacatttccaaaaaacagacatagaaagccactataaacaatcctgtagaaatttttttgtgtggacatatgcactcaattctcttgattacactaagaatggaattgctggattactgggtaggtgtatgtttgacatgattagaaactgaccaacaggtttccaaaagatcatgctactttttacttccactagcaatagaattgtcagtctttttaattttggccctcaaaatgtcatgttttcatttggtcacccaactgtcccagaaccacttattagcaattctgtcttgttccaactcacctacattcatcaagtcatatgccatgtatatatactcatgcgtggcttaacgatggagatacattctgagaaatgtgtcattaggtgatttcattgttgtactaacatcatagagtgtacttatacaaaccaagatggcagagagcctactacacacctaggcttatatgttatagcctattgcccctaggctacaaacctgtatagcatgttgctgttgctatacgaaaccctgtaggtaattataacacaagggaagtacagttagcccttgaacaacatgagtttgaactgcatgggtctacttatatgcagatttttttttttttttttttggaggtgcaatctcgctcactgccaccacctcctgggttcaagcatttctcctgcctcagactcccgagtacctgggataggcacccaccaccacgtctggctaactttcgtgtttttagtagagatggggtgtcaccatgttggccaggctggctcgaactcttgacctcaagggatctgcccacttcagcctcccaaagtgctaggattacaggcatgagccaccgtgccctgcccacatttcaataaaagttgcataaagtgtgcctgcctctcctccaccagagacagcaaaaccaactcctcctcctcttcctcagcctaccccacatgaaaaccacagggatgaagacctttatgatcaacttaatgtattttatgatttttttaatcacactttctctagcttacattataagaatacagtatataatatactaaatatgtattaactatgttattggtcaacattagtctattagtttttgagggagtcaaccattatatgtgtattttcaacagtgtagagggttggtacctctaacccctgtatttgtgtatctaaacacaaaaaagatatagtaaaaatatggtattataaacttacgagaccactgttgtatatgtggtctgttggtcaaacgttattatgtagcatatgaccatattcacagaaaatgtgttggcttctagattttatattctatttcattagcttatttggctatgctggcataaatgtctttattaccatagttttataataattcctagtaactggagaagctactttgcccacctgttctttcatgactagaacagtggttctctaattacaatgtgcattagaatcacctggagggcatggtaaactagattgctgagtcccacacccacagatcctgattcagtaagtctagtgtacagtctgcgaatctgcagttctaacaaatatctaggtgatgctgctgctgctcagctgattcagctaatactcttgagaaataattggtctagaccttaagaccagggtgtcagtgggccaattatttcttaaagagctagaaagtgaatgttttaggtttgtgggccatggtctctgcacaaagtaaccaaagacaatacagatgaacaaataggtgtggttgtgttccaataaaactttacagaaacaactatcagtagttcactttctatggctgtagacaatttcaggtcttttaaattgtcactaaaaatgacagaatcatcttctcaagttacaccaaaaatctactgaaaatttatttgggattatactaattctattatgtgccgcttttaagaactaagagccttaaaaaaaacgggatctttcgagtcaaatctctcatttaaataagttttcctgtggtcaggcacagtggctcacacctgtaatcccagcactttgggaggctgaggcaggcagaacacccttggccaggagtttgagactagcctggccaacatggtgaaaccccacctctactaaaaatacaaaaaatcagccaggcatggtggcaggtgcctgtaatcccagctactcaggaggctgaggcaggagaatcgcttgaaatggaaaggtggaagctgcagtgagccaagatctcaccattgcactgcactccatcctgggcaagaagagcgaaactctgtctcaaaaaataaataagttttctttaaactctctcaataatgctttggtattctacacagtggttttaaaccacttttgttaagactgatagtttttttttttttttttttttgagacggagccttgctctgtggcccagactggagtgcagtggtgcaatcttggctcactgcaacctccgcctcccgggttcaagcaattctcctgcctcagcctctcgaacagctgggactacaggtgcgcgccaccatgcccagctaatttttgtatttttagtagagacggggtttcaccatattggccaggctggtctcaaactcctgaccttgtgatccacccgccttcggcctcccaaagtgctgggattacaggcacgagccactgtgcctggccaagactgatagttaacttctttagtattactatgattttttcagtggtattttttctttgaatttttattacagagaatttcaaatatgttcaaaaacagtagcataaacccccatatccaccgcccagccctcaaaccattaaaccatagccaatccacctgaatatactgctttgtttcatgtgttttgttgaagcaaatcccaggaccctatcatttaaaaaaaatttttagtatgcatttctaaaaaataagaacacttaattagccacaacagcattattatatttttaaaggaaagttatttaaaatcaaacatgcagtcacgttcaaaattccaattatgtcatcaaataaaaataaatgattttattagacttttttccctttcctctcaaacagaatcaaaaaaaagctttacatattgcaactgattagtatgtctgggttgttcagtgttaatgtatcttttaaaaagttgttcatgttctgtttgattctggtattaaaaaaaatactgattattgtatattcattttttgtaacatttcaatctgttcaattcttagttctaacaattacctaagatgcttcgggattttctatcagtataatcagtttgactgcaaatattgatggtgttacctgttcttttcctattcttaaacttttttcttcttgtcttttctgctggcttggcctactgaatagatgtggtaatagtcagcatcctggtttattccaggtagcaggaaagtgttcaaagtttcacctttaagcatgtttgaagtaggtgaattcactgtaggtctgtttctattggttttcaattatagccctttttaagtcatgtaccgagttaactttgtttattgctcgctgttcttgaaaaattattgggggaactgagaaccaaaatgaaggttccttctttcagggagaaattgcccctgctttctaggcccctgaggtacccattactttaaatgaattttcactaacttcacagagtgatgtgaatttgggctgcaaatttacttctgctcagtcttatcctagtgaccagatatccctgtattctgggtatacagcgacttaaagtgtttggtattttacgcaggaagggtctcctatatagaaagtgactccttaaatagtccttgatttttgtcccctttgcctcctgacagactcaaaattgaagtccaggtttgctcaaatgaacaaatgccttaaggacagaactagcaccccactttcccttagttttgatttcttctattagctcttttgatgctttcaggatacttattttatctagcacgctcggttgtcctcaagcaaaaggaatgctatcaataagccttcctaccacgtattgaaaattaaagtccttcctttttacactttaagaccttctaataagaaatgatggctagattttatatttcttgcgcctattaatatttttcctttatattgttgataaaaccaattatcttgaaagatttcctaatactgaacccatgcaggacgggttcaatattatgttattcttttaatacatcactaggtatattaaaataggttattccaacaggttattcttttttcttttttttaattaaaaaattgttctcataccttcttgctgaaaacagcttattcttttaatacaccactagctatggtttattatttaaaactttttcatctgtattcatgagggaaactagtcaacagctttcttttgttgtattcatctatgaagtttcattgttaaggttgtgttagtttcataaaatatatttggaagctatctttttctatgatctagaatagtttaaattcgaattaccagttctttaaaggttagacaagaagtcagatgtttttatttttttgagatggagtctcgctctgttgcccaggctggagtgcaatggcacgagcttggctcactgcaacctccacctcacaggttcaagcgcttctcctgcttcagcctccctagtagctgggattacaggtgcctgccatcacgtgcggccaattttttgtatttttagtagagacggggtttcaccatgttggccaggctggtctcaaactcctgggcctcaggtgatccgcctgcttcagactcccaaagtgctgggattacagacgtgggccactgcacctggcctcaggtgtaattttaattttaaagacggattttgttatgcttttataatttctgccatggctaccggtctgctcaggatttctaattcttgtgttgttctggttatttacatatgtaatgttttcatattccaatatacagactcaacacgtaacactactacataaatgagaccttgccttttctgaaatgcagtcttttctttctttggctccatcactaaccaccacccctccttcactttagcacttaccctacaagcctagtatgtatttctctgtatttttctctgtgttcacatagtcctatatacatacactcatatacatattaattatgctttacaaaatgggactttgtaaacactttcctccattttgcttttcttgctcaaggggatggggagaaggtacaaaaattgtgtttttcagtattttatatccatacttttatcaggttacggccacaaataaggtaagctttcctacatgatcaatttttaagtgtttcatgaacataataaaaatgtctggcataagaagagtatctaggtaagatattttctcaattgtcactatgtgttattgtttattatctagtgcagtagatgaaaattgagatcctattctcattagcattctctggtaattttttttggtttataaactcacaagatttcccccttatccttaaaatccagcaatttttataaggacatgcttagacacatgtctttttttttttgacctcagaaactccacagaaaagaccaccataaaattgtggtcttcatcctcaggctctgaagataggcaacctctctcctcagctggtccctcagttcttggcagaaagaaaagggaaatgaaacattgtaggcttgtacctgtcatctccttggaggcctatgaaaacctataagcaaagatgtacccaactgtcttgcttattgaattattccagaagaaactaggaaacaggaatatgtactcaaaccatcagttgtctgctatttcctactaatcttaaatcaataatttcaaatcaagcatacatgaattcattctaagctttcataaccttgatccttttttttaattttttgagacgaagtctcgttctgccacccagtgcagtggtgcgatcttgactcactgcaacctccacctcctgagttcaagtgattcttctgcatcaactgggatcataaacatgtaccaccacatccagctaattttcgtacttttagtagagacggggtttcactgtgttaggcttgtctcgaatgcctaagctcaagtgatgtgcctgcctcagcctcccaaagtgctgggattacaggcatgagccaccgtgctgggccgatactaattttttaagttcaactttcttctatggaagctgtgtagaatttaaatctcaattcttaaaaggaatgaggaacttaaataacttcattttaggtaaaaactaaaagaaatttgcaacaaaaagccaaaaaaaaaaaatctcaaactgccacaaaatttcagcttctgtatttccaagacattctgttattgtacctgatcatgtatgtcaaccatgactgcattctgctggggtggatgagcagcaggatgtagcagacggggagatacattcggagggtggaaggctcgaggctcctctattgcttgctgctgtgcgtaagggagatggtgatagttttcatcttgactaatggaattatgtcgagacagacgatcccttcttcctctctggcgcctgacaggaggactgtgataaatatcaaaaagaaagtcattatgcttattgtgatccatcaggattctgtattgtctttctttgatatctatcaatagtatatgctaaggtaagcttcattattaaataactgctaaaattccccatcagctctaaaaacttacaaatttaaatacaaggtatatgttttatacaataatgaaagcaaacagtattggtattcatctctgaaagtatttagaaatcaacagctacaattttttcttgaatcatatgaaattgccctttttataagtgaaaaatagtctaatagcaacaatttcatataatttaacctaccattttctccctttttaaatattataataaaacgaactttaatctgtagataccttgtcagtgttcctcatatacctaataggcacctttttgtctatttagctaacacatacataagacatagttcctatgtggccaaaatgacacttttaaaaaatgagaaaacatgaaataaccaaagaacatataatttgctgacaaccgcaaatagaaactgggtaaacacgcgatgaatatgattgagaatatgatagtatcaacataaatattccaagaatatataaaatttttaacttttaatttttatgggtgcacacaaggtatatatacttacatagaattttaaattagaatttgcttgttgggccaggtgcagtggctcatgcctgtaatcctagcactttgggaagctgaggcaggtggatcccttgagcccaggagttcgagaccagactgggaaacatggtgaaaccctgtttctaccccaaaatacaaaaaattagccgggcgtggtggtgtgcacctatagtcccagctacctgggaggctgaagtgggagaatcacctaaagcctggaaggccgaggctgtagtgagctgagatcacgccactgcactccagcctgggcgacagagtgagaccatgtcttaaaaaaaaaagagagggagagaatttgcttattgaagcaacccacatttactctccatgtactagtcatcgacatagtttaataaaaattttattgtgactaaactttcattttgttcttctctgaaactgctttttacaatggctcagcacaaaagcaacttgaaaaagtactctgcctcattaaaactgtactctacattgggcaaaggaggtcaaacatctcccttctaggaagaactccaagtgtcattttagcaactttctttatggtcactttttccttaatcttcccactctgttcctctaaatctgtttcttcttactcctaattctccaatcttaagagaacaagggacattcctttatgagatcaactcgcaaaggtgctcttgatattgtccctccagcttcttgctccattaattgtttcttctaactttatttttaatacaatcctttttgcatttttgcttcaaactctacttactgtattatattgaattcaagacgccctccaccttaggactaaaagcttttttttttttttttttgagacggtgtttcactcttgtcacccaggctggagtgcaatggcacgatctctcggctcactgcgacctctgcctcccaggttcaaacgattctcctgcctcaacctcccaagtagctgggattacagatgtccaccaccaagcccagttaattttttttttgtatttttagtaaaaacagagtttcaccatgttggccaagctggtctcgaactcctgacctcaggtgatctgcctgcctcagcctcccagagtactgggattataggtgggagccactgcacctggcctacattatttcttttaaatttttctcgtattgccttcttctggaaatattagacatttagaacttatgactctgtgttcatacttaaatttacttttccacattttttattttgccccgttacactacattctgggaaatttcctccacttgatcttccagaatgaactcactttttcttttcttttttttttttttgagacagagtctcgccctgtctgccaggctggagtgcagtggcccgatctcggctcactacaacctctgcctcctgggttcaagcgattctcctgcctcagcctcccgagtagctgggactacaggcgtctgccaccttgcctggctgatttttgtatttttagtagaaacagggtttcaccatattggccaggctggtcttgaactcccgaccttgtgatccgcccacctcagcctcccaaagtgctgggattacaggcgtgagccaccgcgcccagctgaatgaactcactttttctatttattaagttttaccagctaacatttctagttgattttcatgagtacaatatccctcatccctctccctcttacatctcacatgtactctaaaattcgatcttgcttgttctattgtttcttgaagtttattgttaattgagtttaatggccctgtttattcacagttctttgttttattgcatttattaatagtatccctctttcacttcattcgtttttttcaaatacctagctttgtgctcacctctgtaactgaaatcctgctagattattgttaaaaactgcatctgcttggcacagcctgtttctgggagaaaatctggcaatatgcttataggtaacctatattaagtagtaaacaagaacagaatacagagtaagacacactgctgaaaaaaacactaggagagccagttttcagggtggtaaatactctctactactcttttgtcttgctatgaacgaggaccatgatgcttttcaaagaactcaaagctaattactattatcatcatctgtaaacagacatttctgacactcccttcctggtccaaggcatttcctgtgactagcaattctactcctagacttacatcctaatgaaacttttgcacatgtacacagagaaatgcacacacaaaggttcctaacagtattgtttataatactaagagccgggtgcagtggctcatgcctgtaatcccagcactttgggaggccgaggtggatggatcacctgaggtcaggagtttgagaccagcctggccaacatggtgaaaccccatctctattaaaaatacaaaacattagctgggtgttgtggcaggcacctgtaatcccagctacttgtgaggctgaagcaggagaatcacttgaatgtgggaggtggaggttgcagtgagccgagatcgcaccattgcactccagcctgggcaacaagactgaaactacatttccaataaaaaagttaagaaactgggcatagctactagccaacaacagcaggcggatacataaattgtgtggtacattaatataatggaacattatatcacagtaatagaactattgctactgctatcaacattaaaaacagaatgcttaataaacagtcaaagaaaaatacatttaaaggagaacaggcaaaaaccaaaatcacattatcttaacagtacattcctaagtattaaaaactatgactgaacagggaataatgtcaaattccagaacaaggttaccctctaagaaaaatgaaggggaacggtagcacctgaggcctttgagggatcaataacactaattttcacctaggtggtgggtgtatgtatttgttagccctttttttttttttttttttaatttgagacagagtctcaccctgtcccccaggctggagtgcagtggcgcgatctcaggttttgccattttgcccaggctggtctcgaactcttgacttcaggtgatccgcctgcctcggcctcccaaagcgctgggattacacgttgtcagccaccgcacccggccttgctagcctttttttgttttttgttttaagatggagtttcgcttttgttgcctaggctggagtgcaatgcacacccggctaattttgtatttttggtagagacagggtttcaccatgttggtcaggctggtctcgaactcctgatctcaggtgatccatccacctcggcctcccaaagtgctgggattacaggtgcgagccactgcgcccggcctgccttttaactgtacatttgttttattcatcataaaataggaagactacagcaggtactcaggccttaactttgcaataactatactttctcatgcttattatatttaatagctataaaatactttatctgctagccatatactatcttacctaaaaacattcccatgtaattggttaataaggtactgggtaatgtaaaagtcttaatgtctcaacagaatagagctcagagacaggtttatgttctttcagctggaacacagaatgctggttttaagatcccttctgcattagcccgctcaggctgccataacaaaacattgcagactgggtggcttaaacagatacttaatttctcaaagttttaaagcctagaagtttgaaatcaaggtaccaacatagtcggtttttggagagggatcttttccctggctcttgcagacaactacatctcactgtctcctcatatggtggaggatgagttccccgacatctctttttgagacagagtcttgctctgtctccaggctggagtgcagtggtgcggtcttggctcactgcaacctccgcctcctgggttcaagcaattcccctgcctcagattcgcccgtctcagcctcccgagtagctgggactacaggtgcgcaccaccacagctggctaattttttgcatcttagtagagacgaggcttcaccatgttggccaggatggtctcctgacctcgtgatccgccaaccttggcctcccaaagtactgggataacaggcgtgagccaccccggcgcattgcttcttaaaggacattaatcctgctgggtaagggtcctaaccttatgacctcatttaacgttaattacacttccttagaggtcacatctccaaatacaaccacactgagggttacaggaaggttacagcttcaacacattaattggggaggaggggttacaaacatttggtctgcaacaccttcctaactcaagatcattgatattccttcaacatcctggatatgcacctcacaatgcactcactatttccctgggatatgaaatacatgacctctggcaacaaataatgaggaagaaactcaggaagaaatgcactcctctaggatgaaaagacaagggccaaatcccattgcctaaaagttgaactaaacttgtcatcttttcataccacgggctccacagttgttttttgttttgttttttaaatacagtgtctcattctgtcaccaacgctagagtgcagtggaacaatcatagctaaggttcattgcagccttacactcttgggctcaagcaatcctcctgtctcagtttcatcttggactacagatgtgcgccaacatcctcagctaattttttgtttttttgagagagacagggtcttgctatgttgcccaggctggtctcgaactcctggcctcaagtgatcctcccactttggcttcccaaaatgttgcgattataggcatgagctactactgtgccaagtctccatgggtttataagaaacataattaagctcctaattgcctttgaggatacagaaggaaaaggaatggagtagaaaaggagtagctcatttctaagacttccatatatccttacagttatgaactacaaaatgcatcttctaatagtcaagatcgcaggctagtccacaacaatctgtaccttaagtagctaatttcatatataatggcatcgactgattttagcctctttccatttcttcatctgtcaatgataagctaaataaactcttctaacctactggaaatctaggcaactttctttttcgtgagtgaatgtacgtgtatatgtggtgatgtgtttatgaaatgcctacagaaaaaatgttttctgatgttaaatatactcacaaatctaccaatggaagaaaacttaagaaataaattgtaatcaactaaccttcttctgttgcgtgcaggtgtgttgcatcgttcccctgagaagtgatgttggcttggtcgaactgaagggggctgcctatttgatgtcatctcccatggtcgcattggtggtgagggagctggtgatgctgatgtataatcaaagactgaatgagagaggcgctgtctcttaggacttggactatcttcactctgccaatgcaacaaaatggatcaactgagtaagatcttttaaagatttcacattactgcatatgcacaggtgttaggatgtacttaacctaaaatctaaaaatgtaaagcggggaaaaaaatatatgctatcaattcaaatttaaaacctttaaaaaatgctgggatggggtagaacaggggagggagatgcacagtaaatgatacgaagtgaaaaataagctttgtttttaaaaactcattctaaggcaaatgaggtaacgacatatagggtataaaacagcataataaaactttcgtgtagtactcgaccttctctttaaattcccaaaccacctgaaaaattacactacactacaatctcccatcaataagacatcaattctcagctgtgagttcagcttagtaggagatataatttgagtaggccctcaatttgattctaaatcacactcctctccctccttctatctgtttaggccactatatttattttttttaaagagagttacatggggccgggcacagtggctcacacctgtaatcccagcactttgggaggcagaggcgggtggatcactggaggtcaggagttcgagaccggcctggccaacatggtgaaatcccgtctctactaaaaacacaaaaattagctgggcgtggtggcacatgcctgtaatcccagctacttgggaggttgaggcaggagaatcgcttgaacccaagaggcggaggttgttgtgagctgagatcacgccatggcaccccagcctcggcgacaagagtgagactctgtctcaaaaaaaaaaaaaaaaaaaaagttacatggataaaataagatttatgttagacagataaagaaatagcagatttacatgatcagttcttaactagaatatcacagcagtttggaagtacttttaaagttttcaagggtcccacatggacttactagctacaaaactgatatggatcacttaattgcattaataacactccagggttctccacctgactcaatttcccaaatcagtctacccaaaaatatcaaagttacaaattgactgaaaatttgataaggctgtgtgttttctaatagaacgtctatctccaatctattactgcaagttctaattagttgggcattacagtacttttggttgcaaaataattagtacctgcagctaccataaaaatcatcttataccactgcaaaaatatacaggattataaattagtgttagattttaaataagcatataaatcagaactgattatttaagctgaaaggaatgaagcaaattggtaaatggctacatttgatctttccaaattacttagcagtattccaaaaaccatgtcatttcccttctatatttaggagatattataatcaattttattatcattataattaaaatacaaaacacaaaagcattttgttctaactttcctaccaccatactaaccttattttctccctagatttaactgtacagtcgtccctcagtattctagggagttggttccagagaccactcccccataccaaaatcttaagacgctcaggttcctgatataaaatggtgtcgtatttgcatataacgtacacacatcctcccatatactttaaatctctagattacttaataatatcaacacaatacaatataaatgttttataaatagctgttatactgtattttaaaatttgtattattctgtattgttgtattgttacttttatttcattttttctgactatttcccatccgtggttggttcaatctttgggtaaggaaccaccaactaatctagtaaaagtacagttattttcatcctttaattttagtgagaaagttagttatgttctgataatcctaaaacttaaaaaaaaaggtaaataaccactgaaatttaaatattctgattttttttaaaaggtagaacaatcaagacctgacaaacttgcacatgaactacatgagcaccagaaacaggctggctgcacaactggtgaaacagatttgattaacactgactttttttttttttttttttttttgtgagacggagtcttgctctgttgcccaggctggagttcagtgacgccatcttggctcaccgcaacctccgcctcctgggttcaagtggttctcctccctcagccacccgagtaggtgggaccacaggcatatgccaccatgcccagctaattttttgtatttttagtagagacggggtttcaccttgttagctaggatggtcttgatctcctgacctcatgatctgcccatctcggcctcccaaactgctgggtttacaggtgtgagttaccatgcccagcttaacactgactttttaaaaacaaaatgctagtaacgaatcatgatcattagcttttcatacataccccacattgtatatcctactctgaataagcctaatgtaagctaagacacagaactttgaattctaaaaattcactacctaaaatggaggcgaatgctacagatactcacgataaaggtcaaatgaccagagaaagcccttagtttataaacctttatatattttcagtgatgttcaaattgtgggctaaaaatgttcttactttacaagacatgcaaagcttttaaaagtagaggtaaggaaagtggctgcgaaaagtaaagttaccatcacttctctttgtgctatgatggtgacaaagaagagacaaagaatgggaagtgaagggagctattcattagagtacttactacttttctttttcctttttttttttttgagacggagtttcactcttgttgcccaggctggagtgcagtggcctcatctcggctcaccgcaacctctgcctcctgggttcaagtgattctcctgcctcagtctcccgagtagctgggattacaggcatgcaccaccatgcctggctaatttcatatttttagtagagatggggtttctctgtgttggtcaggatggtctcgaactctcgacctcaggtgatccgaccgccttggcctcccaaagtgttgggattacaggcgtgagccactgcgctgggccaataagtttactttctaactcaaagtcacaggaaactacaatgactaaatacaggcaaacattaaaaagtagtttgctacatgcaatatgatttcatcacttcccttatcaattttagtactctaaggaacttcaaagaaattctcacagtttccagaaaagggaaggggtagtaacctacaaagaaataagaattatattaacatcagacttcctatagcagaaacagatgctaaaagttctctgagggaaatgaatattgaacccaaattttgtactccaatcacactattaatctagtgtggaagcataaaaaaaatgacctttgtcagatatatcaagacccaaaggtgctccttacatagcagaaaatcacttgatgtgtgctcacaaccttccctatctctctgatttgaagctattacacaatatccaataaatgacagaagtaacccagagagtacaatgaaatgaaattccaggaatggtagtataggaagtgtggaaattcatcattccacattagaacaagaagtcagagggctccgagaaaaatgccctaaatagaatcaaaatatatgactgagaacttggaagttattaataaaatttaagcagacagctctgtcattatataaaagacaatcagtccaggaaagtcaatgaggaatgcaaattcatctgaccttgtcatctaaagcattctttgagtggaatgggtagtcagaagattacattcacttttccatgggccacacatgctcttggttctgcaatgactaaatatatggatgttcctaacatgatgcaaagtgtttactagtttctgatagttaaaatcaacctaggacaaggcatgaaagatcactactgtagttacagaacagaatggaagtataaactctattaatgtaaactctaaatgtttatgataaaatcacggacatttagtgaaaatcaaaatacaaaaatctaaaaataatggcttaaatataacatacttttttgcttgttttttgagatggagctttgcttttgttgcccaggtagagtgcaatggcaggatctcggctcactgcaacctccgcctcctgggttcaagcgattctcctgcttcagcctcccgagtagctgggattacaggcatgcgccaccacaccctgctaattttgtatttttaagtagagatggggtttctccacgttggtcaggctggtctcgaactcctgacctcaggtgatctgcccgccttggcctcccaaagtgctgggattacaggcgtgagccactgcgcccggcctgttttttttttaaagacagtctcactctgtcattgaggctggagtgcagtggcacgatctcagctcactgcaacctccacatcccgggctaaagagatgctctcacctaagtctcccaagtagctgggactacaggtgcacaccaccatgaccagctaattaaaaaaaaattttggagatacaaggtctcactatattgcccagtttggtctcaaactcctgggctcaagcaatccttccacctcggcctcccacagtgctgggattacaggtgttgagtcattacgcctggctaacaaacatgcttttaaaatgcagtgctaaatgcaggggaaaaaagggaaatcatcaaggactcagaaactgaggaaaactgaagaccaaatttgtatttttgatgctctcaagaggaatagaagataaggccttatgactgagacccctacatgaagtagtcaaaatttccaaagtagtacacttaaaaaggaagacaagaaaaagtcattccagtggaaaagagaaggaaacgtcaataaggaaatgtctgctctgtgttgacttcgagtggaagtgggtttctcccgtgagaattcaaacttaggttcactcctcacaccctatttggggttcagattttcacgatccatgctgtctgtgaacctctaaacataaaaacataaaaactcatccagaactacgctactacaaggtctctttacatgagtaaatacaaaactgaatctggaaggatattcccactgcttttgtaaactaaaaataaaatcccccccaaatgactgaactgactctctcttgactacagagaccccagagaaactagaaaaattgagttcttggcctggacaggaaggaagactagatacacctcattttatctctccatcccctgcttctggagtttaggcaaaactgaccagcattaatgttaaaatagaaattataggacctaacagaatggactttttgtgacaataagataccaaattataaacaggacctaaggccaagccagacaagggttaactcacacacccctacaggtcactctaacccagtgtattggttaacagactttcttataagattcccttctgctgaatccaaatttttagacaaagctttactctataaaccaactgcaaattacagaatctcatctctgaatccacctaaaatctttaagtcctcacttcaagatattctgtgtcttttcggtttgaaacaatgtatactttccatgtattgatttatgactttgtaactcctgcctccctaaaactgtaattcgactgtagtgggtacatttccttgggacctcctgagactgtttcccagaccatggtcactcatattgtctcagaataaacctctttaaaatgttttcacagagttgggtctttccattaatacctatgccagtagttctcaaaccttcatgcttcagaaacaccagattgcttgctggcctcactcccccgtctctaattcagaaagtctggaccagaggtccatgaactgtcatctctactattatcccaggtgatgatgcttggataatttagattttgaattatcaggcagagaagttctttccctcctctccttgttgattctaggccagtggaccaacttttcaaagtaccaagtgttgacaatttaaaattcataagatgttgattcaaatctggtacaagtactgtctctattatttaataatatagaacgttgtacagacattacagtatagaacactgctacagatttagggatcaagggaggtcaaagaggtcataatgggaggaaggaaggaaaggcaggttttatgcttagcattaaatctgataaaaatgagtctaggagtacacctctattaacaccaaaccatttttattaccaaaacatcaacagaagtgaaatgaacctgaggcaggcataagaatgcattccataattccagatgaacaagtcagaagtcattaaaggctaaagaaaaacaattttatatgtaatatatatcttgggtttatatatatatcagcaagtcttagagataataggagatgctgagccagacaaacttttcccaaaacagaaacaggtttcaagttctactcagtgactacaacatgcctctaatggcaaccactagtgagccctaaggacttccttcccaaagcagcaaagaggcaacttgtgtggggaaatggaatttctcaagaacctggtcctctttctaatcagtcaggactactcttcaccttagatttacaaataagcacagcatgagttaagaatcttcaattctcctttaaactcccagactttctctacttgccttaattacctttaacaaaaatgaagtttcttattccacaattaaggaaaaacagttaaatgcaaagggcccaggaagagcaaactctcactaaattttattcattttaaataaatgtgaaaacacttagaaatcaacactctatataagcaacttgttactaaaaaataagacaagatccttttttgttttgcagaagatggatataagctggggaaagcagaaaattaagaattttatatttggatcacacaatagtttacaaaatgacttctaacattacctcattttattctccacaagctgaggttttcatttttaaactatgtccagataatacgtaaaatgtggttttttggttgctgagacagagtctcgctctgctgccaggctggagtgcagtggcgcgatctcagctcactgcaacctccgcctcctgggtttaggcgattctcctgcctcagtctaccaagtagctgggactacaggcgcgcaccagccaatttttgtatttttagtagagatgtatttcaccatgttggccaagacagtctttatttcttgacctcatgatccgcccacttcagcctcccaaagtgctgggattataagcatgagccaccacggccggcctaaatgtgtttctattagtgaaactgaaactttttaaggcagttcagtgaacatgctgcccttgaactacataatgtacacagtctcatttcacataggactttcatttgatgtataattcttatactcctcagatcacaattttgcaatgaaattctgtctctcaaccagacaactaatatattctcctgaaatgttattttacttgcagatatagaagaggctctgaatgttgttttcaaaagttaccatgttgttttcaaaagttaccataaacatgcagaaacaaaaaaattttgctctttgatacgtgccaagtttttttttttttaaaccgaagcccaaagaaaataacagtttgatatgcagtggctgctcagaaaggcactctagtagtataacgtattgcaatcacaccatgatgaatagtaaaatacggtattttcctatcattggctataactgctagtccaccaaaacacaggaactataaataaagtggtttcctaagtctaaggaggcctgcatggctagtatttgagtaacagactagtgatgttatatactatatttttcacagttcctaattacacaaaacatcactggttcacaaaaactaatttagcttgatgctacaattgtaagtatcactatatttctaccagaatactagattctactcatgtatctgtaactataataattttaagctataattatagataagagactaaaacaaaaaatctaaagtataaacatgaaaccagtgaaaataggaaagatactaaaacaacctgaaatcaagagatcctttgagagataccccgcctggaggtgttctgtaaacagctgaagctcagagggtaggaatataaatttaggagtgttgatatacagatcatcattcatgaagctgcagacatagacaaaattgcccctcaaaagtttatgtaatgaaaacaaggcccaatacggaaacctaagaaacaccaacatttaatgctgggtacttgattagcaggagggtggagtgtgatggaagccaggcgaaggaggtttcaaggatgcaggatgaagggctgaaaaatatccaccagatgtattaggtgagtgcaaaaataactgcagtttatgcagtgttggaatttgccgtttggtattggaatacgttcttaaataaatgtggttatgttatatatcattttaatgggaatttctcactttatgttctttgttaatgacttattacttgctatttatgtttattttaggctaaggaaatgatgttagacaaaaagcaaattcaagcaattttcttattttagttcaaggtgggtcataaagcagcagagacaacttgcaacatcaacaatgcatttggcccaggaactgctaacgaatatacagtgcagtggtggttcaagaagttctgcaagggaggcgagagccttgaagatgaggagcatggctggccatcagaagttgacaatgaccaattgagagcaatcatcgagctgatcctcttacaactacatgcgaagttgccgaagaactcaacatgaattgttctatgctatggtaggttggcatttgaagcaaattggaaaagtgaaaaagctcggttaagtgggtgcctcatgagctaaccgaaaatttaaaaaaaaaaaatcgttttgaagtatcatcttctcttattctacacaagaacaaggaaccatttcttgatcagattttgttatgagaggaaaagtggattttatacaacaaccgataaccagctcagtgggtggaccaagaagtagctccaaagcacttcccaaagccaaacttgcaccaaaaagaggtcacagtcactgtttggtggtctgctgctggtctgatccactacagcttttttttttttttttggagacagtttcgctcttgtcatccaggctggagtgcaatggcgcgatctcggctcacagtaacctccgcctcccggattcaagtgattctcctgcctcagcctcccgagtagcagggattacaggcatgtgccaccacatccggataatttttgtatttttagtagagatggggtttcaccatgttggccaggctagtcttgaactcctgacctcaggtgatccacccgcctcagcctcccaaagtgctgggattacaggcatgagccaccgtgcccagccactacagctttctgaatccctgcaaaaccattacatctgagaagtatgctcagcaaattgatgaggtgcaccgaaaactacaatgcctgcagccagcactggtcaacagaaagggcccagttcttctcgttgaattcttggcacgtcgcacaaccaacgcttcaaaaattgaacaaattgggttacaaagttttgcctcatctgccatatttacctgacctctcgctgaccgactaccacttcttcaagcatctcgacaaccaacttttttgctgggaaaagccttctacaaccagcaggatgcagaaaatactttccaagagtacgtccaatcccgaagcagtgatttttatgctaccagaataaacaaacttatttatcgttggtaaaaatgtgttgattgtaatggttcccattttgagtaataaagatgtgtttgggcctaactacgatgatttaaaattcacggtctgaaaccagaattacttttgcaccaacctaataccaacacagaggtctctgacagagctatttctttctaataggatttgctatctcttatggcatatttctccccttatgacaatttttggaaaagtttttcccccttttcttcaataatcttccatatgaatttaaaaacaattctgaaagctctaaaaacaaaattctgctgatattttggctagaaatttcattaagtctacaaatttgctagaatatagatattttcacaataattttctctttcagaaacctggcatatttctctatgtgtatagcttttcaaattttcattcacctaatttaactttagtaaatttgttagaggcgtttgaaccagagtgcctccatactaaacagtggcttggtaaaataagactgagacctgctgggctgcattcccatcacgttaggcattctgagtcacaggatgagataggaggtcagcacaagatacaagaccttcctgatattaacaggttgcagtaaagaagccggctaaaacccactaaaaccaagatggtgatgacaatgacctctggtcatcctcactgctacactcccaccagcaccatgacagtttacaaatgtcatggcaatgtcaggaagttacccaatatggtctatttttattttttgagaggtagtcttgctctgttgcccaggctggagtgcagtggcacaatctcagctcactgcaacctctgcctcccggattcaagcgattcttgtgtctcagcctcttgagtagctgggaccacaggtgcgcaccaccacgcctggttaatttttgtatttttagtagagacggggtttccccatgttggccaggctgatctcgaactcctgacctcaagtgatccacctgcttcggcctcccaaattgctgggattacaggtgcgagccaccgtgtgggagcccctaccttgtctataaatgaggcatgaataatccaccccgtgtttaacacataatcaagaaataaccataaaaatgggcaaccagcaggccttagggctgctctcctttactttcttaataaacttgctttcactttatggattcacctcaaattctttctagcacaagatctaagaaccctctcctggggtctggatcaggacccctttctgttaacaaatttacaaaataaaagctataacatagcagtcattaagataccacaaacacccctaaaattaatggttgtgccagatataaaattatttcaccatgtacttaattaccttttgaaaacttactatcttcaatcacaaccattgaatccactgatagtaaagacatgcctaattttaaaactttaagacaggggttgacagcaaagaaacatcagggaattttggggggtgttttattattcattgtggtggtgactccacatctgtatgcatttgtcaaactcacaaacctatatgctaaaaaagtaaattttatgttaagtataccttaatttaaaaatgtttaaaatattgtatgaagcactttaagattctaattttaaatatgggtttttatagagatgcaaatgagcctacacttacacctcttctgtgggcaatgagtacacaaagccatcattttcacagaaacattaaaataccaaccaaatgtgcaccgggaagcacatacaaaatattactggaagcactgcctgtaatagcattaaaaaacaaaaacaaaacaaaacaaaaaaaacaggaaactacccaaatgtcaagcaaaaagaaaggagacaagctgcagtatagtcatataatagaaaactaaaaacaataaaataaatcaagtatatacaggcagatacactagtagggatgaattttttaaaaagtatacaaagtgtgacatcatttatactaacttcagaaacaagcaaaattaaacagtataatatcaagggatattttatatggtaaaaccatacagaaaaacaaaaggatactgaagagagatgtacgtgaggcacaagtatgggatataacatggagggtcatatgggggcttcaaaagtgttggtaatggctggtttcttatactagatggtcttattattatatagatgtctgctttacattttctaaattgcatatatgaaatatttcacaaatattatttcacaaagcatgtaaaatttaaacgaaaaccctgaattttgggcaattaaaaagaagtcttgactaggagcaatacaaaacaagcaaatatgagaagcaaaatgtagaagtttgtaataaacaaggacaatgacagaactgataaataatagatatgactgacaaaaaaaaagctcaaaaacaggataactttttttgttcaaaaagactggtggtagaaacaacagtaagaatccaggaagtgtagcaacacattttttctcccatatggccacttgactagccacacacccaactcctcatgcttggtgtggggggtggtggaaatcaatcaattaacttctttactcctagagaaggttgatgtcctcagaaaagacaggagtttaaaggaagcagagagggtgccttagaaaaaaatgaaaacacaggcaaatctgtttaaaacagattattctaaaaagaaggaaaagtagaaagaattgggagagaaggtacttgaggagaaagccaataagaaagcataacacattaagggaataattttgtgacactagatggctgggtaggtttttctttgcatgtggtaactaagtttttaaggataagaagcataactggaactaacaaattacacccttttttaaaagatatcaactagctgaaggtatcagtatctcaaaggggttgtgagaaagatctactttgcttcatgtcgaacagtggtagggcagtttctgggcaaaaaaaaccttctagatccccctccacccccgccccaaagttcattgagggctttgttctaaggttcaaggaaaataaggcttaagttaaattaaaactatttaaataaaaatttaacaacaatacattgcatctttctgcaacactcaaatgcaattggctctttgttttgttttcaaaacatgaatttaaatctactgcatttggcagctactctctgaaattaaagtttatattgagttactgtttgaaaacacaaagggagtatggagaaaagtatccaaaaaaaaaaaaaaaaccctttttattggtggcagtattaagggtattaagtccatttcttccacaaatacatagtagacaagatacagctaaagttagattggagccccttctctgccaaataactacatatgtgattagacacctcactgagcttttcttagcctgtttccacatcttaaaaactatcaatgactagtttattgtgagggctaaaaacaaaaagagttaatacatgcaaagcagagaacctggcacaaattccaagaaggaataccagactgaagagccctagatcacctatccctccaaattttttatctccaactttatgtgtcacaagcatttcactttcatacaaacagaaaatgagctggctcttattcaaaagtcccagccttgatgatcaattatttcactacctcaggtttatacacattggcctgcaatcctaccactcagaggcaattgtgtaacctaacttttgtggtaacagcgatactgacttccactactaaaacatgcttctctaggaatatggattgaaagtttggtagccaatgatttctatgggcagattccagtaatcttgttaataacctaatgagtttcaatccatttacacaccttactttcgagttttcattttatatttaaaaaaaaatttttaactcacgtttacccacaggtaaaagaagacaagtaaccatgttttctctcagaaatgtatgttactatcgaactctgggtgccaagcaagtaactagtgaacatcttacatgctttcatttttcctttcctacacaacttcatatattctacactatcttctactttcctacagaacttgacctattaggacaagtgatttaagaccaaaagatcaaaacacaagaatattaagtagtcaaataattaacagtagctgagtagctcaagaagacaaacattagtcagaaaagctggctgaaaaaatattaaagtcctctaagaagaatacttatttccacatacaacagaaaacaaggagacgatattgggcattttgtttcaagccttcctagaaacactgtagaatgtgactttcagccctatgtagggaaagggtaaatatataagaacctggaagaaagctttgaagtgagcatcctcttgaacggtagtgttctgatcacttgggaggagagggaacaggctctgaagtctcaccctttcacaaatcaccttgttaggatggccaggtagagatgctgaattggccccgggagatatctgggaaaaagaggaagaaaaggatagttcatggctagctgcaccaatgtggagaatcacgcctatgaaggatagtctggattttctaggtatttgatgattctgctagcgaagacaggaaagaaattaaaaattaattttaaacatcaaaacataaagatggcaaaggttgcctctggcaatggatctctcttacaaaaactgttggaggcaaaacagcacagcccaagaacaccacgtccttcctgtttcccaaatacctattggtaactttttctgctggtgttaattccgaaatcctaaaggacagacttcatgctaagaaaacccaaggtaaaattacatatcttaagtacagaaaggttaagtgtttgcctggaccaagattaatactttttctcattctgttttttagttaaccttccaaataatcatgcaaaggaaaatgacagatttaacaatatttgtggcaaattttctatagcaaacatatgtttgactgcagaaatctcagctctattcaacacaaacctaaagaccttcctaaggaataaaggacacaatcataagcacaaaagtaaatgactgccacatttccaatgcttgatttggccaatgcagtggtcacacctgtaatcccagcactttggtatgccaaggtgggaggatcgccccagttatctacaaaaattaaaaaacaaaaataaatgtttgacttgattatgggttaatcctcttaaattcatatgtaaatatacttactctgtaacattaaaaaaaaaatcatgaacataatgtgttccactgtgctgtgacagtgaattcttcttggggggttaaggctcgtggtcccttcttgtacctacactaaaagttacatactttaacatggtcttctttttagagtttcattgcctcattcattcactcaatcctacatttaagcatctatttggtgacaggcattaaaccaaaaacaaaggcatcgtttcctacttttttttttttttttttttgagatggagtctcgctgtcgcccaggctggagtgcagtggtgccatctcggctcactgcaggctccacccactggggttcacgccattctcctgcctcagcctgcagagtagctgggactacaggcgcccgccaccccgcctggctaattttttgtatttttagtagagacggggtttcactgtgttagccaggatggtctcgatctcctgacctcgtgatccgtccgcctcggcctcccgaagtgctgggattacaggcgtgagccactgcgcccggcccgtttcctactttcaaaaagtatatgctataagaaagaaacaaaagtaaatcactgcaggatgtaagtattatggtaacgctaggcactaggtgctatggagaagtagctgccaagagacagcagtgtagtcaggaaactgcaaaacgtttagtatggctagatagtaaggaagcagccagaaaccgatcataaaatgaaatgctattaatatccctgctgttaatatattaatacccttaccttccttagcctttttatagtattttgtttctgctttgctatggacctggtaaacagataactgtgcccactggtaagagtaaaaatacttccaaagactcacctagaagtaaaaaacaaagcacttgaaagcagaaactttagaattcattagttttctgtacagaatgttctgatctctatactacaaacatgaatgtgctatcctttaccattacgcagaagtatgcattgctgaatcaaggcgtatttactgactgactcctacaagccaagaattacattaggaatatagagacaggccaaatgcagtggctcacacttgtaatctcaaccctttgggaggccctggtgagagaagagcttgagtacaggagctcaagactagcctggacaacatagagaaaaccccatctctactcaaaaaaataagtaaataaataaaaattaaaaaaattaaattagtgtggcatggtggcacactcctgtagtcttagctactcaggaggctaaggcaggagcttcactcgagcccagtagtttgaggttacagtgagctatgactgcaatactatactccagcctggtcaacatggtgagacaatttctaaaaataagtatttgttaatctaataagatataaaaacatgggccctaacctcaagaagcttattctaacaatttttgaaacccagatgcaagcagccaactgtaacataatatttaaaggccataaaacagggaaaaattaggagtaagagttctgaattaatgtgaaggtaagagttaagatttcatagaaaaaggagtatttcacattcctgactcaatctaaggagggcttttgccactctctcaaaatggtttgcttctttatgtaggaatctttttgcatcctcttaagcttttcatttgctcattatgtatcctttgtagcgtgttatcctaaggccatcctgccttcaactatcatgcccaaagcagtcttacaaaattgctagtacaagtagctggctgggaaaagacaaatcaaggttatgtttcttctccttcattccttgttcctttgaaatcttaagatcttggtcatagacaaatgaaaaactggccaacctggtccctgtggccataattttcaagcatatcctctcctactcacaacagtttcctttgatcagaggctccatttgtcttaaaaaggatggaccaatataatggagaaaagctatattcaaaataagtctgggacaaaaccatagatgggcttgattaaaatgaggtacaatttttactactaggtaaaataaaatcacacacacacattgtgtgtgtgtgtgtgtgtgtgtgtgtgtgtgtgtgtgtgtgtgtggggcaggcagtcccatacataggttgcccaagattacctctggtgtccatctcctgtacaacccccttccccatgtgcgcaggcagggctgtgaatgtgatgtatttcattcccattattaggttaaatcatatgacaaaggaggaaagacgttcagatgtaatgaagattccaagtaaggtgaattcaagctaaagacagattatcctgggtgagcctgggcatgacttaatcagagaaagcagaactgagtccttcccaagagattctcttgccaattcttcagactaagatgttgtgagaaggcatgcgaaaggtaccatgtggcaggggcttgagggcagcttctaggagctgaaagcagtcaccagttgacgaccagcaagaaatgggggacctcagtcctataatcacaagaaccacattctaccagtgaacttggaaggagacacggatgaaatcacagctctgggccgggtacagtggctcacgcctgtaatcccagcactttgggaggccgaggcgggcagatcacaaggtcaagagatagagaccaacctggccaacatgatgaaaccccatctctactaaaaatacaaaaattagctgggcgtggtggcgcacacctgtagtcccagctacttgggaggctgaggcaggagaatcacttgaatccgggaggtggaggttgcagtgagccaagatcgtgccactgcactccagcctggcgacagagcaagactgtctcaaaaaaaaaaagaaaagaaagaaatcacagctcctgcaaggtaagaccctgggggcccagcagctaaccccataccaggactcctgattcatggaaattgtaaggaaatatttgtgttttaaacaaataaatttgtagtaatttgttacagaaaacacaatgtgtatgtatataacttgaataaaaattattgtaccacagtgaaaaagtttcttctccagaattttggctacactgatttgattacaaaagatataaaaattaacacatttttatttaagcagtatagcaggttttaaagcctcaatctggtaacagctagcttcatgccagaaactgaactgggctctcccatctttatacactgaacatcaggtttaacagacttgcttaaagtcacatacctcagaaatatcaaaaccataatctgaactcaagtctatcgaattctaaggttcatactcaacccacaaaaccaccttctactttaaagtaacattcttttttataatctagtttgattagtaagtatcaactattccaccaggcctatttaaaaccatttttagtacttaaaaataaacttgtttcctgaaaactgatataatttttctctaggctggcaacttttcagcattacagatttgctaactctggctttctcccagaatgcaacctgtatttaaaaagtcctgccaaggaaacatcctgagaccacattaagtctgcaactcccaaaacttatcatgtttaatgtctatttccatataatcatatgactaattcattaagcataactaagaaaaccctatttcacaaaactaaagtttacagaaaacagtttaaccttttaagcatcaacactactattttaggacatcctttgtttaatctggccattctgtgttttggtaacataaccaacaatttaacttttcttggagacttgcaggtattattagtaattatcgcactaaaattagcacttaggacaagacactgtcccaaaacatttaaaattgcttctgacaacagcatccttcttcgttcatttccttttttttttttctccagtaaaagtgagagagaggatacaggtacatgacttctaagccagtatgacataacgtacttctacaaaataaggtgttcacgaaggcccacaaagcattcttcagcataccaactggtcggtcaaaagcactaaaatcacagcctaatataaaagacgaaaacaaaacattagatgaggagtcaggtgcttagtgtcacctctagctacaagtctggttatctgtaaaataaagtcaaatccaaaactccaaatattctcaccacttccatgatagcaactgttaatctcttggaagtaattaggtagattaataatttaaaaaacatgtttgaatctctaatatttaaactgacaaattatcaggttatataccaaaatacgagaaaagccatatgcatgaatatggtcaccacagcacaataatagcgacaatttaaaaggtaactagaagcaacctaaatgtttaacaaatacttgctaagtaaaattacggtacacttgcttgaactatgcagccattaaaaagtagcaaccagaaacactactacttgggggaggagaaaattatttaaatgctatgatcataaggtagggttatatatgaacaggacttcataaattcaagaaaaaagttatcttggaatattaggaagaaaaacagagaactccctataaagattaaatagagcagccaaatcaatgaggtgacttgagcatacactcaggagaacatgtataagctccatgtcctgttcagcacaatgtcactaacacctagaagagtacatggcacatagcaggcattcaactatttattaaaagaataatcttccaaactgtaagcaaatgatgtaacagcctgcctttctgatttgtgtaacaagtttcttagaaatctggttggcaatgagacaagctaaaagctttgatcaaggaagagatctgatgcactcacctgcaggttaccattaaatgaagtcagtggttgcccagtaagtccaccccatcctactgaggcagaataaatcattgagctactgatgcatgctgtgctccttgctaggatttttttttttccctgttctgagaataaactagacctaaatgtcacctttcctttgagaagagttctatcactgggcctaaaacaaatctgtttccttggcttttgttttctgggagcagagttctctgaaaggattttgacagtgtggagcaggggtactcaaagtcccggatggcattcttcaaagctggtccaggagagaacactgcaaacaggaatgggactgtgcacgcttagagttatgcaaaaggcaggcctggatgggcacagggatctttgggggatgacagaaatgttcaaaatgtaaccaaaaaaatctaattgaatggagtgaattttatggtatataaaacataacttaataaagcttctttaaaaaaaaaaatcgagagcctggttctggaaaactgaggtccaaacactgggtagaactgaccctctgagatgttactaccctttgagatccaagacaaaatttctaagtcattcatctctaagcttcaacagttctcatacacaaatgacacatgaaaaagactgaaaggaataaaaaaaaaatcattctctcactacacaacggtcacaatttgctttatatatgtgtgtgtgtgtgtatatacgtatatacgtatatacacatgtatatatacgtatatatatgtgtgtgtgtatatatatatatatatgttttgtttttttttttttgagacagagctttgctcttgttgcccagggtggagtgcagtggcgcaatcctgactcgcacaatcctgactcactgcagtcttcacctcctgggttcaagcaattctcctgcttcagcctccagagtagcggattacaggtgctggtcaccacacccgactaatttttttatttttagtagagacaggatttcatcatattattcaggctggtttcaaactcctgacctcaggtgatccaccaacctcggcctcccaaagtgctgggattacaggcgtgagctaaaaaataatttaaaaataattttgaaaagctaataggcagtattaggagaaaccattcaaggactggtactatgtgggtgaggatgttcattactgcccagcaccggacaatcatttctaaacagaaattatggttcccactcttgagttaggcaaacaaacaggacccatctctttctgagagcacagcagaaatagggtgtgtgaaaacagcctaaggctcccctacttcctttccccagtccacaatcccataaggtgatgaaaaagaaggaaaagggaaaagaaaacagatgcaacgaaagaaatcctctatccattacacagagaatgcagaaataaagggtaggaaaaataagagttacatattttaaataaacttttctttccttcccttccaaaatctaaatttgcctacacaaagatttttctcccctcaaagaagtatgtctaaaatcgttttacttaggttggttaccacaaagaattacacagatgtgaaaaaatatctagaccacaaaagtccaaaccaataaaaaattttatacactctctccctctccctctctccaaacacacacacggcgcacacacatataattacttacacaataattgtgggttttacaatagttggaaaaaagaggtatgattgagttataattttattaaataacaatcataattcaaataattattgcttgcctgccatatgctggatgctgtgactacaaaatgggaaaaagaaacagtccttacccttaaagcaactcagtctagtgagggacaattaataacaggaactacaagaagataatagggctccataacctagatagaagaggtgaaaagttcagatccttaacaaagggaaagatctaaggcaggcaggctccatggcaaacacctgtagtcctagttactcaggaggccaagaaaggaggatcacctgggcccagaagttcgagtccagaagggacaacatagcaaaacccgtttctggaaaaactaaaattaaaaaaaaatttttttaatgaaagatgtaagagttgggaagagactgtgtacatgacccctcttcttcatctgtttattctaaatttctctcattaatttactatatagagttcaagtattaatgctttatctcctctagataacgtcgtattaattaacgtttgctgatgaactagacaagaactatactgttcaaatccatgtttacaatctgttcgctctttccagagaaaaggctgtgagttaagtagagtaaaatggaagtgaaaactgtctgacatgttttcttagcaggaaaaccaaaacaaacacaacgcaacaatcaagactaattaagaactacctttccagcaagatgaattacaaaatggtggtggcctaaaccaaactagaggtagtacagagaaataggtggaataaactagaagacataatcttgaccaataatctttccatactgagcaagtacctaatcatttcagaaacttttatcataagaatttctcacccacactttccactcacagcctcaaaaaaagaaagtgagcacaaacagaaacagcctaggaatgtaacatgaattaaaagcctcatccaatgctgttggcagagagacaacagatctacactctacattatgatgctaacagtcagttatgtctgactatgccatcttgtttactcttcatcaaaaattaggttattttagtagagaaaattctcctcaatattcacccagagtaatacttgacaatttaactataaaaacaagatgggcatataaagcccaacaagtatggaaatacgaactaccttctagaatcacagacgaagtcagaggtggaaaacccacagattatttaagtccaactttttttatattttacagatgagagcctgaggcccacatgacgagtctgtggcagaacttattcaactataggcgctaaggccttcaaatctcttagaaataagtcttacagaaatatcataaaaatcaacttaaaattgaatgaacaatgtatgattagcaggtttgcaaaaggtgaaatataccatattataaatatatataatatattatataataccatattataaataaatatattataaatatatatttataaaccccagagaaaggagtatctgaagtgacacaattcccaggtaaacttccagtcagaaatttcatctttttattccaagtgtgtcccagcttcccacacctgatctgacatctatatgtatgtggtttcgtattatctctacaaaagttctatttcttccattagacggtgttccctgaagataggaacaattttacttcgattccaactgtccctataaaagggaattttttttaaagcctacatacaaggtttgtttgctattgaaaaaaatttacggtaaattttcaagtataacaacactcgcaatcaaggccaaacagaatacagcagacttgcaactctaaggtaacaactgtattatgagctttgtatacatttaagttttcatacgttaagtccaccgcttaagaaaaaagaaatggcaattcatataatggtggcaataattacatgtgtgtgtttctacttacggtagaattagcatacccaacttttactgaataatagcatatatcatttttgcaacacaaagaaaaatactttaccttacaagccatacagacgtaaacaaaaactttatttctttttggacctcaataacctgaaacactcccgtttcaaaaaccaacctctctcacgcttcaaccctgaaaggaagaacttgcatcccctgagaacaaaacgcagcctatccagaaacccacggaagcagaaggacgccagagaggaccctttcgaccgggttccgcgttctcctgggtgacatcatttcacctgcgtctcggcaaaaagggagggagcgagagagcgaggccatctgccgggcagcgggccggcggctccgcgagctgagaccgcgcctcctcgccaccgcgggaacaaagagcgccgggcggccgaggcaaaccttagcccaagactcgggcgcggccccgcaggctctcaacggcccgcagcccgtcccgccctcgcgctgcagccaacggccgcggcggccagtacctgcgaggggaggctccgccctgccgggcagctcccgcggatcctcgctgggccgccgcctcctattgtgactgctcgcccagcccgcggccagctcgccagatccgccgtccgcgggcctcctcacccccggaaccccggctccaacttaggcactgtcactgcgcttccttcctcccggcaccatcacacgggccgcgccaggaaacgacggctgcacgcccagagatgacagagtcgcctaacgcctcggaggctccatcctctccgcccccacgccccaaccgaccgggcctcggccccgtcccgcaacaccgcactaggggcccggcccggccacgcccctccccgccccgccgcgccccgccgcaccccgcctcaccccgcctcggcgatcacagacccgggctccctatgcgccggcgcactggcctccgctgcgcgcgcaggcgactcccctcgccgctaggccgcgacacgcgcggtcctcccacttcttgggtccgggtcgcccgtcccaccccgtcccctcgccagcacaaacctagcgagcccagcgcgccagaccaccggagcgctcctcccttttcccccaggctccgcaccgcgcgccgaaccccctttgtttccaccccgagggggaagggggcggggcggggcggggcggggctgcgcgcggcccggcgcacgactcggaccagttccggcaacagagctccgcgcgcagcaccactgcgcagccccgccccagcccgccccccgctgccctgcggaccgcagggccctgttccaattcctatagattttctcttagtaaattgttgctactgttccgtgcctcctacctacaaaactccgcaatcaaacagtaactgacctcacgtagttcttacagcataaatgcattcacgtggcccgaaaagtaagaatttttattgcagtacacaaaggtgtctctcaatgcagcaagccaacaggttcgaacccaacttgtccgaggcttccttaagtgtgacagttgctcagatgtcgcttggggaggggaaataagaacaaagattgaagccggcttggctcctgtcctgataatcacgatacaagagagaaaataaaaatttccacaaaagcacaatccatacaaggaaaaaatagtaaagtggtatcagacttaaggagagagggcagtcaagaggacatcatggaaggggtggactttttaaagcagaaattagatgtttcccgcaaggatggtgatcatattttagggtggtagagtaaaattattaaggaccagtcaacagaaaactcgggttttcaagttctagttcttttggcattacttaaaccagtctctctttccctctctgggcctcagctgcaaccagtagaaaatgggggaaatcagagtaaatgttgtttcaggaccttctggaccttggacattctctttatgaacaacactatatggtaattatttatgtacacttgtctcccatatcagactgagcacccagactctgttgggactgtgtaaactaaacccaaggcccaagtctagtgccagaaacacaagagaaggtgtttagcaactgctgaatcaaagttccagcaataacatcataggttttggaattccaggacaaacaaagagaagctggaaagaggtattaggtccctatgaacatatccaccccaaacccatactcgaattatgtaacccagttaaccagctggctggctctctcccaaagcagccagtttggagatgatcacatctaaacttgttttttttgtttgtttgtttcacttcaaggtaaagtgccaaccatacctttaagtttatccaatgtatcctattttctatcctctgtatccctcacaaatcgcaatctactgtggattcgccttccaattacagatcttccaccagaatctaagcttaaaaaaaaaaaaaaaaatcctccctacagaacgcagaccaccctgaagtagcttttcctccaagcttggataggactatgtgaagagaggggaaaggggagaagaacatcaggaaaggaaagggaagttacatttgggagctatctaactgtaagagaggcagattcctcaagtgctgaactcagcagcaaaaatctattacagtcctccagcattcctcacctctaagcttcagcaaatccctctgagcttcagccaaccttttgtgaggcaagcttcctgaaacctctcaaatggttacgatcttcaacaatgctgtcacaaccccaggttggatagttttaaatttcttcttctttttttattttttttgtattttgagacacggtgctctgtcgcccaggctggagtgcaatggctggatcacatctcactgcagtctcaaactcctgggctcaggcaatccaggctaaatttttaattttctgtagaggcaggtctcactatgttgcccaggctggtctctaactcctgggctcaagcagtcctcccatattggcctcccagaatgctgggattacaggtgtgaactaccatgcacagcctctaatttatttcttaaccagaaaatcttaagccatgcaagtaaacacccaaagagcaggcaggcttttaaagtggtgggccacctttgacacctaatgtggcaggggctaaagttataccagagcagtcacttaactacagtcaagctaaaattttatttggtgtctgtccacaaaggtggaaagtcccactgcagaactaatagaactttctgcaatgacaaaaatattctacatctgccccatcgaaaaggctgccactagctagtgacatgtagctactgagcacttgaaatgtggctagtccaattaatgaattgtccaggatcagtttttaaagccacacagggctacgggacagtacagcatttgtaagaaaaggtgcttttggcaagagctttttgagaattctgactctgaggctccctttaaaaaactggttttcttgacaagtgaaaattgtgaatgactactgttattccagagctacccaagtcatttgagtcccttcaattttaaaataaaaatatatcaaaacattgcttactgaacaggaaaatgctgaagttccttcagatggttctggtagttattcaatgagattgtttactctggtgttctgccattctaatacatgggaataacagcagccactatacaaaaactgcataggattttagaactgatcacctagtgaacaaattcagcctattcttcaatgctaaatctcacccacttttcaccttttaaagaatgtgactctacaaattctcttttataccatcatgtttttctctttattggattattcctaacagaacacaaaaacacaccattaatttctcccatctttaaatctttatagttaatggtttcaggtttgtgtttctagttgctgtcattatcctgtttaagaaatatttcccttcacatgggtcataaagacattcacctatattatttccttagaatttttattattttctcttttccatttggatctacacatcacctgcaattgatttttggtgttggtgaggagggaatcaagtgccctcttccccatacggacatctacttgacacagcatcatatactgaaaaagacttgccaactgctcctttgtttaaaaaactgtggccacatatgcatgagtttgtttctgggttcagtagtctgttgcactgttctctttatccctgtgctgatccacaccatcgtcattactgcagctttataagacttcctttcatctgttacagcaggttatccttcagagtgtctacattatctctggccttttaaatttccataggaattttagaatcaaattatttcaaaagaaggaaagaaaaaaagacaaggaaaaaggtgaaattgctgggattttcttgggctgcattagatctagaaatgagttaaggaatataggaagattaaatattgtaaagatagcaatctataagctatttacttgagtctttaattctttcaataatgctttatagttttctatcaaggtcttgcatattttagttcttaggtttattctaggtttgttaatataattcaattattaattctaatagtttatctcagttcttttgagttttctatacaaacaattctgtttatatccttgtctacttggcagaaaatactggctgttccatttctttctttccaacatatactcattttcttgtcttagtgcactggcaacgacctctagtacagtgctaaccagacagctttgttttattccaaacctcaactgaaaaactgtcgacatttaagtacggtgtttgtagttttgtttttttttaagacccctttagaaaattaaaggagttctctgccatttctaatatattaaaaatttatacatgggccaggtgcagtggctcacacctgcaatcccagcactttaggaggtcgaggtaggcagatcacctgaggtcaggagaccagcctggccaacatggtgaaacgccatctctactaaaaactacaaaaaattagccaggcatggtggcacgtggctgtactcctagctacttgggatgctgaggcaggagaatcacttgaacccaggaggcggaggttgcagtgagctgaaatcgtgcctttgcactgcagcctgggcaacagagagagactctgtctcttaaaaaaaaaaattcataaatggatgtttgattttatgaaaaacttctgtatctacaagttaatcatatgacttttctgttaatatgtgaatttgattggtttgggggtgttaggaattcacatttctaatcagcccattttaggcttactgtattgctctaaatggttgatttggtttgtttagaatttttgcttctgtgttgagtgagtttacctgtaattttccatgtttataatgtccctatcaagttttgttacaaagacttatgctagcttcagaaaatgaatcagggagtactggcttgctttctattctctagaagtgtttctttaagactggtgttaacgccttctttaaatgtttgggaaaatttgctggttggctaactggacttggagttaaatttccttagatgtcctgttttttctttatttctaactaaggcaaaacaactgtaatcttaggatatatatataagaaagatctcattctgaaattcactatctgcttctagaaaaccatttcccaatcttgtgaatttgaagggtaccgttgctacaaatacattttaaaacacactaaacaataatcataaacaaatttaaataagtgctagttaatagtctgtcaaatggtaaatatacagtttatttttgtgaccagttttgcatttctagacatcaaggaatatctaaaataatggttatctgaaggatctttttacaaaaaagttgactatgaggttacaggctgtcctccttatccctctacacacttgtatcataacaccttacagcgtttatcaaatatctgtttcctcctgttaaactgtaagctcctcaagtctcagttctgctttgtttgtatatcactgacaccgatgttggggggaagaatggatgacggaaaatgcacaaaaatggaaagaggaccatctcctattttaaggcattgaaaggcatgattcaacagctacaggtaaagaaccacttgtccaaatgctgaagaaccattcacatggaaggaaatgtcaaaggaggtgctggggtaaagaatggcttacctgctggaagttctggacctctactaatgagaaggcagttcctcattggttaacactgtcagtactgttctgccatcacatccacatccaagtatccctactataatctcactccaacaacctcaatctctattgccgagttagtggcctctcctgtgtgttctaaaatagcattaatcattctgccttccaactttgtatttacttgacacttctgcccaataaatagtaaacttcttgaagccaaggactaagtcttaccaaatctggcaaggggttagcacataccatgtgcttaataaatagttctgttaatgatatgtaaatatttcacagcagtggctgattctacgtttctcgcttggtaaattcccaaggagaaatgaagcacaggaacaacagaaagcgggcagtgaaaagagaggaaaagggatgcagaaaaaataaatttcaaaatcttccctgaagctagctttgctgtcatccctaagtttcctttcttcctccaaaaccagctaaaaggactgaataacataaagctgcactgggccgggcgcggtggctcacgcctgtaatcccagcactttgagaggccaaggcgggcagatcatttgagctcaggagtttgagattagcctggacagcatgatgaaaccccatctccaccaaaaatacaaaaaaaacccaaaaaacaaaagataaagctgcactgagggaaaaggcatattggctgaacagcatttagcctacgcagtatctacaagcatgctacaacttgatctactactgcaaaacaatcagcataagcagtttcacccagaaatgttaacacaaatcaaagtagaaaaagttaattagtagcagctgccggctatagcagctagagaccagaagagggcagcaaaggctcacccaaatcgaagtccactgaaagcctcccatattatatagccacttatccagctttgaggtgaagagttagtcaggtggctgtttccacagtgcaggtgagagatgacttggactgaaccatggtagctggaatgacagagggcaagctcatggtagtgaaggtgtgaaggggctaaagcaggtggacagtgaaaaggcatcggccaggaaggagttcaaatgaagaaacctaagtgcctaggacagccaagtcagaagcagaaaaacagagacctataccaatcagaagtggagacccaagggcacaaataaagcatacactgcacatcacagcatattcaacctctagaacagggtaaccaggcaggagctgaccctgaggcaacaggcctccactagatggcctgctgtaacctatactctttgaagccacactcttgcttgttctgttccggagaacagacagcaccttgagctcaactgtatgctccagcagcttcatctcaggggcaatcatattctggcactacagtttttaccaaatccaatggagacccagagcacaaaaaaaagttagccacatacagatctaggttattcttttcaacaaagccaattctttctttgttagggaggaaccatctctgtattttttttaaatcctgtattacatttaggttgttctcagtgttttgctattacaaagctattattaatattcttgtacatacatatagtttggcaagcatttgaaaatatatccataaaagtacatttctagaagtagaattgctggttcaaacagtatgtgaattttcttaaaatttcaagatatattgctacactgcctcctaaaaggcagcatcaatttttttaattttttgaaacctgtcacccaggttgaggtgcagtgtcatgatcacagctcactgcccccttgaattcctgggggctcaagtgatcctcccgcctcagtgctgagtagctgggactacaggcatacaccaccacaacagacttaattttttttttttttttttgtagagactaggtttcaccatgttgccaaggctggcaatttttattcaaagcaaagctaactgatcacagtttggagttgaccctggaggggaatcagtagttttcagggtactccctgaggaaagataggctagccctatggacagcagtacgccaagcatcaggaagagagaagccctgagcagaacttggaccagtatacttttagtgaagccatatttcatatgcagctttaagttctctttgttctgatgcccttctgttaaatcctttattaaatattaatagcctaggaactaggcccaaactataatctaggagctgggcctaaacttgagccaaagtgacaccagtgagaacaccttagggaagctggtgaccaatgggccatgggtcaaaggactggctggaaggacaagcagtttacccaggaagtcccagaaatacctggagaggaaagccagacaaactgttcaactgaatttaagaaaagcaagcgctcaaatcattaagaattgggcattaatggaaaatgtgatcccaaaagccagtgaaataaggacttaaatgggttatacttacataagtgcttcaagaaaataaatgatgttatgcacatggccgggtgtggtggttcacctctgtaataccagcactttgggaggcagaagggagcggatcacttgaagtcaggagttcgaggccagcctggccaacatggtaaaaccctctctctactaaaaatacaaaaattagccgagtgtggtggtgaatgctggtaatcccagctacttgggaggctgaagcaggggaatcacttgaacctgagaagcagaggttgtagtgagccaagatcacaccactgcactatagcctgggtgacagagtgagactgtctccaagaaagaaagagagagagaaagggagggagggaaggagggaaggaaggatggaaggaaagaaggaaggaaggaaggaaggaaagaaggaaagaaagaaagaaaagaaagagagagaaagaaaaagaaagaaagaaagaaaaagaaagaaagaaagaaagaaaaaaagaaagaaggcaggcgggcgggcaacagaagcacagccaattagctactttacttttgggaaagaccacgaagagaagtcgctgaaaacagacatgggaatcacagtcttaagaagtttgagatgcaagaaacattcgaatgctgcagaccagactgcctgaacgtcttactatttccattatgttcaatgaggaacacactttctttcctctagggaattctggtggagctcaaatacctgtacagtcaataacttgctctagatgacacacaccctgctatagaagtctaacatcttgcattcatgaaatgtgaccagctcactaaaactgccagtgtttccactgatgatagttttaggatcctaacacgaatggttttgcacagacatatgtgatacacggtgcatctccacaaaccctgtatcctcctgcccgtgccacattctacaggccctccagactttaaggaaaagaaggaaatatgtgggcagatttctaatttgtactacaaaacaaatcataatattaagtaaatctcttaaggcagtacaactctttgtagagtaaatataaaatttaagcttccataggaagcttatttatcttcccctggcttgcttgttcctgttgcaatagtgtcttgtaaataaaacaaaataaacttaggagataatgacattttaaagaccaacaaaataatctccaataacaacaatctcaaaatacctatcattacatggaatctctaatcagatattttacaacaaagcaaagtgagaatctactgaaaacacagtgggtcacataatcatatactaaataaattccaggtagataagaaaggataatgtaaaattattaaaacttttagaaaatacgggtaaatatctgaatggagacagatttcctaaacctaaaggcaatgaaacactacaaaagaacatatcacaatagatttgttcctcaaattatttatttatttttatttttgaaatggagtcttgctctgtcgcccaggctggagtgcaatggcatgatctcggctcactgcaacctctgcctcctgggttcaagcgattctcctgcctcagcctcccgtgcagctgggattacaggcgtccaccaccatgcctggctaatttttgtactgtgagaagccatgccaccaggaacaaagggaaatctatgaaacctgctggcagatctacaacatggaaatggctagcaagatcaacttcttgatgtaaaagaatcaggcagaaccgaggcaggaatgctgaggcctgcggataagacatccagtatgaaaacacccaaccagtttttgtctctatctcttttctttcaacaaccctattttctattactattctctaaaataaatcaatcacgtttccaagaaggcctccacatataaaaacaatcctattagtcagcagtggaccctctcttttattaagtgaaggaagaaatggagtctgaaagtagtctaggagtagaatgttgtttcccaggggctggaggaggcaatgaggagttattgtttaatgggtagaatttcagtttaggaagatgaaaaagttctggagatggagagtggtggtggctgcacaaaaaggtgaatgtactgtatgtacttaatgctactgaactgtacatttaaatggttaagatggtacattttatgttatgtgtattttattacagtaaaaaatgtaacttatgtaataagtgaaaatacatgtaaatcatgtctagtaaggggttaatatccagaatatataactcctaaaactgaacagcaaaaaaaaaaaaaaaaacctgattaaaaaatggcaaaaggaagtgtaaatgaaaaccaccatctcacactcattaggatagttactataaaaaaattaaaaagaaaataacaagtgttggcgaggatttggagaaactggaatctctctgcactgttggtgggaatataaaatggtacagccactatgaaaaacagtatggcagttcctcacaaaataaaaaactgaattaccatatgatctagcaattccacttctgggtatataccaaaaagaactgaaagcagggttgaagagatacttgtccacccgtgttcatagcaacattattcacaatagccaaaaggtggaagcaaccccaagtatttatcaatgatgaataaacaaaatgtgatgtatattacaatgacattttttttccttgagacagagtcttgcgcaatcacccaggctggagtgcagtggtgcaatcttgggtcactacaacctccgcctcccaggttcaagtgatcctcctgcctcagcctcctaagtagctgggactacaggtacctgccaccacactggactaacttttgtatttttttttttttagcagagacaaggtttcaccatgttggccaggctggtttcaaactcctgacttcaagtgaaccaccacctcagccctccaaggtgctgggaatataggcatgaaccaccacgctcagccttacaaaagagtattattcgccttataaagaaaggaaattgtgatatatgctacaacatggataaaccttgaggacctgctaactgaaataagccagttacaaaaagaaaaacagtgtatgattctacttgtatgaggtacatacagcagccaaattcagagagacagaaagtagaagggtggtcttttataaacatgttgtattatgccactcctttgcataaaaccctccaatggcttctcgaaaaagcagaataaaatctagactactttccctggcttacaaagaactacatgggctggcccatgcccacctctccaagctcatctcataccattcccaatccgcatccaccatgcttacaaatatcagccttttgtttccctcatctttccggctttagggattttgcactagctgtattatttcccttaaatgttctttccatgaccctgattttcacctgaattgttacttattattcagatctttgccaaagtgtcaggttgaaggccatcttcaacacctaatagagagcagctaactacccaattacttgcacaacatgaatcttgaaatgaccatgtgatatggtttggatatttgtcccctacaaatctcatgtactgtaatccccagtgttgcagatgggacttcgtgggaggtatctggattttgcgggtggatcccttatgaatggcttagcgccatccacttggtgaagagcgagatgagatctcgctttggtagtccacgaaagatctggttgtttaaaagaacatggcactggctgggtgcagtggctcacgcctgtaatcccagcactttgggatgccgaggtggatcacctgaggtcaggaattcaagaccagcctgaccaacatggtgaaatcccatctctgctaaaaatacaaaaattagggtcaggcgcggtggttcacacctgtaatctcagcactttgggaggccaaggcgggtggatcacctgaggtcgggagttcaagaccagcctgaccaacatggtgaaaccctatctctactaaaaatacaaaattagccgggtgtggtggcacatgcctatagtcccagctactcaggaggctgaagcaggagaatcgcttgaacccaagaggcagaggttgcagtgagctgagatcaagccattgcactctagcctggacaacaagagcgagagtccatctcaaaaaaaaaagctgggcgtggtggcaggtgtctgtaatcccagctactagggaggcagaggcaggagactcatttgaacctgggggggcagaagttgcagtgagccaagaatgcgccattgcactccagcctgggcaacagagcaagactccatctcaatttaaaaaaaaaaaaaaagcatggcatctccccacaactctctctttccctctatcaccatgtgatatcgcctcctttccctaagcttcctgaggcctcaccagaaaccgatgcggcaccatgctttgtataaagtctgcagaactgcaagccaatgaaacttttctttataaatttcccagcctcaggtatttctttatagcaacacaagaacagactaacataatcatgctcaatgagagaagccagacacaaaaggctacattttgagatcccattttatgaaatgtacagaataggcaaattcatatacagaaatatcagtggttgctgggagcagggggcaagaaataatgagaagcatgggatatgtttctgtttgtttgtgtcacctatggtttctttcagcagtattttgtagttttccttgtagaggtctttcagctcttaggtctattcctagttttgtttgtttgtttttgcagctattgtaaaagcagttgagttcttgatttgattctcatttggtcacttttgttgtatagttcaagcccattgtttctttgttaactttccatcttgatgacttgtctagtgctgtcagtggagtattgaagtcctccactattattgtgctgctgttttctagtagcaattgttttgtaaatttgggagctccagtgttaaatgcaaatatatttaggattatgatattttcctgttggaccagtccttttatcattacataatgtccctccttgtctttgttaactgttactgctttaaagtctgtttcgtctgatataaggatagcgactccggatagcgactcctgtttgcttttcatgtccatttgcatggaatatcttttttcactcctttaccttatgtttatgtgagtccttatgtgttaggtgagtctcttgaagacagcagatacttggttggtgaattcttacccattctgccactctgtattctttgtggagcatttaggccatttacattcaacgttagtattgagatgttagctactattctattcatcgttctcgctgctgcctgaatatcttggtattttttccttgtgttattgttttataggccccgtgagatttatgctttaaggaggttctattttggtgtactttgaagttttgttttgtttcaagatttagaactgggctcacgcctgttcatcccagcactttgggaggctgaggggggcagatcacctgaggttgggagttcgagaccagcctgacctacatggagaaaccctgtctctactaaaaatacaaaaaattagccgggcgtggtggcacatgcctgtaatcccagctactcgggaggctgaggcaggagaatcactagaacccaggaggtggaggttgtggtgagccgggatcgcaccattgcactccagcctgggcaacgagagcgaaactctgtctccaaaaaaaaaaaaaaaaaaagatttagaactccttttagcagttcctgtagtgctggcttggtggtgtcgaattctctcagcatttgtttgtctgaataagacttttatctttcctttatttatgaagcttagtttcactggatacaaaattcgtggctggtaattgttttgtttaaggaggctaaacataggactccaatcccttctagcttgcagggtttctgctgaaaaacgtgctgttaatctgacaggttttcctttatgcttttccctaacagttcttaaggttcttttcttcatctttattttagttagcctgatgactgtgtgcctaggtgataatctttttgcaatgcatttcccaggagttatttgagtttctcgtatttggatgtatagatctctagcaaggccagggaaattttcctcaatcattccctcaaataagttttccaaatttttagatttcccttcttcctcaacaacaccaattattcttaggcttgatcgtttaacataatctcaaacttattggaggctttattcagtttttttcttttttgtcacactgggttaattaaaaagccttatctttgagccctcaacttctttcttgttcaattctattgaaattttccagtgtattttgtatttaagtgtgtctttcatttcctgaagttgtgattgttgttttattgattttatttctctggagatttttttgtccgtatcttgttttttttgtttttttgtttttttctaatgtcagaggaaagatctggggctcaatagctgttgttcagattcttttgtcccatggggtgatcccctgacatggtgctctcccccttcccctagggatgaggttcctgagagctggactacagtgattgttgctgctcttctgcatctagccacctagtagagctactggggtccgggctggtactggggagtgtctgcaaagagtcctgtaatgtgatcagtatcccggtctctcagctgtggcatctgctccgatggaggtagcaggggaatgaagtggaccctgtgagggtccttggtagttttgtttagtgcactggttttctcaaatgctggttgtgctggcagtgaagttgtaacatggacagactcagaacctctggttagctaggatgttacaggcagtggaatttgctattattttctcctttcttggtgcagagttgttcttttatgagttgctgtaatggcttcagttggttggcctccagtcagaaggtggcgctttcaatacaacatcgactgcagtagtacggggcgggggatacaagtttgccctaaggtcacttggataagtattctgatttatcaggtgatgggtggcaccatagagctctcaagatattatgtgttttgttttacgctaccagggcggaaaaagaccatcaagtaagggccaggttaggcatatctgagactctccttgggcggggcttgctgtggccacagggcggagggagggggagggggtgggagatgggaggatgggggatgggggtgtgattctcaggccaataaaattgtattccctgggggattatggttgcctctgctgcttcaaacagatcaccagggagttgggggcaagctggcagtgacaggcctcaccgaattcctccacaaccagcaaggccggtctcagtcccaccatgccctgacaacaccgttatatccaggcagccttagagcaaggctgagattttgccccaggctacaaaagcccctgctgagaaagcaggcaaggatttcaggtcttgcccctccctgcctgccctaacttctgtgccagtatctgcactttcggtttgcccactcccaaatattgcccaggaaaatttgcactcagtcaaaattattacaaagttaggctgtaagttttcttctccctgtggtccttccccatttctaatggcagcctttcccaagaacccctggtaagataaaagtcagaaatggcttccctggggactagaagtgtctacagggctccttcttgctgctgcctcgatattttttttttttttttttttttttttttgagacagagtcacattctgtggcccaggctggagtgcagcggcaccatctcagctcactgcagcctccgcctccttggttaaagcgattctcctgcctcagctgcctaagtagctgggattacaggcatgtgccacatgcccagctaatttctgtatttttagtagagataggatttcgccacgttagccaggctggtctcgaactcctgactgcagatgatccacccaccttggcctcccaaagtgctgggattacagcactttttggctgggagccaccgcgcctggccttgcatcaacttttatatttcatttggctctctaaattcgtatcagctccaggtaaggttaaatccttctcccatgatctggattttcaggttccccagtgaggatgtgtgttcagaggcagactttccccctcttcactttgggcactcacagcttttggctgtctcatggaatttgcagcgacaagccgcttatttcaaagggtctgtgaataatttcggttttactgttatgttcctgcggtagttcttgaagcaaaagttcacgatgtgagtctccacacactgttttgtccatccgagtagaagctgcaagttaatcctgcccgcttttgatttaaaattatacatcttacttgaattctaacagtaggttaacttttatttttgatatttgaactatttacctaaaagtaccaataataattctataaattaacaatacttccatcactttttttggttttggagacagaatctcactctgtcacccaggcgggagtgcagtggtgcaatctcggttcaatacaaactccacttctgggttcaagagattctcctgcctcaaccttccgagtagctgggattacaggcgtgcaccactacgctcagctaatttttgtatttttagtagagacagggtttcaccatgttggccaggctggtctcgaactcctggccccaagtgacctgcctgccttggcctcccaatctgctgggattacaagcatgagccaccaaacccagccacttccaccactttttaaatgaaacactgcttaacttttacaaatctagttcctatcttaagctagagaatctttctctaccaaggtacaatcaaggaacttgattttacaaggatgaaaaacatttcatacaaatatggtaagaaaaaacaatctgttaatactgaaattccaattgttatttctcaggagagaaactgaatagagtgctgtgtttgtttttacaatcaatatgtgattttttttttttttttggagacagggtctcactccatcacccaggctggaatgcagtggcttgatctccatgcaacctcaagtaatcttcccgcctcagcctcctgagtagctaggaccacaggtgtgtaccactaggcccagctaattttgtattttttgtatacacagggttttgccatgttgtccaggctggtcagctggtctcaaactcttgaggttgagtgatccactcatttcggcctcccaaagtgctgggattacaggcatgagccactgcgcctggccaacaatcaatatgtaatttttaaaaattaaaaagaggccaggcatgatgattcatgcctgtaatcccggcactttggaagaccaaagcaggtggatcacttgaggacaggagctgaagaccagcctggccagcatggtgaaaccccatctctacgaaaaaaaaatacaggctgggcgcagtggctcatgcctgtaatcccagcactttgggaggctgaggcgggcagatcacttgaggtcaggagttcatgaccagcttggccaacatggtgaaaccctatctctactaaaaatacaaaaattagccaaatgtggtggtacgcgcctgtaatcccagcaactcaggaggctgaggcaggagaatcgcttgaacctgggaggcggaggttgcagtgaggcgagatggtgccactgcactccagcctgggtgacagagcaagactctgtctcaaaaaacaacaacaacaacaacaaattagctgggcatggtggtggtgcatgcctgtaatcccagctactcgggaggctgaggctggagaattgcttgaaccctggcagtggaggttgcagtgagccgagatcacaccactgcattccagcctgggcaatggagcaagactccatttcaaaaataaacaaataaatactaaaaagtaaaaagatcaagaaaaaggaagtatacagtcacagaagaaaaactggtacatctcgagcaaaaatctaaaaatccaaaatctgaaatgctacaaaatccaaaactttctgagcaaagatttcacactcaaaggaagtactcaatggaacattttggattttcagatttgggatgctcaaccagtatataacgcaaatatacaaaacctgaaaaaaatccaaaatcccaaacacttctggtcccaagcattttagataagcgatattgaacctgtaagtacattttccatcttccctgaaggcagtatgcatgggattacttataccacaagctggatgggtgcttttttccaagacaaatgaatgaagcctactataaggaattcttgtcaagaaagactcctgctctgaatcagtacacataagcagtttaggaagaactcttctattttcgtttctcaaatggccatcctcctggcaatgtatcaagaactctgaaaaaatatataattgaggctacaagttaattcacctcaactgagagaatagtcttatcaaattcttcaatattttatctcattctcaggtcagacctagttccccagctcaagcttgttgtcactgtgaaaatgtgactattttcaaactgacattagctgagttaatttcagtatctaagtgaaacatgactacaggtggcacggcatctgtattcccagctacttgggaaggctgaggtgggagaatcccttgaaggtgggggcagaggtcgcagtgagcagaaattgcgccactgcaccccagcctgggtaacaaagtgcgaccctgtcacaaacaaacaaacaaaaaactcgcacagaattctgaacctgacacagggtagggatgacttggcaaggagcctggaataacaaatagtcatgaatcagaataaaggcctgggggcaagaaaaaaaactaccgagaaggactggtgccaatggttcagttccactgtgactctctgaggccttctccacttgcagatatgtttctccaagcatgtcacagttgaatgggtgaagttaaaataggaataggtttcttcaaacagcagagtacagacttgagcaaggcagcttgggatggaatcccagtgtactgctgtgtgatcttgggtaaatatttaatctgtgcctcagattcctcactgataaaactggaataaagcagtccctacttcaaagggtgttgtgactacctggttaaaaggacaaccttcggccgggcacggtggctcacgcctgtaatcctagcactttgggaggccgaggcgggtgggtcacgaggtcaggagatcgagaccatcctggctaacacagtgaaaccccctctctactacaaatacaaaaaattagccaggcgtggtgacaggcacctgtagtcccagctactagggaggctgaggcaggagaatggagtgaacccaggaggcagagcttgcagtgaactgagatcgcgccactgcactccagcctgggcaacagagcaagactctgtctccaaaaaaaaaaaaaaagaggacaaccttctcccagtacttctatgcccccttccctgctttcttattcttcacaacacaaataatcagttaacaatatctttattgtcttgcctttccccactcacagaaagcaagctgcataagagcaaagacttctgttttcttcaatgcagtatccccagtatctagaacattgctctgtatgtagtagctactcaaatataaacgtttgccacctagaaattatggaatatggccctgtgaacgaatgtaaaaataatgctggagggcttgtgcaaattgctgtgcccaatataaattaatgagaatttgtaactcacaggatttaataattaacatcagagctggaatcagtttcttccagcactataaactataaacagatacatatcaggagagaaactttaagctggagaacaacagatcaagccaaaaaattggggattggacaccacctccaaggctgtagagaggatgtccaacaaataaattggccctcatactccttgcctgaactgtggttccatccccagtcacacatggattagttaaaagtgagaaaacttataagaaaaatcatgtaagaaaaatcatcttttcttccccaatctgagaaatacaccatgcctgaaagataggcaaagacaacaagcaaagaatcaacacgttttgacaatgtgctcagaatacctaagcaaatattttatataacttgcattcgatacagaagatctggtctacccctagcactgtgggttacccctgaacaagtaatttctcccatggtggtcacagctcccaagtttatttttttttaaagcaggttggggccaggcatggtggctcacgcctgtaataccagcactttgggaggctgaggtgggaggatcacttgaggtcaggagtttgagaccagcctgaccaacatggagaaacctcgtctctactaaaaatacaaaattagccgggcgtggtagcggatgcctgtaatcccagctactcgggaggctgaggcaggagaatcacttgaacccgggaggcggaggttgcagtgagccaagatcacaccattgcactccagcctgggcagtaagagcgaaactctgtctgaaaaataaaaataaataaataaaataaaaataaaaagcaggttggcgtaaacgtgctctatgatccctttaattctgagttagactatgaagaagtggggaagggagagagagtgagtgtgcagagggcaacaggttcattttagtttttgcaaaaccaatacccacgtgtcatagaaagacgtcagggggctgttgtatatgtagcgatctgatttttaaatatgatatccacccactctcctccccagaataacacctgatgatcctgttgaaagctataatctggccaggcatggtggctcacacctgtaatccaaacactttgggaggctgagttgggtggatcacttgaggccaggagttcgagactagcctggtcaacatggtgaagtcccatttctactaaaaatacaaaaattagccaggcacggtgatgaacacctgcagtcccagctacttgggaggctgaggcacaacaatcacttgaaccaggaggcagacactacagtgagcttagatcttgccactgcactccagcctgggcaacagagggagactctatctcaaaataataaacaaacaaacaaacaaacataaaaatgcaaaaaattagctggccgtggtggcacacgcctgtaatcccagctactcaggaggctgagaatcttttgaacctgggaggcagaggttgcagtgagccaagactgtaccactgcactccagcctgagcaacgaagggagactcagtctacccaccaaaaaacaaaaaaaaaaaaacaggagagaaagaaaggctgtaatctgtaacttttcttttatccacttcacttattgtaaaatgctatactagaatctatctgttttctatctggctgtattccctaaatgcctagacacatagctacctatcgataagtactacttgctgactgaatgaattgaataaattctaaatacatagtcaagagaccctaatccattttctccatttccatttaggaaacaatcaatatatacatggtaggcaggaagaaaggagagtcgtttcagacagttctttaccctgctgatctcctgttccttaataatattccttaaacttctcttcccttttttcccccatatttccagaaaaatctcctgtctcaaaagcacaaaatcagctatagaaaagattaataaattagaaaacaaaaacattttaaggggtgacaggaagtacctggcaaaggtagacaaaaagcttatcttcagaatctaaggtctggagacaacccggagggcagtctggcttctataccataaatgaacaaatggatactagcataacacacttagcagaagaaaaaaaatttaacccaaaagcaccttcataattatgaagcacaatcacttgtaacattagtaacctaaaatgattttgccttctccctctatcatcactcttaatttcaaatgctcatttctaaaatctgtagtatacaaaattttctgtagccaactatatattctagaagtctctttcagtggcttgcctttgaaagaagttaaaaatgaaactcatgtctcttgattggtacaataataaaggagactctggaatgctataagctaccactctctgtaaagagagtgaaatcagtctgaacaaagctcacaaagacagagaccaacaaacagaacaaagaaaccatttggaaaatcccaattatcaaccaacttcttgatccagctccaacacaatgagagaggaggatcttgatcaaaacagcagagaaaaagactgcttagattggtctgcactggaaactaccaagggagtgatagattcctgcatataacacgcagaaaatgggagggaagccactagaaattgatggtgaaaaagactaaatttaagtccatccagatcggcagccagatgttccaaacgcccagctcacagaaatatttactgcaagggctgggccgtcaagcgtactgatgagtattgaaaagccccggccgggcgcggtggctcacgcctgtaatcccagcactttgggaggccgaggcgggcggatcacgaggtcaggaaatcgagaccatcctggctaacacggtgaaaccccgtctctactaaaaatacaaaaaattagccgggcgtggtggcgggcgcctgtagtcccagctactcgggaggctgaggcaggagaatggcgtgaacccgggagacggagcttgcagtgagccgagattgcgccactgcactccagcctgggcgacagagcgagactccgtctcaaaaaaaaaaaaaaaaaaaaaaaaagaaaagccccccctagagaccaggtttctttagagataaaaagaacaaaagcaaaaaacacaatgaaaccaccaccaatagtttggacataatttaaaatatatacatatcaggcccaaagtagacttcttgtgtatgaaccagatcgattcaactgacaatccccaatatttaaactggcctttgtaaacagagccaaaaaaattttttgaaggtaaagtataagaagaaaacataattcaatgcaattaatgccaaaagtgaaccaaaatgtaatgtccaggatatttccaacatgagttgctgagatagctatcaacctctgaaacacatgttcgtatattaagataatccattcaggctttgcagaagaggaagcaccacgatggggacagaggcataggtaggaaagtggagtgttgatcaaaagtccaacccacctcgggttgaggaatttgccctaggttttctggagcagtcaataatttgacacacaaaccagcaaggccctcagcatctcaacaatgtgtccccacaaatcacactcttcttgccctaggcccagagttacgcaagagaatccagcaacgtaaggttggcatgcattttccccatggcagacatcaacacgaacctcaccttgtcactgtcatcatgacaaatgtggtcgtgatggatggactggcactgaaaagaagcaccaacactacctacaagaaaaagggaggaaaggttaagatgcagtaattccttacatttaaactgctttaccaattaaaagtgcttttacatccatgatcccatctaataaaatactcatataagtagacactgtggggattattattcatgcattttaacagaggaaaacaaaacacagagaggctgacccacacaaaggaccagttagggagtggcaggtctaaaactacaactccattattcaaactgctaattccccctctttctactagaccgagtagtctgctttcaaagtaagattacctgcagaaacacaagccttcaataaggcaaactcttatttatgaggaaaaatattacattccttttcagactacacatgctttgagaaaaaactggtcctataaattctaaacatataagaaacaatctaatctacaatcacataacactttaaatgtttttattattttaaatgtataccaaatatacccatttgtaaattttaaaaactaccttccaataacaactgctctttaataatagttacatttctagccaataaaaacacaaactattcaacaagtgattggaacaacagattacccattttttttaaaaaaagttttggtttgtacttcataccataaacaaaatggtgagtcaaagatctatgtaatgtaaaaaatgaggccagttttagacaaaaatgttacatttttaaaataatcttagaggccaggtgcagtggcttaggcctgtaatcccagcactttgggaggccagggcgggtggatcacccgaggttaggaatttgagaccaagctggccaacatggtgaaaccctgtctctactaaaaatacaaaaattagccacgcgtggtggcgcacccctgtaatcccagctaatagggaggctgaggaaggagaatcacttaaacccgggaaacaagaggttgcagtgagccaaccaagatcatgccactgcactccagcctgcatgagtgagaccctgtttcaaaaaaaaatgaaaatgaaaatgaaaataatcttggaataagaaaaaccttctgaaagaagatattaaacattaagtcataaataaaaagcacacgactgtggaccaaaggctaacaaaacccctcctgagtagctgggatcacaggcacacgccaccacgcccagttaatttttgtatttttagtagagacggggtttcgccatgttggtcaggctggtcttgaactcctgacctcatgatctgcctgcctctgcctcccaaagtgctaggattgcaggcgtgagccacccacctggcctcagacagtacattttaagatattattaatgttgggaagatgttaagtaacatgaggctgaagactgtaagtgaggatcacctgcttatttactattacagtaagagcttactgatacttccagatatgtagagcagaaaattctctttcagaatcggatttgttttgttttgtcttgttttaaacaaaattagacacaattcacatactacacaattatctattatttaaagtatacaattcaattttttttttttagtatattcacaaagttgtacaaccatcatcacaattttaggacattttcaccaccctaaaaagaaacctcaagcccatttatctcttccctgagccactgacaaccaccactccaacttctgtgtatttgccaattctggacatttcatataaacagaatcataaaacatgtggtctttgtaatcaggttcattcacctaccataatgtttgcaaggttcatccacactgaaccgcgtaccaatccattcctttctatggctaaataatattccagtatatggatataccacattttgtttcactctggaaatattaagactaatgctgttttgacatccatttataagtttttgtgtgaacgtttattttcatttctcttgttgggtcacttgatctctctattcaaccttttgaggaactgccaaactgttttccaaactgacggcatcgtttataattccaccagcaatatattacagttcctctggcattttttgagtagaatgactttggagtcagacttcaatacaattcaggaatttacagactatgtgaacttaggtaagtcacttaacaaatcatatgcctccctcatctgtaaaattagaatattattatctacttatatgtaggtaatctacagagctgttctgagagatattaaagttagatgtatgaaaaagctcatagcacagtgcctggcacacagcaattcaagaaatggtactacaattaacacttctattcacatcaaggctgtgatttacctgtgagacactgcctaagtcctcaattttttttgctagagctgtttcattgccctcattttttgaggaggaaggggaagagataacatgtctgtctctccagccacataataggctccctaatttatcttttcatcttccagcatgcagcacatttcctgactcatggcaagtactaagtaattgcaaaagcaaagcatgagagaaaagaaataaaagaaagagtttttaaaagataaaaaggaaaaggggaagaaaggaaatgaagccttcctgatttctccctccctttcctagtctacacttccatcagtccctccacctacagaccccaatgagatttaatgacctcttcctcctttctcctgtacaagctgcttagcccttgttatcaaaattcctatgttgaaacctaaccccaaatgtaagggtattcggaggtggggtgtttggaaggtgattgggttatgaaggcagagagctcatgaataggatcagtatccttataaattcaatcccaaagaatccctcacccttttgccttgtgaggacacagcaaaaaggcactctctatgtaccaggaagcaggccctcgccataatgaatctgggttccttgatcttgaatttcccagcctctatctatctatctatctatctatctatctatctatctatctatctacctacctatctattaatttatttgagatgagtttcactcttgttgcccacactggagggtagtggtgcgatcttggctcactgcaacctccacctcccgggttcaagcgattatcctgtctcagcctcccgagtagctgggattacaagtatgtaccaccatgcctggctaattttgtatttttagtagagacagggtatctccatgttggtcaggctggtctcaaactcccgacctcaggtgatccgctcacattggcctcccaaagtactgagattacaggcgttagccactgcacccagacaaatttctcagctcctaaaactgtgagaaataaatttctgttgtttataagccacctagactatggtatttgttacagcagcctgaagagactaaggcaggccttatactacaataaaaaaatgaggccaggcgcggtggctcatgcctgtaatcccagcactttgggaggcggaggcaggcggatcacaaggtcaggagatggagaccatcctggctaacacggtgaaagcctgtctctactaaaaatacaaaaaattagctgggcatggtggcacgcacctgtaatcccagctactcaggatgctgaggcagaactacttgaacccgggaggtggaggttgcagtgggatgagatcacgccactgcactccagcctgggcaacagagcaagaccctgtctcaaaaaaaaaaaaggataaaactgtagtacaactattgtttacatatatatatatatatatatacacgtataaattcaatttcccctgctggaccacgaccacatgtttttagagtcagagactgagccttggtcatctttatgatctccgtaacatacatcaagttttgttcaaagaaggccatacttaaaaagtttacttaatacataaagactttgagtaacagcattattctgaccttaggcctaacaaagaaaccaaccaagtgaagcaaggggcatatgacaactgaataaatgtaacaagacaaagctgggggaagtgacctctcttcttacattcagggctatatttcttgaaaggtccattctaaagacagccctgagcatttactgagtatctactcagtatgtaccagacatatgtacacaagacaaagcaaaaagcaagcaaggcccctagctccatggagcttacagcccagtagagagcatttgcctgccatcctaaagactctaatctcactcccactccagaaatttcatttctgcaattgcttaattcattaagtaagtacttatcaagccctcgctacatgtcaagtctaccctagacactgggaacataggaataaataacacaaggtccctgctcttcatgaattttactttaaccaattctataaagatgcatttctttgccaataattctgtgaaatacccgtatgctctaacttttaaataaattttaatagtaacatgtgtacataagcttaaaaagtaaaaaaagaatgaaatggattatgatgaaaaaagaatcccattgccttcttctctatccctagtctcccttcccagaggcaaatattccccaaatcttacaggcattccctccagtattgaagacaatggtcctctcgtatctgtgggagcttggtcccaggacccccagtggataccaaactctgcagatgctcaagccctttatataaaatggcttagtatttgcataaaacctatgtaaatcctctcatatactttaaatcatctctagactacttgtaatacctaatacaatgtaatgctatataagacacagtggctcacgcctgtaatcccagcactttgggaggctgaggtgggaggatcatgaagtcaggagtttgagaccagccagtttgagaccagcctggccaacaagatgaaaccctgcctttattaaaaatacaaaaattagccacgcatggtggcgggcacctgtaatcccagctactcgggaggctgaggcaggagaattgtttgtacccaggagtcagaggttgtagtgagctgagatcacgccactgcactccagcctgggcaacagagcaagattccgtctcaagaaaaaataaattaattaattaattaacaaacagtaattgtactacagttttactcatttttttaactgtagtattgttgtttttattgtttatttttcctgatattttccatgcagttggctaaacccaaggatgtggaacctacagatatagagggccaactataatatactttatatgactatttcttggttattaattttataaattgtttattgaatttctagcatactatcatcagataactaaactattccacccctcctaccctactctcacccagtcctccaacataattatgtagtattttgtgtttttatcaagaggatggtcactgaaattccagaaatagataagacctcctaaagagaaggtgtaatcagagaaaagcagaaggccaagaattattattattattattaattttgagacagagtttcgctcttgttgcccaggctggagtgcaatggcgcgatctcagctcactacaacctcctcctcccgggttcaagcgattctcctgcctcagactccggagtagctggaattacaggcatgcgccaccacgcctggctaattttttgtatttagtagagacgggttttgccatgttcgtcaggctggtcttgaactcctgacctcaggtgatgcacccacctcagcctcccaaagtgctgggattacaggcaagagctactgtgcctggccttaatattttttaaatactgaaatgtattggaggaaagaggtagttaatgaaggagataaaagaagagaaagagccagaggaaagaaagaatatgtgtggagatataagaggaccaagaaggaaatgtctgatttgattgattttcttgtgtgttaatgagaggctagtagtgaaaggactggttctactttgtatttttccatttgaatggaaatatgaggacttcgggcggcgggggtgcggtttccaatttccagagcatctccttattcttcttgaggagagataaagagaattcagacattccgaatccaaacaaaaatctggccctaatgaggattaaaaaaaaaaaaatcaacatggcttttctatactctcacaacatttctggcacacaatttatgagttgtccacaccaagcaatccttcagttctccacggacatcacttgaacatcctataattctaacactaactacccatagttaatgtagaccccaaaggtaaagggctcagtcccacaagactgcctcccacttcagatgccaattgcaagtagtgggtcctcaggctaaccacaacttttgtcagtttggctacaaatcagaggttcccaacaccccttcttctgattcaataatttgctacaatggctcataaaactcaaggaaacatctataatcatgcattgcttaatgatgagaatacattctgagaaatgcatggttaggtaactgaatcgttgtgcgaacatcataccagagagtcaggctatatggtatacttagacaacagggcataacctactgcccctagagcacaaacctgtatagcacgttactgtactgaatactgtaggcaactgtaacacaatggtatttgcgtatcaaaacacatctaaacatagaaaaggtacagtaaaaatatagtattataatctcaggggaccagtcatatacatagtccctctttgacaaaaacacattatgtggcacaagactgcacttttgtttactggtttactataaaggttaaagatgaacagctaatgaaagaggcacatggggttaagatatggaggaaaggggaatgggcagagcttccatgccctttttaggcacaccatcctcccagcacctcaatgtcttcaccaacccagaagctctccaaactctattatttagggttcctatggagattcccttaggtaggcatgactgataaaaatcattggccattggtaactgaactcaatcttcagcccctctcctctctctggagggatgctgggttgaaagttccaacactcaaattgcatgactggttcctttggcaaccaccagccctcatctagaagctatcaaggggcccaccaagactcacttcgttagcagaaactcaggtatagctgaaaggagctaattacaaattaagacgcttctctcaccccaatcactcaggaaattcctagggttttaggacctctgtgccaggaattagggatgaagaacaaatatgtattttttattatatcacattatcacagtggtccactccttgagttgtgagataaataatctaattcccttcgtattctcccatggcttaatattaatctgggtattaagttttttttgttttttttttgagacagagtctcactctattgcacaggctggagtgcaatggcacgatctcgtcttactgcaacctctgcctcccaggttcaagtaaatctcctgcctcagcctcccaagtagctgggattacaggggtgtgccattatgcctggctaatttttgtatttttagtggaaacggggtttcactgtgttggccaggctggtctggaacaccagacctcgtgatccacctcctttggcatcccaaagtgctgggattacaggcgttaagccaccgcgcctagctaaatattaactttcttatccactcataacttcccattttacaagggtcaatggtaaaattcaaagaaatactattggccaggcgcagtggctcatgcctgtaatcccagcgctttgggaggcagaggcgggcgggcggatcacaaggtcaagagattgagaccatcctggccaacatggtgaaaccccgtctctactaaaaatacaaaaattagctgggcgtggtggtgggcacctgcagtcccacctactcgggaggctgaggcaggagaatcacttgaacccaggaggcggaggctgcagtgagccgagatccagcctggtgacacagtgagactcaaaaaacaaacaacaacaaaaacaaaacaaaaaaacaaagaaatactatttcagccattcaggagaaaatgccagttacatatatggtaagcatgagtcatcactattaattactatttattataactattattttcactattaccatttatgataactaaacataacacacttattttacaatttagtacctataggaattcaaatctctaggctaagaaacctgaaatctctagtatcttccctaactattaaataagatgagaaggtaaattgctgctgtgatttctagtatagagaaaagattgatattcacagtggagataagagagaagaatgatagctaccagaggctggggagggtagaggaggggctgggtgggggaagtaaggatggttaatgggtacaaaaaaaaaaagagtaagatctagtatctgacagcacaacagggtgactatagtcaacataagtttaattatacattctaaaataactaaaaacagtataactggattgtaacacaaaggataaatgcttgaggtgatggataccccccccttaccctaatgtgattattaggcattgtatgcctgtatcaaaatatctcatgtacccccataaatatatacacctactaggtacccacaaaaattaaaatttaaaaatttttaaaaaagaaaacatagggccaggcacagtgctcatgcctataatcccagcactttgggaagccaagacgggcagatcacttgaggtcaggagttcgagatcaggcatcgtggtggacacctgtaatcctagctactccagaggctgaggcgggagaactggttgaacctgggaggcggaagttgtagtaagctgagactgtgccactacactccagcttgggaaacagagtgagacttcgcctcaaaaaaaaaaaaaaaaagaaagaaaatataaatgactttggacatatacaaatgttaaacttttctcaaaagaaaaattaaagtaaaaatgacaccttgtcacccaccaaatcaataaaaagcaagaagtttgataacacactatattggagaaggtataaaaaaacaggctctcaaacattgctagtagtagatatataaagtagtacatcttctaaaacgagtaatttggcagttaactgactcagtgaaaaatacttataacttttaggccaggcgcggtggctcatgcctgtaattccagacttagggaggccaaggcaggtggatcacaaggtaaggagatggagaccatcctagccaacatggtgaaaccccatctctactaaaaatacaaaaattagctgggtgtggtggcacgcgcccataatcccagctacttgggagactgaggcaggagaatggcttgaacctgggaggcggagattacagtgagctgagatcgtgccactgcactccagcttgccgacagagcgagactctgcctgagaaaggggaagggaggggaggggagaggggagggggggaagggataggggagaaggggaggggagaggagcaggagggggagggggatgggggaaggaggagggggagggcaggggaggaggatggggagggcacgggaggaggaggggaaggacttttattttttgagatggagttttgctcttgttgcccaggctggagtgcagtggcaccatcttggctcaccacaacctccgcctcccgggttcaagcgatttctcctgccttaacctcccaggtagctgggattacacgcatgcgccaccaggcatgcctggctaattttgtatttttagtaaagatggggtttttccatgttggtcaggctggtctcgaactcctgacctcaggtgatctgcccatctcagcctcccaaagtgctgggattacaggcatgagccaccgtgcccagcctacatgtaacttttaaaccagatattccaatcctaaaagtacatctcacaaacatacttggccctcaaactgatgtgtgtacaaattatgcatcacggtttattgcatgcctctcaagattagaactggctccatgagggcaggaaattcccttgccttatacattatatcccaagtggaaagaatagtgcctggcacatagcaggtgatcaatatttgctcaacagaatgagtaaaatcaattattttaaaggcttaaatgcccaccaataagagaatactctgcaactataagtggagggtgggtgggaagaggaagctctttatgtactgataaagaaaaagctccactatatactgtcacagaaacaaagcaatgtgtggaacagcacagtgggccaccactgtggaaaaaagtggggactggcggaggtacagatgtatagaaactgatcacactgtctctataagtctagggagaacaacgaagcaggacaggcatcaaagaaagccttttcactgtatgctttttcctatttttaaatttttgaaccatgcgaatatattacctatttaaaaaataaactttagaaaagagtggtcttactctaaattacagtggttataatatgaagcagattgttaaagatacttgaggttgccaagttgaaatgcaaggcaaacacgagagtagtaatttttaaatgagatgtgacctatacctaagaattatttgtattccaaaacaaaaagtaaaaattaagtagaaatttactctaataatttatattattctgtgaagtcaatatagttgtttgaataacaggcatcatttagagggagaaactgaatttgaaaaaacaatagttaatgatcagtactggttcttaaatgttcaaagacactgaacgtgccttggccttagtgaatggaggtttttttttttttttgagatggagtctcgctctgtcgcccaggctggagtggctggagtgcagtggcgcgatctcggctccctgcaagctccgcctcccgggttcacgtcattctcctgcctcagcctcccgagtagctgggaccactggtgcctgccacgacgcccggctaatttttcgtatttttcatagagacagggtttcacggtgttagccaggatggtctcgatatcctgacctcgtgatccgcccgcctcagcctcccaaagtgctgggattacaggcgtgagccaccgcgcccggactctgaatggagtttttatacaccacaaacctaatccagttctttgcaactctttttgtatccatgagaacctatagatttttacttcctaaaaaagcacttgtttcaaaatggcaaaacaattcatttaaatgttaagcttcctatatgaggctacaggcacttaatattaaggatagactctgcgtgtatattcacagttgtgtaaacaagtttatagataaatctttcattcaaattaggcttttatcaaaattaagttgtaaaaggatgttttggtaagggagatgccaagaatgtaaagagtgggtagaaaagtaaaatactgagaaagtacattaaaaaatatctagggaagtcaaatgatctcaatgggaaagctgacattaaacagtgataatccaaacaagaagagacctcaattcagtttagaaagagcttagccattcagctccttttctgaaagataactgcctattattaaaatagtaatgacagactcatatagcatagtctagattatcatattagattcatttataccaattttccttctattatttgtggaaaatatataacttacagacgcaatagtaagaaacacttaaaatcgtagctgggcgcagtggctcacacctgtaatcccagcactttgggaggccaaggcaggcggatcatgaggtcaggagattgagaccatcctggctaacaaggtgaaaccccttctctactaaaaatacaaaacattagccgggcgtggtggcaggcgcctgtagtcccagctacttgggaggctgagggaggagaatggcgtggacccgggaggtggagcttgcgtgagcccagatagcaccactgcactccagcacgggcgacagagcgagactcctcaaaaaaaaaaaaaaaaaaaaagaatgggaacataagtataatataaaatggataatcatccatcctttagttttgccatggcaaccagggttggtaatctttgaaagctgttttctgacttcctagttctaaaacagagaaggcagttttctaccaccagagaagccaaaggtcagactcttcctttttccctcttagctattcctatgcagataaacatttgaggaggcaaataggatatgatgagtggctgcttaacaaggccacttgggctgcagtggcaggcggccagccctttccagccctttccttcacgcttgctcctggcactgcagctgagcaaggcaggaccagggagagaattcatgtgtcaatcttactatcaaagatgcccctccccaaccaacatcagaccagtcatacaatgtatttggttttgtctcaacatatcttacaattaaaatatcttctcattaactcttggttctttatgaagatgatgcaagtgagcctaaatataagtaaatcaactcaagaggaaaaatctacatagcttggtcagttatagttactgggtatctcacctaaaattagtcccacatcattggttgtaaaatgttaccctccatctaggaaacaaatcattttcacctgagctcaaagctttctaaggacaacattctaaaaaccgaagaagaaaagtcagatcagacaaatttatagaaggagcaaggttgaaaaaaaaaaaaaaaaagaagaggcgcagacaaatcaatactactagctgacaggctgagctaggtgctggcaaggaggacaaaaatcaacaaaatatggtccttacctttaagcagttttcaacttaggaagggaaacaaaacctacatgtcagctaataaccctaaagtaacttgtcaagatggtttacttcagactgtaagtgcaaaggcaattcagtgagtctattaaagacacaggaaaagtcttaagaggtaggtcttaaaagaggaggaagaagaatgatatagcagccaatgctaattcttaggcaggagtctgtgaagcctaagaaattttacaaaaaggtttgtaggcataaatgtaccatttttctgtagaggatgttggttgttttgggttctttgacactgagtctcactctgtagccccacgatgcagtgcagtggcgcaatcacagctcactgcagcctcaacctcctgggctcagtcttccagcctcagcctctcgagtagctgggactacaagtgtgtgctaccaggctcagctaattttttattttttgcagagacagggtctatgttgcccaggctggtctcccaacttctgggctcaagagatcctcccatctcagtttcccgaagtgctgggattacaggagtgagccaccatgtccagccaagggtgttgctttttatcagaccttcaaagtagtccaagattctcaaaaggtagatccgatactctaaataagcttgtccaacccgtgacccatgggctgcatgcagcccaggaaggctttgaatgcagcccaacacaaattcataaactttcttaaaacattaagagactttttttgtgattttttttaagctcatcagcaatcgttagtgttagtgtattttatgtgtgccccaagacaattcttcttcttccaatgtggcccagggaagccaaaagattggacaaccctgttctaaaatattcaagattcctccctccacaccttatcccaatacacacttacaagcagaagagtttcagtacattcagtgtttttgtctacaatagcaaagcttcacggtgctgaacaaaagacctagataggttagcacactcaggcatttacttatacaaagctaaaaagggagtgggatgacaatggtatttctacctgaaagaaagaatctcctcttacccagctgaataggtgagagacttgacatcttcccctgctcgggaagagatgtcctctctcctcctctcactaccttagagagctaggggcctagagaagggcaaacaatacatggggcaaaatattttacaacatggacatgagagcttaggaactattatcagagatttctctcagccttgagtactgctaaacacacatttatattaagtgctctctactctcacaaactagaagaagaggttaaaataagccacaggggccacctcatattatcatacttcaaatctatgcagaatagagctatgcatgaaaagcaatgagggcggggtgggaggggactattgaattcaaataaacaagaagtgatttattgaaatagaacacaaaaattatattctagctaattctaacatcacaagaagtgatttttaaaatacaaaaattatattcaagctaattctaacatcactggcaggaaaaacactttacttgctaatagtatatgtagacctagatgtgagatgtgaaaaagaaaaagattttgcagtaagacaggcttgagttttaatccttgtccttctattcgttagctgtgaaaccttagatcttgaacaagtgaccctcatttttttttccttaccttcaaagaggtgtgacacctatgatacaaggttgttgcgaagcttatatgacgtatgtaaagaacacagcactgtggcacagaaaatggttaataagtggttattcctatatcaatcgaaaatagccaggcatggtagctcaagtctgtaatcccagcacttcgggaggctgaggtgggaggatcactagaggtcaggagttaaagactagcctgaccaacatggcaaaaccccgtctctactaaaaacacaaaaattagccgggcatggtggcacacacctttagtcccagctactagagaaatcgcttgaacctgggaggtggaggttgtagtgagccgagattatatcactgtactccagcctgggcagcacagtgagactctgtctcaaaaaaaaaaaaaaaaaaaaacttatcaatagaaaatgctaacagtaccaatctcctttctccaaatcaccacaaatttgtctggcataatttgtaactgagaacattttattggtatccattgatatctatatactatttattatacagcctgccttaaagttactgacatgggccaggcactgtggctcatgcctgtaatcccagcagtttgggaagctaaggtgggcagatcacttgaggtcaggagttcgaggccagcctggccaacatggtgaaaccctgtctctactaaaaatacaaaaatcagccaggtgtggtggctcgtgcccataatcccaggtacttgggaggctgaagcaggagaatcacctgaatctgggaggtagaggttgcagtgagctgagatcatgccactacactacagcctgggcaacacagcaagactctgcctcaaaaaaagaaaaagtggcagggcgcagtggctcacgcctgtaacctgtaatcccagcactttgggagatgggcggatcacctgaggtcaggagcctgaccaaatgtcaaaacccagtctctactaaaaatacaaaattaaccgcgtgtggtggcaggtgcctgtattcccagctactagggaggctgaggcaggataatcacttgaacctgggaggcaaaggttgcagtgaaccaagattgtgccattgcactccagcctgggcaacaagagcgaaactccatctcaaaaaaaaaagaaagaaaaaaaagaaaagaaaaagttactgacatggaaaagttaccaaaatatactgttaagtggaaaaaaaaagcaagttgcagaataaataaataaggccctgttatctaaacatagagactagaaatacatacaaactgctcacagtaattatccttgaaaaggacaatggaactgaggacacattgatctattttgtattgtttgcatcttctacaatattaagcactatttgcttaattaaaaaccaataacaaaaggaaaaaaccactagtaaaatgaaaattattcacacaaggcacttacataatctcagatactttgggaggctgagctgggtggatcacgaggtcagctttaaccttcctatgcaacacttttattccccccaaatgcctcatggtctgacagtcttgaaaactccatgggcagacacatttttactccacctgcctgccaatctaatacactcaaggctaagttgagcatggctcctttaaccccaatagtgactatggagtgggagagtcgggtcctgggaggaaagagggtgttagaagaaaagatgagaaagaaaaagctcaatggaaaagaacatacctttttctattttgtaatgtactaaggttacaaaaaggcctttgtccatcccagcagacacttattgtgaccttagctatttatatgcaacaaaaactctccaagaatgtcagctaagtgaaagataaaatttacataatttcattttgcaggcttttcatctgttctgggttactaaattaccaattttttttttttttttgatggagtctcactctgtcacccaggctagagtgcaatggcatgatctcagctcactgcaacctccgcctcctgggttcacacgattctcctgcctcagcctcctgaggagctgggattacaggcacgcgccaccatgccggctaatttttctatttttagtagagcggggtttcaccacactggctgggctggtcttgaactcctgacctcgtgatccacccagctcggcctcccaagtgctgggattacaggcgtgagccaccgcgcctggccccaaatcttttaaaatactgattataatataatatcacctaggatggatttcaccaaacaccacaaaggtctaagatgcgttcatatacatactcctcaattaaaaacaacaacttgtgcacctctttcaaaaaggcttgctttgggaagttaacactattgctctatgacacctcaagtccatctaaattagcctgggaattgaccttctgttcaaagaaatcacagctatttaaggaatgacaacttctaagaaagattattttctagtatattaaggcatttgtacttccaaactgatttacagtgaacatcagattataaacctatttattatcactgaatattagcctactcttagacactaatgataattctttctgaatacatcagtttaaccttgtcattcccctacataggaaccatcaatagcttcctcctacttataagggggggagggggagagtcaaatctgtccatcaggcattccaatcttcctaatctcatcactaccaactcttgccaaagccttagctcaaaccggctgtcaacttcctgttctttgaactcaccgtaatctgactgaatgttctcatactgttagacccatctttaaaactctacctcaattctgccatccctcaatatccaactcaagcctcaaaaaagctagatggtatcatctcccctatgaacttttagcaatgactactattggagcttgggggttcattaaataaaatcccttccctccatccacctacccactcatttctggaaaaagggagaaatatgaccaaaaaagtcagatagtgaccaaactgtcagcttaattataaagctcatattttaaaaatacattaaaaattaaagacacctgccaggcgcagtggctcacgcctgtaatcccagcactttgggaggccgaggcgggcggatcatgaggtcaggagatcgagaccatccaggttaacatggtgaaaccccatctctattaaaaatacaaaaattagccgggtgtggtggcacgccctatagtcccagctactcgggaggctgaggaaggagaatcacttgaacctggaaagcagaggttgcagcgagccgagatcgtgctattgcactctagcctggcaacagagagaggctcagtctcaaaaaaataagtgtctgctggaattgagcaattcgctcacccaataacagtagcagttggaaaactataggcctacccacatagagatctgtttctggaaaatttgcagcttccaagaataggctacaagtggctggctcctaagccctgcctagttgctcacccaaattcttcaatgagattagtaagtcctcctctgggcgcaaagagaagccaagggaattacacagtgatgtccctccacatggaaatgtgaacctagaagaaaagaggtgtccatcccccaattacggctttgtttcaaacacaggcttatgccacttctatggatgccttaaaacgttatttttaagtatcatactgtttttaatatgtttgttatctccacatagattaagctcctagagagtgaaatattaaatggattgtccgcaggcatagtgatggcaagacctggagtggggacagcaacactgtgagccagataataaaatctctgatgaattgaggggtgcaggatgagagaaatgtctgtgcctagagctttaatagaagacagcaaaaaggggttatagggaaaaatagcataaacctcaaagaccgattttcacacgaagatattaaagcaatggctgaaagttgcaagagtgagaaaaatatcaatgctatatatttacattaaaaaggaaaaacaaagcaattctatctttatattatttatatgcacaatacaacaaccactcagttgttgggacacagaagactcaaatgacaaaatgacaattaggaatcactacaaatagataaagacttaactaacattcaatgctggaaaattatttcaagccatcaaaccatatagaccagaaagcaacaaaaagaatgtaattaaaatgcaaaaaagaaatgaacttaaacgctgaaaggcaggcataaccactgaactgaaaaaaaataggatggtaaacagactcatccatctggtttccatgactaatgggaacagaggtgctcagggagagcgagtggagagaaaacaggaggttacggataagaacatggtgaatatacacagaagataggtgttgcaaattgaaatgtacagagacaaaattaactacagtcaacttttggctaatgaatgagtgaagtcactcgacagaaccaagcaggctggagccagcatgttcccctcccagaagagcagctctaatgatcactgccacaggaaaatggacaccgaagtgaagccaggtcatcttttccccaaaaaagccacacattcagattttaaatatttttattgttagcaactacaataatgttttcaaaacactctgagggccaataaaacatctgcaaacaagatttgacagtcagctagccattcttgatttaggacatggacaaagaaaaagccacaaaagcacctgaaaagaagtaattttaaaaaaggacggtgaaagatcaggatagaacagttcactgaaaccaaaggcaaagggtttcaagaaaaaaaaatgagggttgcaggttggggggaagggagagcatcaggaagaatagctaatggatgctgggcttaataccaaggtgataggttaatctgtgctgcaaaccaccatgtcacacgtttacctatgtaacaaacctgcatttcctgcacttgtaccctggaacttaaaagctgaagaaaaataagagtgattaacaggaagttcaattaaaaatcaagaaaaaggccaggcatgatggcacatgcctgtaatcccagcactttgggaggttgaaacaggcagatcatttgaggtcaggagtttgagaccagcctgaccaacatactgaaatcccatctctaccaaaaatacaaaaattagccagaagtggtggtgcacacctatagtcccagctacttgggaggctgaggtgggaaaatcacttgaatccagcaggcagaggttgcagtgagctgagatcgcaccactgcactccaacctgggagataggagtgaaaaccctgtctcaaaaaaagatttgaataaataagggaataccacacccctcaaataaaatgccattagtgctctttagtaacctgaaaatttaaaatagtttcatactgcagctttaagagccattctcttttttttttttttttttgagacctatcagtgatcgccagagatttctggttaatccactatccctcagacccaaacaaatcctgcataaactacaaaggttcaaatctcctggactatgctaggggacccagaacacctggagccccactggggttcagcatccacaagggtgacacttcaccgtcttttgcgatgggacagtctgttgtgacatgatgcttccattctagaatgacagagaaggtacgcacttacagacaacctatcagcaataaatagcaagtactggaaccaaagaacagaaaaaaatccaggtagaatgaagttgatcatgaaatgctttctgggaaaatttgaacgtagcagagaagttgaacatggtaaggataaagacaagagtcatacaaagtagattttgtggccaggtgcccccaattttgagacatatgatttcatgtttttcttttcaataatggttatttaactgcataattacttatttgttgcattctttttcatattaataattttacaactaaattccttcatcagaccttctacacaatttgagtttggataactggtcaccatatgtatgaaagcaatggaacccatacgggtatagagatgcttatgaataaattggagttgggatgagagagagtgaaacagtccatgctaagacaggggaatcaaaccacaagccagaaccactggaggatggtgaagggtagagagaactagctggtaaaagactcctctaaagtaaggaggcatgcagctctctgaaaagccagccgacaactccttactccagtttttcaatctactacttcagattgccagctgatatcaaggagtgtcacaagacaccgtaaggtgtcacaaaacaccacagctttaacatgtcacctgaaatgacagcctagggaaaaatgtattcagattcttctccctttcaactatcaggctcaaacgattccccctgatgtggaacttcagagccgttgccacacagtgtagcacttagtccctgagttgttttattctcccacgtgcattctgcttgaatccagtccttgtcttccatctttcccgcctcttaaacaaagttttggctcttacacagggaagtccaccaagctttgtgatgtgctacaaactctcaggctgttctgtgtggtccatgagcacacctgaacctctgatcatgtcaggcagtttcccagtgacttagccctgcccaagcgttaactatgccagcagcctctgctaagaattctggcccctcaagtacaaactctgggaatgttacactgatttgtatcacaaaaagggttagtttctgttcctggagtttgaaggaaaccagttaatatgaagcactcatataaacagcaaggcttctcccaacaatctgtaagagttgaggacaacagaaattcagtacaacagtttacatgaaatgcttttttctcccctgtgtttcctgcacaagaaaatttgggacaagggaatggtttggaaacaactgtttctttctttcttttattaaagtacaaattaaatctgaaaacactttattaagttgaaatacacatcggcccaggcgcagtggctcacgcctgtaatcccaacactttgggaagctgaggcagaaggatcacttgaggtcaggagtttgagaccagcctgggcaacatggtgaaaccccgtctctactaaaaacacagaaagttagccaggcatgatggcccccgcctgtaatcccagctacacgggacgctgaggcagaagaatcacttgaacccaggaggcagaggttgcagtgagccgagattgcaccactgcacttcagcctgggcgacagagtgagactccgcctcaagaaaaaaaaaaaaaaaaaaaaaaaaaaaaagtcaggcatggtggctcatgcttgtaatcccagcactttgggaggctgaggtgggcggatcacttgaggtcaggagttcgagaccaatctggccaatgtggtgaaaccgtctctaccaaaaatacaaaaaaaaaaaacatagctgggtgtggtggcggatgcctgtattcctagctacttgggaggctgaggcaggagaattgcttgaacacaggagatggaggttgcagtgagttgagatcgtgtcactgcactccagcctgggcaacagggcaagactgtctccaaaaaaaaaaaaaaaaatttaaatctgattaagtgcttgtgattaagtgtggccaaaaattttgagtaaggagtctcatcactgtgacctaatagcccaattttagatgactcctcctgtatttacacagacctctgcatacacctatcacaatacatcacactgttttgcttctccttctagaccaaaagttgcttgagagcagaagccatgacttacatgaattgattaaaagcctaggacagtgctgggcacacagtaggtattaaacagtcctgaatggaaagccatgatacgaattcatttaccgtaaattcaggagacgaatttctaactaaaattctgctatctctaaaggattccaaatcagcagtaaatagctgcacacctcaagccctaaatgtgtaggcatctgataatatataatactagtaagtggtcagtaacaaccaacctgctaaaacaggtactaaggaaaggaataagccaccgaagaagcctaatgaaaatatgcattttaatataatctgaactcttcagctgtcttaggatacttggtacagtattcaaaataacaactgagtacctacagaaatgtaaacataggaagaatggccaactaccatttgctttctctcaaactcaatgaccttagggtccagaccaagaggaagcttgagattttaacactgggaagaattactaactgtattaataggactaaatgaaaatgcattcaactgaacttcataattgggttttgttttcactgtgtgcattaactactctcataggcaaccaagagcagcggcttctaccccctaagttcttctgaactagaagtataacagagggcaattcatcactgtaatattgaagcctacatgcagctctgcagtgctgaaaagagcctttaaagctcatcacatctacaattttacaccaagcacaaaaggggaggtgacttacccaaaggcacacagaaacttaatgacagggtgagggcagagtgaggacagaactggtcttcttaaggcctgggccagcaatctaccaccccaaaccaaccatatccctgcagccactatgtttgtattcattgtgataaactatatctaagtattaggcaagcacaaatgtaaacataaatgatcaaatatagcagaatcttcttaaccagacttctcagagctgtatgttctagctgacttaatcttctggttaccagagattgatattgaaaaacgaacctcacaattatcatcaggaaaaagaaaacaagggaaacaacaaacaacaaatactagtcctgtccttagacacatgcagagagctgttttctttttggtaaatctgtgctataaagtagtggtggtatagtacaaatagtccagccctatcaataactgactagttgtgtgatattattcaagtcaatctctccgcaactcagtatttacacctttaaaatgaagaggcagaactagataatgtaaagtgccttccagctctgaaattcaaagttcttcagaaattgcctgccccacccccagataagttctaaatatattatctcaggttgaaacagacccaaatgggccgggcgcggtggctcagcctgtaatctcagcactttgggagacagaggcgggcggactgcctgaggtcaggagtttgagaccagtctggccaacatggtgaaaccctgtctctattaaaaatacaaaaaaattagctgggcgcctgcaatcccagctactcgggaggctgaggcaagggaattgcttgaaccagcgaggtggaggttgcagtgagccaagattgtgccactgcactccagcctgggcgacaaagcgagactccgtctcaaaaaaattaaaaaagaaagaaagaaagaaagaaatagacccaaactataaaccagttaaaacatacaactgatacctagatctcctctacaaatacttgtaactcttattaataatggctttttggtagaattattttttctgtatcaccatttacacaagaactactcagagacttgccatggtttaaaacatttgggaggcttaggcaggaggatatcaaggcaaagtgtttgagaccagcctgagtaacacagcaggacctcatttctacaaaaaataaaataaacagccaggtatggtagcacacacctataatcctagatatttgggaggctgaggcaggaggatcacttgagcccaggagtctgaggttgaaatgagcagtgattgtgccagtgcactccagcctgggtgacagagtgagaccctatctctctcttttttttcctttttttttgagatggagcatcactctgtcgcccaggctggagtgcagtggcgcgatctcggttcactgcaacctccgactcctgggttcaggcaattctcctgcctcagcctcccaagtagataggactacaggcgcgtgccaacacgcccggctaattttttgtatttttaatagagacggggtttcaccgtgttagccaggatggtctcgatctccgaatcttgtgatccgcccacctcggcctcccaaagtgctgggattacaggcatgagccaccgctcccagcctagaccttatctcgtaaacaacaaacacaaaaacatttgcaggtcctacaattaagcagaagcaggggaagttgctcaactggatggaagaagctttgtggacttctcactcaggagttccaatatcatgttttatttttcatagttctgctatttgatataattttggaagctcactgatttaaaggctggtctaggtctttctccccataaaatacatagtattgacaaacatattcgctctgttcacaggaactgcactattgaattccctcatgtatttatatgcgatcatatactatcataaggctatccctttcttttgtattttttattgtggtagaatatacataaacttcaccattttaaccatttttaagcataaattcagtggcatgaacctaactcttcgaaacccaattataaagcttagttgtgcaaccatcatcactctatttccaaaacttttttgttgcccccaacaaaaaccctgtacccagtaagcagtaacttcccactcccacttgactttttttttatataattatattctcaaaaggcttaataacttttaaactgtaatatgctgccaccaggtggcaagagagcaacatggctgccctaaattgggaggaaaggcagggaaccactagtactttctcccaagaattagaaaagttaaaatttcactcaccaaaaccacctaggtacataactataaatttctacatgttttaatttccctctaaaatctataataactaaactcatgcaaactgcaaacaaagaatttcagggaacaattttaaaaccaaataaaagctcaaaatatagaacttggtgagtatttcctaacttaatcatcactatacctattcaattctcaaaattaacctagagccaggcgcagtggctcatgcctgtaatcctagcactttgggaggctgaggtgggcgaatcacctgaggtcaggagtttgagaacagcctggccaacatgttaaaaccccgtctctactaaaaatacaaaaatggcctggcgtggtggttcatgcctgtaatcccagctacttgggaggctgaggcaggagaatcacttgaacccaggaggtggaggttgcggtaagccgagatcgtgccattgcactccagccaagccccacaggttgaggcaaaaatcaatcatcacaaaagtgagataaccagacaatatgagtctcctaatgacagaacagaactcccttatgatgtagtcttgcattccccaattccaaataaagtatacttaaatacgactgaacctctaattctagcaaccaatgcagtgcaaagagaaaacacagaggactgtgttaatacgcaccttgggaatgcaatcagcaaagttcaaactaaaaagttatggaacaaacaagcggctttcttcaacaaataaactgcagtattttggccgggcgcagtggctcatgtctgtaatcccagcactttgggaggccgaggcaggaggatcacttgaggtcaggagtttgagaccagcctggccaacatggtgaaatcccatctctactaaaaatagaaaagattagccaggtgtggtggcacgcatctataatcccagctactcaggaggctgagacaggagaatcgcttgaagccgggaggctggaggtcgcagtgagccgagatggcaccactgcactcctgcctgtgcaacaagagtgaaactccatcttaaagaagaaaaaaaaattgtagtagttttttttttttttttttttttttttgagacggagtttcgcttttgttgctcaggctggagtgcaatggtgcaatctcggttcacagcaacctccgcctcccaggttcaagcgattctcctgcctcagcctccctaatagctgggattacaggcatgtgccaccatgcccagctaattttgtatttttagtagagactgggtttctccatgttagtcaggctggtcttcaactcctgacctcaggtgatccgcccacctcggcctcccaaagtgctgggattacaggcattagccactgcacccggcttgcagtatttttttaatgataaaagggaaaggcaatatatagtaaagatttgagaagcactgtgaatcacttacaaagtattagttgatgtggatcctaattcgagcaaacttttttaaaaaaaaaactttttaaggccaggcgcggtggctcacccctgtaatcccaatactttgggaggccagggaggatggatcacttgagctcaggagttcaagaatagcctgggccacatagtgagatcccatctctactaaaaatttttttaaaaaaaatagacacacacgatgccgtgtgcctacagttctagctactcaggaggctgaagtgggagaaccacttgagcacccaaggagttgaagagtgcattgagccgtgatcacaccactgcactccagcctaggtaacagactgagctgatgtctttaaaaaaactttaaaatgttcttaaagtggttttagtatattcactgggttgttcatcagtcaccactaattctagaacattttcatcatcccaaaaagaaaccctgtatccattagcagtcagctctcccccattctcccctcctccagccctagataatcattaatttactttcccaatgaatttgcctattctagacatttttacataaatagacgcatactacatgtgctcttttgtgtctggtttctttcacttagcatgttttgaatgttcatccatgttgtggcatgttagcaaaatcttgcttttttttttttttcttgagatggagtctcactctgttgcccaggctgcagtgcagtggcacaatctcagctcgctgcaacctccacctcctggttcaagcgactctcctgcctcagcctcccaagtagctgggactataggtgtgcgccaccatgcccagctaatttttgtatttttggtagagatggggttttgccatgttggccaggctggtctcaaagtcctggcctcaagtgatccgcctgccctggccttctgaagtgatgagattacaggcatgagccactgcacccggccaaaaccttgtttatttttatgaataatatgccattgtatgggcatactaatttttgtttattcatcagcggaagggcatttgaattgtttctgtttttcagctataatgaataatgatcaatcctgtgaacatttgtatacagcttctgtgtagacttacgttttcaattacgttgggtatctaggagtggaactgctgggtcacacagtaattctatattaaactttttgaggaacggccaaactgttttctaaagtggctgcaccattttacattcccaccaccagtctgaatgttccaatttctccacatccttgacaacgtgttgttgtctgtcttctattattatagccatcttaacaagtgtgaagtggaaatattattattattattattttgagacagagtcttgctctgttgccctggctggagtgcactggcacaaacacagctcactgcagcctcaaagtcccagaactcaagcaatcttgctgcctcagcttctccagtagctgggaccacaggtgcatgccaccatgttcaggtaatttttttttttttttttttgagacggagtctcactctgttacccaggctggagtgcaatggtgcgatctcagatcaatgcaacctccacctcctgggttcaagcaattctcctgcctcagcctcccaagtagctgggattacaggcgcacgctgccacgactggctaattttctatatttttagtagagacggggtttcaccatgttggccaagctggtcttgaactcttgaccccaagtgatccactgccttggcctcccaaagtgctgggattataggcatgagccactgcgcccgccactgagctaagttttaaaaaattttttgtaaagatgaggtcttgccatgttgcacaggctggtctcgaactcctactttcaagcaatcctcccgcctcagttatacacaaaataactgatgtgagtcattgcacacagccagagaataattagtttttaagtgtgataatgacatagtagtcatgtacacgattagagattcatactgaaatatttatagataaatgatatgttgtttagaatcattcaaaataacacaaagtagggatgaggggagaaggtagaagtggagatgcataaaattgccactctaataattattgaaccttagtaatgggtacgcatgggtttgttatactagtctctctaaagctatgtttaagatttttccataacaaatattaaaatgtacctacaataccacaaatacataaaattctttcatactttttttttttttgagacagagtctcactctgtcacccaggctgaagtgcagtggcgcaatctcggctcactgcaacctccacctgccaggttcaaatgattctcctgcctcagcctctgttgtaactgggattacaggcatccgccaccatgcctggctaattttgttttgtatttttagtagagacgtggttttgccaatgttggccaggctggtctagaactactgacctcaagtaatccgcccacctcggcctcccaaagtgctggggttacaggcatgaaccaccacgcccagcctctatcatacatttttataccctagaaaacaaaatatcatacctattacattatttcacatctcaacattgcacaaatattatgttaggtgtttctgaaaacctgagaaaaaaattatgcctaataaaaatatcaattatacattaatttacttttttttttttttttttttgagacggagtcttactctgtcgccccggctgcagtgcagtggcacaatctcggctcactgcaacctccgcctcccaggttcaagtgattctcctgcttcagcctgcttagtagctgggattacaggtgttcactaccaggactggctaattttctatatttttagtacagacagggtttcaccatgttggccaggctggtcttgaactcctgaccttaaatgatccacccgcctcggtctctcaaagtgctggggttaaaggcgtgagccactgcacccgacctaattttaaatcctgtaaacagattttcaaggttatatatttatgctagttaacaaaaactgtgttgtatccaactaaacttcatttgctacaaatgtgaaaaatcaaactcatcagtattcaactcccatgcgtataaagaaacaaattcttaagaacataaactgcaaatgcaatctcttttttttttttctgagacacagtctcattctgtcgccatgtgcagagtgcggtggtgcgatcttggctcactgcaacccccgcctcccaggctcaagtgattctcatgcctcagcctcctgagtagctgggatcacaggcacggaccaccatgtccagctaatttttcctgtttttagtagagacgggcatttcactgtgttggctaggctggtctcaaactccaggcctccagtgatccacctgcctcggcctcccaaagtgctgggattacaggcattagccactgtgtccagccttgtaaatgaaatattgtactttatctcagttgagaaagttttgtttctttaatagtaagcacaacactaaaaggagtcaactctcaattatctccagaaggaagctaaggagcaaatagtttaaaagtgcactcatttagctggacgcggtggctcacgcctataatcccagcactttgggaggccgaggcgggtggatcatgaggtcaggagttcaagaccagcctggccaagatggtgaaaccccgtctctactaaaagtacaaaaattacagcacatctataatctcagctagttgggaggctgaggcaggagaatcgcttgaatctggggggcagaggttgcagtgagccgagacaagaccagcctggccaagatggtgaaaccccgtctctactaaaagtacaaaaattacagcacgtctataatcccagctactcaggaggctgaagcaggagaatcgcttgaatctggggggcggaggttgcagtgagccgagaccacaccactgcacttcaccctgggtgacagagcaagactccacctcaaaaaaaaaaaaaaaaagtgcactaatttaacttaattcattttttctttcacaaactgccatttaaccaaatcacagaaaaggtagccttcccatttctttctagcatcagagggagtaagaagttccacctggatgaattttcttgataacaatccaataaataattttttttttgagacagagtctcgtctgccatccaggcagtggcgtgatctcagctcactgcaacctccacctcctgcctcagcaattctccttcctcagccttcctagtagctgagattacaggtgtacaccaccacatctggctaattttgtatttttagtagaaacgggtttcaccatgttggccaggctggtctcgaacttctggcctcaggtgatctgcccacctcggcctcccaaaatgctgggattacaggcgtgagccacagtagctggtctcaaacaatttttatttcaaccatatttaacagaaattattccaaaatataatatgcatttctgtgtgttataagtcactaaaatgcaaagtaattttaaacttttcatgacacataaacatcgctaacatcaattatcaaactttttgatgctatagaatctggaaaactagacatctgctttcatgtatctcagggtcttggtttttctcttcaaggatctatcctagactctgccttgccagtgaaggctgtctctcctgctgggctgagggtttctctgggcctcttcctgcaattcacctctcaacctactggacactaaatctaatgaatactcattgtttttccattccaggctagctagcacaaatacccgttatctccctgaatccagaactgttatattctgcattgtgccaagcatgaagaccaacagattgggccatgttgatcactgtgctaacttacttaatggtagatatgttttagaattataagatatgagaactttaataatacaagtgtaggagttcaacctccctgctttatagataagcaaaaagcccagaagattaagtgactcatccaaggtcactgggtttttttgtagcagaaaagaactgctggtttctagtccagctgctttttgcactacttcatcaacacccacatcctacaagattatcatgcaataaagtataaactaattaaggagctaaattttgccctaattctttaaattcatggatgctggtccttccagaaataaaacaaaaccttaaaatctgatttctgctagatgaatttatattaaagtagaactagctttatcacaggtacctgctttcttaccaaacacgaaggcactgaattaataggaatcaatcacatttaaaccaaacataagaaacaactatcttcagaaacccatactgcatacaggtaacactttggagtaaggcatgctttaaacagacttcctctaactgaatttaaaccatttaattggcaattaatctattaattgtaactcttttccactgagctataacagaaaaacatgcatctatccctccaactgagttctgcttacaccattagattctgaaagtctgcgatgggcacagacattaatatttacttaaatagttaaaaagcctttgttggaaataactttaaagcccttatgtacaaactttacggttgaagataatctttaaggcataggttctcaaactgagatccacaggcttaagtttatcaggggactgggcatggtggctcacgtctgtaatcccagcacttttggagactgaggcaggtggatcacttgaggtcgggagctcaagaccagcctggctaacatggtgaaaccccgtctctactaaataaacaaaaattaaccaggcatggtggtgggcacctgtgagctgagatcacgtcactgcactccagcctgggtgacagagggagactccgtctccaaaaaaaaaaaaattatcaggggacttcaggaggtctacaaactccctaaaactgtacacaaaattcagaatgtatgtgcatttgtgcatgtgttaggttgagaagagccctagcttttatcagatcctcaaaagagaaccatcatgccaaaaaggttcagaatcctgctttaagtaaacaaagctttcaagctgtggaggtaaggcagtccattgatggttgcagaacacacaacaaaggttgcctctcctcacatacaccaacgcttttggaatgcagagcctcaatatagtagtaatgagaggtgaagccagctggacttctgggtcgggtggggacttggagaacttttctgtctagctaaaggattgtaaatgcaccaatcagcgctctgtgtttaaaggattgtaagcacaccaatcagcactctgtaaaatggaccagtcagtgctctgtaagatggaccaaccagcaggatgtgggcagggccaaataagagaataaaagctggccacccgagccagcagcagcaacccgcctgggtccccttccacgctgtgaaagctttgttcttttgctcttcacagtagatcttgctgctgctcactctttgggtctgcactacctttatgagctgtaacacacaccacaagcgtccgcggcttcattcctgaagtcagcgagaccacaaacccaccgggaggaacaaacaactcctgacgtgccacctttaagagctgtaacactcactgcgaagatctgcggcttcactcctgaagtcagtgagaccacgaacccaccggaaggaagttccggacacatctgaacatctggaggaacaaactctggacacaccatctttaagagttgtaacactcaccgcgagggtccgcggcttcattcttgaaatcaagaacacaccggaaggaataaattccagacacagtaatattgagaaaccataagttcaccagtcacaagacagagagacaagtccactatatatcctgaccaacatatcgccacatttggtgtcttaaccacagaccatcaagacattctgtaagacagaaagattgccctctggctggacgcggtggatcacctgtaatcccagcactttgggaggccagggtgggcagatcacgaggtcaagagattgagaccatcctggccaacatggtgaaaccctgtctctactaaaaatacaaaaattaggtgggcgtggtagtgcaggcctgcaatcccagctactcaggaggctgaggcaggagaatcacttgaacccaggaggtggaggttgcagtgagccgagatcacaccactgcactctagcctggtgacagagcgagactctgtctcaaaaaaaaaaaaaaagaaagataaagattgccctccacagctacacactgaaaagactgggaaagggacagaaatgttctgggggaatctctagggtaaagggcctttcagcaaaaacactccctgaaattactttatctcaactagtactaacacttcctgggtatacttaattcagtaacctgtgttaaggcatttactccttttatttgtccaaaacaaaaatctctctgtcaaacattagggatagggcattgccttcattttggtacactgagtattttgtatttagagaataaatccattatcacaattttataagctgtgaacacaaatccccttagtgttttctgacactgaagaattactttgtatttaacaccctggatatgtgagtgtgcaagagaagagtatgtgtatgtgtgtacatactccatcacaggctacataaaatattaactctaattattgtatagtgcttacaaagaaatcctgctttccttctaccaccactaaatactattttcacttcagagacttgcggattttaggaaagtttattttcatttccatcttctactgtcatgtacaatactgaaaatcagttttaactgattttagtgttttcccaaaagaaaattgagaaaggattattgagtcaagaaatctgtgcatacaagatactctgtggcgattagtaacattgttgtattttacacctatgcatttttaggctattgctatccaatactataagagaaaattttttaacttaatgcaaacgaatgtttttctaacttaaacgacagaaaattaaatccattcaccaaaactatgcttcttaatatctaaaaaccctacttagggccaaaatcagtgctcccaattagagatcacaaatgtaactttaaaaacatttttcttgtggtttcttaagcttatgatcaactgcctagaagatactaagaatgttgcctacaagacgttgaggattaaaaacagtaaagagcaataaatatactagaaattccaattatctaatttattggcacaactgatggtttacttctctcgcataagtgaccacaggaaggcatagactaatttaaactttacacaacaaacaggaaattcaaaagcaggaataaaaagcttttatctatagtggtttagccaaactatcatacatatacatactggagtaaatggaggtaacattaagtgtgtgtgtgcaagtgcctgccccgaccccatcaccaagaacagggttgatccagaaagtaaggtaaatcaatgcacagtggtgggaaacagacttttcctagtcccagaacacttaatggactggaagcagcaactagcttaatcagtgacattcacacatataaagaaaaaaaggagccaggcgcggtggctcactcccataatcccagcactttgggaggccaaggcaggcagatcagctgaggttcggagttcaagaccagcctgaccaacgtggagaaaccccatctctactaaaaatacaaaattagccaggcgtggtggcacatgcctgtaatcccagctactcaggaggctgaggcagaagaatcgcttgaacccaggaggtgaaggttgcagcgagccgagattgcaccattgcactccagcctgggcaacaagagggaaactctctcaaaaaaaaaaaaaaaaaaaaagaaagaaagaaagaaaaaaaaggaggctggtcgcgatggctcacaactgtaattccaacactttgggaggccaaagcaggtggatcacctgagattagaagttcaagaccagcctggccaacatgggggaaaccccgtatctactaaaaaatacaataattagctgggtgtggtggtgcacacctgtaatcccagctacttgggaggctgaggcaggagaattgcttgaacctgggaggcggagattgcggtgagccaaggctgcaccactgcactgcactccagcctgggcaacaagagcaaaactccatctcaaaacaaacaaacaaacaaacaaaaactctgggtcagggatgttaaagccatgaatgagtagtggtaagctgtatgctataaaggaaaaagaaaaccagaatacaatgacagagcagagaggtaaaaccttctttagactgagtagtcaaggaaggcctcagaagaaagctgagagctcagggatgagaaggagctgagtactcaaagggtagaacaagagtgttctatgcagagaaaacagcctggaagagacaggaaaaactgtaaattcaagtgcaatgggatgccactgaatagtttaagtaaccatgtgacccattctttcaaaagctttctctggctgctatgcagagaaaaaaattggagaccagacaagtgtgaagaccagctgaaaggctactgtggcagttcagggggagagatgggatagcttcagtgaaaagaggtgaaacaatacaaaatacattctggagatgtgctggaaaggacaagaatgtggtggggagtggtgtgtaagaaaaacaaaggtgccaaaaatgactcctagattcctggtttaagcatttccgatggaaaaaactaaggggagaaatagttttgcagataataatttcagtttggacatgtgaagtatgaactccctataaaatacaaatttggggattctcagcacataaatgatatttaaatccttgggaacaaatgctatcatccagaaaacacagaagagagatgaagaaacaggcccaagccctgaggaactcaaacatgcagtgaccgggaaaagaggttggcaaaaagtatatgcaaaggtaagaggaaaacaaggattatgagattacagaagccaacaggctgggatccaagaaagaggataaattacgtggataactctggtaagagatgcagtaagatgtggtctgaatatccactggtttggcaacccaccattatggatgaccttggcagagcagtttcagggaactggaataaaggattaagtcaaagagggctgaagggtgactgactatacaccaaccagcctgtatgcaacttagcaaacttcccaactatcaccaagatgcaggtaaatcacctcatctctctcctgctctaccgtaacagcctccaactgcttttcctgcttcaatccttaccctcctacaacccattctcagcacagcggccagaaagatcctagaagggaagtcataccatatatcaccactcctctgctcagtgatctcatctcattcagaacaaaggtcaaaaacaaagtatccctaatagtctagaaggtcaccatcttacctctgaacactcctgttcatggaatacagcaagcacacttttgcgtcagggcttctgcacttaaaacagcttgatgcctaacttccttcgaatttctgctcaaatgtcactgcaccaatgatgctttctctgaccaactgattgatttttttttttttttgagacagagtcctgctctgtcgcccaggctggagatcagtggcatgatctcagctcaccacaacttccgcctcccaggtttaagtgattgtcgtgcctcagcctcccgagtagctaggactacaggcgggcaccaccacacctggctaatatttgtatttttagtagacacggagtttcaccatgttggccaggctggtctccaactcctgacctcaggtgatctgcctgcctcagtctcccctgctgggattacaggtgtgagccactgtaccccgccctgatttactttttttttttttaagtgaaaacaagcttattaagcaagtgaaggaataaagaatggctactccataggcagagcagcctggtcaagtgatttaaatagcacctgctttcattctttgcttatcttggcctaccctgatctgtttttcttcttaccacttatcatccttatggcatatttatgcttactgtctgtctcacatcatgaggatgtaagcttcataagagtagaggttttacctgcttttgttcactactgtgtagccagtatgtaggcctggtacacagtagacactcatttgtttcttgcatgtaagtcaggagaaaggccccgcacattatgaagtaataaactggcactttcagtttgatacaagccttctgttatttagataatatgagtctgatcactcacaggaatgcaggaaagtctcatttctggatccatgaaatagaatactagttcttcaatgatctaaacgtaggccttgaaaaactcacaattatgccattctgctgggtgtctccttgtaaattcaagagcatttccattcaattttcaatatgaactgtttaccttttgggtaaagcaaggtacactagaaaaaaaaaatcatttgtaataatgcaaagacgtggtcacgaagggggcaatggtactgatgaatcacacaaatacaaagatatgtacatattacatttgaacaaaggcaagtatgtatggtgcactgggattaggtaattcttccaaataattgaaccatgctttccagtctgtctatttaatttccctaatcatctctctaatcaccaagaagagactaagctatttttctctgcaaactccctagctcacacttactcttttgtcctcagaaaaataagtgaccaaaaactattatcttaggccaggtgcggtggctcacgcctgtaatcccagcactttgggaggccgaggcgggcggatcacgaggtcaggagatagagaccatcctggctaacatggtgaaaccctgtctctactaaaaatacaaaaaattagccgggcgtggtggcaggcacctgtactcccaggtactcaggttgaggcaggagaatggcgtgaacccgggaggtggagattgcagtgagcctagatcacgacactgcactccagcctgggcgacagagcaagactctgtctcaaaaaacaaacaaacaaacaaaaaaccacacaaaaaaaattatcttctaatttctgacaagatcaaagctctgcattatgtagatgaaatgcaagccttaattataatttgaaatcatatttaggccgggcgcagtggctcacgcctgtaatcccagcactttaggaggccaaggcaggcggatcacaaggtcaggagttcgagaccagcctggccaatatggtgaaactctgtcactactaaaaatacaaaaaaaaattagccaggtgtggtggcgcacacctgtaatcccagctactcaggaggctgaggcaggagaattgcttgaacctgggaggcggaggttgtggtaagctgagatcgcgccactgtactccagcctgggtgacagagtgagactccgtctcaaaaaaaaaaaaaaatcatatttgtatcagattatcagtcatatatatctactcatgtaaccctaaacaaactgtgaaaacacaaatcctggaaactgcaatattcacccaataaattaatatacatacactgtatagctaagaatggaaggaaatggcaaaacaagttaaaatacagataaatctaaataactgtgatcaatctggctacataattgtgtggaacatttttaaaaatcatttccaaaaatatgtaatatataaagataacataaaattccagatttgcaaagaaaaaagtaaagaaagcaaatgtactaaaatgcttgttttacaattatgaggactcaaaaagatactatttagtgctctgcctctgacagagaattttaaaagccttcttaaaatctgcatggaccaataacacaaaaagatacttaacatcattagccatggggggaatgcaaatcaaaactagaaggagataccacttcccacccactaggagggctataatcaaaaagacagataacagagaacaagtgttggcaacaatgtggagaaattagaaccctcgtacactgctggtgggaatataaaatggtgtaacaaccttaaaaaacagcacggcagttcctcaaaaggttaagcttagagttccatttgacccagtaattctactcctacataggggtgggttcgtgtttacacaagagaaataaaaatatatgtccatgtaaaaacttgtacacaagtgttcatagcagcattctttttttcttttttttctttcaagatggagtttcgctcttgttgcccaggctggagtgcaatggcacaatctcggctcactgcaacttccactacccaggttcaagcgattctcctgccttagcctcccgactaactgggattacaggcatacgccaccacgcctggctgattttatatttttatagagacagggtttctccatgttggtcaggctggtctcgaactcctgacctcaggtgatccgcctgccttggcgtcccaaagtgctgagattacaggcatcagccactatacccggcccatagcagcattattcataatcatccaaaataggatgcaatccatatgtgcattaactgatgaatgggtaaagtatgatacacctatacaactaatatttacctacaaaaagtaacaaagtgctggccgggcgcggtggctcacgcctgtaatcccagcactttgggaggccgaggcgggtggatcacgaggtcaggagatcgggaccatcctggctaacacggtgaaaccccgtctctactaaaaatacaaaaaaaattagccgggcatggtggcaggcacctgtagtcccagctactcaggaggctgaggcaggagaatggtgtgaacccaggaggcggagcttgcagtgagccgagatcgggccactgcacttgagcctgggcaacagtgcgagactctgtctcgtgaaaaagtaaaaaaaagtaacaaagtgctgatacatgtcacaacatagatgaacctgaaaatactatctattctaagtggaagaagccagtactgttcataaaagtgcaaattgtatgattccatttatataaaaggtccagaacaggctaatctacagagacagaaagtagatagctgttgcctaggactgagatgggaggaaatggagagtgactgccaatgagtggaggatttcttttcagggagatgaaaatgctctggtattagatagtggtactggttacacaactgtgaatacaccaaaacccacttaattgtatactttatttgggtaaattgtatatgtaaatttatatttcgataaagctgttaagaatgaggtagcaggcacaatgggaggctcataaagcgtagttttagtattttatttcttgacctgcttggtagttacacacgtgggttcacactatgatgattcattgagctgcaaacttacaagatatgaatgtttctatacgtatttcgtatgtcaaacaaatgtttcaaaaaataaatttataaatactgacttggaaagagacccaacattattataaagtgggaaaaaagcaagtttcagaacaatatatatactatggtcccactttttgtaaatttatacacaacactacatgaatatacacatatccaatcctcactgacctctgcaggattcaaataaaggaacttttattttctctaatatacatttctataacattttaaattttgccatgtatatttttgtaatcagaagacaataatgtctacttataaaaaaatttgaaaaggcataaagacagccagttgcggtggctcacacctgtaatcacagcactttgggaggctgaggcaggcagtttcacctaaggttaggagtttgagaccagcctggtcaacatggcgaaaccccgtctctactaaaaatacaaaaattagccaggcgtggtggcacgcgcctgtaatccctgctactcaggaggctgaggcaggagaatcatttgaacccaggaggtggaggttgcagtgagccgagatcacacaattgcactgcagcctgggcgacacagcgagactccgtctcaaaaaaaaaaacaactgcaactaatctgattgctattacatatatatatatataatatatatatatacacacacacacacatatacacacacatacatatatgggtaacagtaatagtgaaattatcttttccaactatttaaaattatgaaaaaaattagatgtctacttaaaatttttcaagattttcagagtatatattcaaaatactttgaatatcactaattaaggagagtaattatgcagcaagagaaaacagcccagtgcaaggaggctgcagctctgagctatggggcctgagagaagagcctagccctctgtgggcctgtttcctcaatatgacaataaggaggtcagattatgattctgctgctctctgcttcaagagtcactaactgggtgggtcaggccatttgggatataacatcactaccaataataacaccattagcagcaataataaaacccactatagctttttcaacaattaatgtacacttccatgcatcatctctatacacaaatgcctgcgcctctcacacaggtaatttgtggacacacaccaaaatggtacctgttaccacctctgggattatagtggggagaggaataagaatggagggtccatcagtcaggtcccaaaagtaaagagatggcaaatacaaatcagaataatctgagaagggtttgtttataaaagaaataattacaaagtaggggaatagaggctacagaaaccatggggatggaacagaaatcaggactagtaaaggcagaacaaggctgagcaacagtggctcacacctgtaatcccagcactttgggatgccaaggtgggaagactgagtgagctcaggagttcaagactagtctaggaaacacagcaagattccacctctacaaaaaatgtttagaaactagccagttgtggtggcgcacgcctgttgtccctactcaagaggctgaggtgggaagactgcttgggcccagaagctcaaggctgcagtgggccatgatcgcaccactgtactccagcctgctgggcagagcaatgttctgtcttaaaaaaaaaaaaaaaaaggcagaacaagtattgcttctagaagtgccaaagaagataggagacagagattaccagaacgcagaatccaggtatataatacatgctaccctgagaggtgaagggataaatattctgacctccttctctggcccttcaatccagagggcctaagagttctttatctggggcaaagagccaggtagaaaagagtagaggatggatctggagaggtaaagaaaagatatccagcccagatttcttttaactttttataaaattaaatacatgagcctggcgtggtggctcacgcctataatctcagcactttgggaggccgaggcaggtggatcacttgaggttaggagtttgacaccagcctgaccaacatagggaaaccccgtctctattaaaaatacaaaaattagccaggtgtggtggcgggtgcctgtaatcccagctactcgggaggccgaggcatgagaattgcttgaacctgggaggcagaggttgcagtgagccgagatcatgccactgcactccagcctgagcaacaagagcaaaactctgtctcaaaaaataaaaaaaaattaggccaggcacagtggttcacacctgtaatcccaacactttgggaggctgaggcgggtggatcacaaggtcaggagttcaagaccagcctgaccaatacggtgaaaccctgtctctattaaaaatacaaaaattagctgggcatggtggcaggtgcctgtagtcccagctactcaggaggctgaggcagaagaattgcttgaacccaggaggcggagcttgcagtgagctgagatcgcaccactggactctggcctgggcgacagagcaagagtccatctcaaaaaagtaaaaccttacacagaaacctgaagtcccaccctccataatcctggatccttctctccagaagtaatcatctttgttatcagttaggtggggtttactgttggccctttctatatagagagagagacatatcacagtaaaatacagagaagtgttttatggagtgctattcatttaacatgaatggtattactctactactttgttcaatcttttttttcccccactattttcagttcagttagaaaataatgttcaagggccaggcacagtggctcacacctataatcccagcactttgggaggctgaggtgggcgaatcacctgaggtcgggagtttgagaccagcctgaccaacatggagaaaccccatctctactaaaaatacaaaaaattagccaggcgtggtggcatatgcctgcaatcccagctactcgggaggctgaggcaggagaattgcttgaacccgggaggtggaggttgtggtgagccaagatggcgccattgcactccagcctgggcaacaagagcaaaactccatctcaataaaaaataaaaaatatatataatgttcaaagcctggtgcggtggctcacacctgtaatctcagcactttgggaggccaaggcaggtggatcacttgagcccaggagtttgagaccagcctggccaacatggcgaaaacccgtctctactacaaaatacaaaaaattagccgggagtagtggcacccacctgtagtcccagctacttgggaggctgtggagggagggtcactggagcctggggagatcgagactgcagtgagccaggatcatgccactgcactctagcctgagtgacagagtgaaaccctgtctcaaaacaaaaacaaagaaaaaggaaataatgctcaagaagccaggatgagatggatgggcttgattctcctcggttgtttctactccaccacagtggctctcagaacacaccctgcccttcatgtgcattagcatcacctaggaacctgtttaaaatgaaatctgcaggccccacccagtgaggtgaatcaaaagcactggtgggggtgtccagcttttaaagtctaagaaccactactctacctcctggtactcaaaactttcttcaccatcacctgatgccttgccagaaatcggcattttaacaagatccccctggtctacctcagggccacaaaccataagccccaatccataatgcttcgcacccatccacacagtgtctgagtggtttctgggaatgggaagtaggggaggcccactgaaagagcagtggtttttctctctttgaatatgaatctatcacttaccaatcctgtgggaaaaacagcactgcatgccctagttagacaagagtatgttgtgtgtgtgacagaaagcacacaactaccattaaactgccatggaaatttattccgcttagatgtcactgttatgttataagctatttttcttttaaaataagggaatttcaattttaaccccaggcataataaaattaacaagattgtctaacctttgtttgtattgctaatattgtagcaggaatctgtcaccttaaaacaaaccaaccaaggggatataccttaccttctctgctcgaacaaggacaccttcaccaacatctagcccccacttccatgcagcagcccccatctccatacagcatggaggaaggaaaactatttccagtattccacctttaacttcctgctgcctccctcaaagactcatagattttatttcaaaatctgaacccgaaggcccctaactccatctctccctttgcttctctctcattttcctccactgagacttctctggtctgtggtactgcaaacatgtcggctcttccagcaaatctacaggtgaactacgtacatatttatgcctaagaattgtactgtctcactgctcattccagcttgactcagcctaacacaacgatgtgcttttttaaggcacttccagtttcacttctagctcctaccaggcttccgccccgccccaatgcaacatagccccctcagtttcccagacccaggaagtagcaaggtcaattctgtgaggcccatatccaatttgacttgcctctctcttcttaaagcaatcttggaattaaaatttctaaagccccctttcaatttaataacttttcttccatagaaacaagaggttttaatcaagccttaaaaataaatttgagccttgtgtttttaatcacatagcattgggaaaaataatataactattctaccaaatttcaaaaggaaacatgtttacatctcaaatgtgctacaaaaagatcctggtatggtaaaactagtttgatttcgactcccaccccaaccttttttaaacttctccaacacagttccagaataacttgtcaaaatcacttctgaagcggtaatcccagctactccagagactgaagtgatcgcctgagcccaggagttccaggccagcctgggcaaaatagtgactcttatctcaaaataacaaaacaaaactcaccctgtcaattagactcaaaagatgtatagtactaactaaacattccagagtcaaattgtaacttcagtttttatctcaacacagaatttatgagttgcacataaatttactttacttctttttagaaatggagtcttgctatgttgcctgggatggtctcaaacatctggcctcaagtcatcctcccacctcagcctcccaagtagctgggattacaggtgagccaccgcatccaatttacaaattcactttaaaaagtcaaatcttttcacttcttgctttgcttcttggatttgtttggggaagaggaatgtttcttttttttagcaaataatggtagcttttacttgaagctttaaaatatcaattttaaaaaaacaattttaaaataacaatttgttttcaactatatatgcagttttaataaaaatattagataattcgattacaagagttcttgacttacattcctgccattagcaaagacagtcaacaatgtcttaagagccaccaaacatatcaatctctagatatggtctaaacctaaggttattttaaaaactaagaacagtgagtgtgtagaaactcttcaattatctggattaatcagcttttatcctgcctgtatagaatcaatgtcttcctcctatgaattccacagtttagtaattatgaaaggcagagaattcatttttccttcctaggtatccataaaccaagcttctctaacccatagcccaggatggctttcaatgcagcccaacacaaattcataaatttcttcaagtgtatttcatgtgtggtccaagacaattctttcaacatggcccagagaagacaaaagattggacatccctggccagcagttagcagcactcaaagaaaaaacaggccttattccaaaagttcatataatctggctttgaccttagaagcccattttgccatagatcattttctaaatggtacgttcccaggatggcccaccaatacctattaagcccacaatacagatgagatactgaactaccaagcccagccaagaagtttttcttcatctgtttaagtgcccaaacaagcactcagttaagatctaatgttgagaatcacagagcatgggatcttttctaagaagtaacttaaatatgcctgatttatagagaatccagggctgggtacggtggctcatatctgtaatcccagcactctgagagaccgaggtgggtggatcacctgaggtcaggaggtgggtggatcacctgaggtcaggagttcaggaccagcctggccaagatgctaaaactctgtctctactaataatacaaaaattagccaggcgtagtggcacatgcctttaatcccagctactcgggaggctgaggcaggagaatcacttgaacccaggaggcggaagctgcagtgagccaagatcacgccattgcactccagcctgggtgacaagcgcgaaactccatctccaaaaaataaataaacacaataaataaaaaaataaagagaatccagtgctgggcacagttgggggtgcctatagttccagctactcaggaggctgaggcaggaggatcacttgaacccaggagttcaagtccagcctggacaacatagtgagaccccatttgtaaaaataaatagctgggcgtggcagctcatgcctataatcccaacactttgggaggccaaggcaggcggatcacctgaggtcaggagttcaagaccagcctggctaacatggtaaaatctcgtttctactaaaatacaaaaaattagccaggcatggtggtgcgcacctgtaatcccagctacttgggaggctgaggcaggagaattgcttgaacctgagaggtggaggttgcagtgagccaagattgcaccactgcacaccagctcgggcaacaagagcgaaactccgtctcaaaaaagatattaaataaataaataaataagtgtaccactctgatgtaccactctgatgcaggtactcctactcctgatgtgaccaagtaatgaatgatttaaaaactcaatttttgtccaggcgcggtggctcacacctataatcccagcactttgggaggctgaggcaggtggatcacaaggtcaggagttcaagaccagcctggccaagatggtgaaaccccgtctctactaaaaatacaaaaaaattagccgggcgtggtggcaggcacctgtaatcccagctactcaggaggctgaggcagagaattgcttgaacctgggaggcggacgttgcagcgagctgagatcatgccactgcactccagcctgggcaatagagcaagactccatctcgggaaaaaaaaaaaaaaaaaccctcaatttttaaaaccctagcacagaccgggcgcggtggctcacacctctaatcccagcactttgggaggccaaggcgggcggatcacgaggtcaggagattgagaccatcctggctaacacggtgaaaccccatctctactacaaatacaaaaaattagccgggcgtggtggcgggcgcctgtagtcccagctactcgggaggctaaggcaggagaatggcgagaacctgggaggcggagcttgcagtgagccaagatcacgccactgcactccagcctgggcgacagagcaagactccgtctcaaaaaaaagaaaccctagcatagtaattcagaacttaaaaaacaaagttatttctcaggagagacaaaggcaaaacaaaagactgcaaattctcttcatcagctaaaatagtgatcaactttgcttatattcagtcttttgttatcaaaactacttgctgtgttttcggaggctatctgtaaagtaagatgcagtaaagcatgacggctaaaaatacagattctggaattagactacctgggttcatatcccaggtaacactcctaatagctgtatcatctccagcgagttgtttaacctgtgtgctccagtttcatctgtacaataagtataatatgagtcccttaggggactgcagtgaggattaaatgaattaatccacataaaatacttagaatagaaccttaaataataagcacacaataagtgaccactattatctagatatttaaaaataggtagaatttagaaaaggaactgaagggaaaagaggcattataggctgaagtaacaatcaaaggaacagaggtagaaaaatcacacacagggccgggcgcggtgcctcacgcctgtaatcccagcactttgggaggccgaggcaggcggatcacctgaggtcgggagttcaaaaccagcctggccaacatggtgaaaccccatgtctactaaaaataaaaaaattagctgggcatggttgtgtgcacttgtcgtccgagctacccactcaggaggctaaggcaggagaattgcttgaacccaggaggtggaggttgcagtgagcagagagagcaccatttcactccagcctgggcaatagagtgagactctgcctcaaaaaaaaaaaaaaaaaaatcttattactattaatgcaattgtgatgtttttgcaatcccaaaaatgcatttgttctgctaacactgtcatgatctatcattgaactgatgcatatctgaattatctctgaaatcctcactgtgtctagtacatagtaagcattcaacaaatgtttaccaaattattattaatattagtaattattaatcattatctttttgtgtgtgtgtaagacagagtctccctctgtcacccaggctggagtggagtggcatcatctcagctcctgcaacctccatctcctgggttcaagcaattctcctgcctcagcctcccaaggagctgggattacaggcgcccaccaccacacctggctaagtttttgtatttttagtagaggcaggttttcaccatgttggccaggctggtctcgaactcctgacctcagatgatccgccaccttggcctcccaaagtgccgggattacaggcgtgagccaccatgaccggcctcaaatcattattttttagtggccaacagagagcagtaaaatagagacaggggttaattccctaaagaaatataaactagccgggtgcggtggctcacgcctgtaatcccagcactttgggaggccgaggcaggcggatcacacggtcaggagttcgagaccaacctggccaatatggggaaagcccatctctactaaaaatacaaaaattagctaggcatggtggctgtagtcccagctactctggaggctgaagcaggacaattgcttgaacccaggaggtggaagttgcagtaggccgagataatgccactgtactccagcctgggtgacagagcgggactctgtttccaaaaaaaaaaaaaaaaagaaagaaatataaattataaatgaggcaaataacctagataatagtttacaattaagctaaaataagtcattgctaatcaacatacttaactaaaacaggtttttgttttgtttttgagactgagtctcgctcagccacccaggctagagtgcagtggcgtgatctcgactcactgcaaccatggtctcccgggttcaaatgagtctcccgtctcccccataactaggattacaggcacccgccatcatgcctggctaatttttgtattttagtagagacggggtttccccttggccaagctggtcttgaactgacctcaggtgatccgcccgcctcagcctcccaaagtgctaggattataggcatgagccaccccacccagccaaaccttgtgtattttattaaagtctcataaaatgtagctgtcaaattggtacagccttttcaaaggattatttgggcaatatctttttaatggactatcgggcaatctttttttttttttttttttttgagatggagtttagctcttgttgcccaggctggagcgcgatggcatggtcttggctcactgcaacctccgcctcctgggttccagtgattctcctgcctcagcctcccaagtagctgggattacaggcgcccaccaccatgcccggctaacttttttttgtatttttagtagaaaccggatttcaccatgttggccaggctggtctcgaactcctgacctcaggtgatccacccactctggcctcccaaagtcctgggattatagctgtttcctaatccaggacaaaattatgctggcgggtaagaataaaggtctaactcctaacttgactccaagtaattagaggaaaggacagcttacagtagccataggtttccatggagtacacactatctacctgtacaccatagacgtaaatgctaattacagcaacaaaaagggccacccttatcctgagaatggactcctgaagtttacagtcttaaagtctaaagattattggccaggcgcgatggatcacgcctgtaatcccagcactttggggggctgaggcaggtggatcacaaggtcaggagttcaagaccagcctggtcaagatggtgaaaccccatctctactaaaaatacaaaaaaattagccgggcgtggtggtgggcgcctgtaattccagccactcgggaggctgaggcagagaactgcttgaacctgggaggcagaggttgcagtgagccaagatcacaccactgcactccagcctgggtgacagagcaagactcgtctggaaaaaaaaaaaaaaagattaccttgcaatcaactctttggtgcatttcttacaaaatacaacaacaaaacaggctgggcatggtcactcatgcctataatcccagcactttaggaggccaaggtgggaggatcacttgagcccaggagttcgagaccagcctaggcaacattgtgaaacctccatgtcacaaaaaagtttaaaaggttagtgtagttggccgggtactgtggctcacacctgtaatcccaacactttgggaggctgaggcaggcggatcacgaggtcaggagatcgagaccaacctggctaacatggtgaaacccccatccctactaaaaaatacaaaaaattagccgggcgtggtggggggcgcctgtagtcccagctacagggaggctgaggcaggagaatggcgtgaacctgggaggtggagcttgcagtgagctgagatcgcaccaccgcactccagcctgggcgacagagggagactctgtctcaaaaaaaaaaaaaaagaaagaaaaaaggatagcgtagttgtcacactcattgtcccagctactcaggaggctgaggtggaaggactgcttgagcctgggagatggaagctgcagtgagctatgattaccactgccactgcactccagagtgggcaacaaagcaagaccttgtctcaaaaaacaaaaaacaaacaaacagaaaacagcagtttgagataccaagtaatacagtaataattaacatattaagaagaaaattttcactaaaagattgccaacaagacttcttagaagcacatcatgacgtagaatggttgatataagtgtttattaccaggcgtggtagctcacgcctgtaatcccagcactttgggaggctgagaccattctggctaacatggtgaaaccccatctctactaaaaatacaaaaaattacccgggcgtggtagcgggcatctgtagtcccagctactcgggaggctgaggcaggagaatggcgtgaacctgggaggcggagcttgcagtgagccgagatcacgccactgcactccagcctgggggagagagcgagactccgtctcaaaaaaaaaaaaaaaaaaaagagagcgtttattaagcatacatccccagataaactgattttttttctggtagcaatagggagaaatcacttcgcaaaaatgtaagtatttaaaaaaaaaaaaaaaaagattggccgggcacggtggctcatacttgtaatcccagcactctgggaggccgaggagggtagatcatctgaggtcaggagttcgagaccagcctgaccaacatgaagaaaccccgtcgctactaaaaatacaaaattagccaggcgtggtggctcatgcctgtaattccagctactcgggaggctaaggcaggagaatggcttgaacccagaaggcggaggttgcggtgagccgagatggcgccactgcactccagcctgggcaacaagagtgaaacgctgtctcaaaaaaaaaaaaaaaaaaaagattagtgggcgcatccctgggagagtaagcaagttatgtattcggcttttgtgggcaatcaatcattctggtaacacaaacataaggcaaagtagacccagatttctatatattttcctctaaagtacttttaagttacaatttcagacttaaagagaaaggttccaagctcagtcttgtccttttttaaagctgcaagtattataatttaaaactctgaaatgtattcacttaaacacgttcctgtcactattaacaacaacgctccattatccacttttggtactgtctccagatgatttttaatccctgcctgacttctccctaccaacaagtacttggataccatctttaccccgcctgcccccactacttggttgtgcctagggaattataattacagcaatcccgcctttagaacatcctcagagcacaaagcttctttgtataatggtggagggagggtgccctccaggctccacagaaaagagtgggtggtagcaacagaggaagaggaactggagccactatggtggccctcagttctagttcaatatcgtttgtgggaatttacttgtaatgaccagccagggttctgttgagcttctgcatctcctcccatgtgggggtggagagaagcagggcttatcttggcagatgggcacaatcaccatgcccagaagaccagggagcagaaggaagcaagaaatttgggagaaaagcaagcaataactgtcttgaattgcacccctctatgcgattctcaagaccttaagtgaggaagttttgacaacaaaagctatcatcctaattaaccagtggttggtattggcattactggcactcagtagatgctcaaagatgtattgaggtggcaataaaaatctacataggaagacaaatctataaaaaaaaaagttttaataagatagcacaaaagccaaatgaaaaatactttttattaattatgagtcccagccgggcatagtggctcattcctgtagtaatcctagcacttagggaagtcaaggcaggaggattacttgagctcaggagttcaagaccaccatgggcaacatagcaagaccctgtctctttaagtatgagttccaacttttctctatctgtaaatgtgaatttttatttttttatttttttgagatggagtctcactctgtcgcccaggctggagtgcagtggcgtgatttcggcttactgcaagctacacctcccaggttcaagtgattctcctgtctcagcctcccgagtagctgggcctacaggttcacaccaccacacccagctaagttttgtatttttagtagagacagagtttcaccatgttgctcaggctggtctcaaactcttgagctcaagtgatccacctacctcagcctcccaaagtgctgagattacagacgtgagccactgcgactggccctgtaaatgtgattattaaatgaatacctgttttactttctgcctactctacttctgtttagtctgagaaactgctcactttttagttctctgacaataaaacaaatttcaacagaaggtcagcatgcagcatctgcagccactaaaatccaaggtgcagaagcagaatggacagccaacttttcaactccaagaacatcccaaaagcactacaaattgtcctactacctaactgcttgctattctatgtatacagtttttttctttttctttttttttttttttttttttgagacagggtctcactctgttccccaggctggagggcagtggcaccatctcaactcactgcaatctccgcctcccaggctcaagcgattctcgtgcctcagcctctcaagcagctgaaattacaggcaagtgccaccacacccagctaatttttgtatttttagtaaagacagggtttcaccatgttgcccaggctggtctcaaactcgagctcaagttatccacccgccttggcctcccaaagtgctgggattacaggggtgagccgccacgcccggccccttccatgtatatatttggtcctcttactactacttccctacatttctcaacaaagtcaaaggatcagtatatacaccaaaactcacaatatctcactctcttatttctatacatattttaccacaaaagcagaaaatgcagtgatagctttttttcttctctttcttttttttttttttttgagacagagtcttgctctgtcacccaggctggagtgcaatggtgcaatctcggctcattgcaacctccgcctcctgggttcaagcgattctcctgcttcagcctctcaagtagctgagattacacgtgcgtgccaccacgcccagctaatttttgtatttttagtagaggcagggtttcaccatgttggtcaggctggtctcaaactcctgagctcaggtgatccacccgcctcgacctcccaaagtgctgggattacaggcatgagccaccacaccagctagtgatagcttttgatagcgtaactattgataaaccccaatatactcccatcattctactcttccacctgtccaacatcactgcagttaactgttctcagcagtcccaagaacagcgctaatatccatttaagtagaacaggaaaaaaactgaaaccagtctgggtaaggcctgcaggtaagaattgtttatttcccttctgtgggcaaaagaccacttttgttaaacatctttagttttttaacatataatttctttcaaaaaattactccaagacagcagcataagcaaattgaaacttcctatcccaccaccctcaatcatgtttaaaaataataataaaaaagacaacagaaaccacttcaaatgtatctttcccttgagcccccagaacagcattcatccacgacaactgtcctgaaaaactctgccattatttccaaaagcagtaggaagtccggtcttgtccttggtttgtactcccccctcctctctctccaagaaaaaatgaaacagcaggaagcgtaaacaaccacttaatggaaaatacaaatgggtaaatattttcaaaattagctaaaaagcctcaggtcttcaggaatgctagtgcagggggaaataggaagagaaaaataactgcatttaccccttcaagtgagcactgtaagaagacaagcgcaaatgtggcacataggtactatactttctctcctccatttaccagatacttttgtcttttttttttttttttttttttgagacgaagtttcgctcttgttgcccaggctggagtgcaatggtgcaatctcagcttacagcaacctctgcctcctgggttcaagcgattctcctgcctcagcctcccaagtagctgggattataggcatgtgccaccacgcctggctaattttgtatttttagtagaaacaggctttctccacgttggccaggctggtctcgaactcctgacctcaggtgatccgcccacctcggcctcccaaagtgctgggattacaggtgtgagccactgtgcccagacctttttttttttttttttgagacagagtctcactctgttgcccaggctggagtgcagtggcgtgatctcagctcactgcaacctccacctcccgggttcaagcgattctcctgcctcagcctccaaagtagctgggattacaggcatgcgccaccatgcccagctaatttttctattgttagtagagacggggtttcaccatgttggccaggctggtcttgaactcctgacctcaggtgatccacccacctcggcctcccaaagtgctgggattataagcgtgagccactgcgccaggctgacagtggtattttctaaatagcttattctgtacatatttctccagcctcataacaaagtttactattttaagctgtgctctttggttcagctgagcatggtgatgaaaagccccttcccatgaaaagttcacatggagaactcttgaagcccctagggcaagcactaacccagacctcatggtaaagcccacaatgcatatggatgaaactgttagttacagctggactgacagttccaaagctgcagagcagtgctagatcacagatcacctttgcgtggattagaaaaggtgccccttctctgagtgcacacagttccacaccaggtactcatcttggtaagtggagtacagaatagatttccaccctcacttgccacctgaaacaggtatccttttgctgggtgcaatctctatggtcctacacagcagcaccgttaagaagtgtaccggccaggcacggctgttcacgcgtgtaatcccaacactttggaaggccgaggcaggctgatcacagaggtcaggagtttgagaccagcctggccaacatggtgaaaccccgtctctactaaaaatatgaaaattatccgggcatggtggcaggcacctgtaatcccagctactcgagaggctgaggcaggagaatcgcttgaacctgggaggtggaggctgcagtgagccgagattgcgccactgcactccagcctgggcaacaagagcgaaactctgtctcaaaaaaaaagaaaagcgtacctgggcaatgctgcacctccaaagtgggtttccagatagaggaaccttaacaaagacaaacaggcacttcacaaatttcactatcagaaagcctcagatttgttaacataaattcattcataaacacatcaggactaaggaagaaaggtctagtagagaaggaaaactagcaaattttggagaaaggacactcttccatcttgagggataatcagttgtctcctaaagaccttaatctctgaccataggttcagacggctgaacctcaaatgttggtcacaagctaaaacaatcactagcatctgcagagggatggatcatctttctcttaagacataatgacatgtttacctttgggggttttactttctccaaattttccttctctgctagaccctttttgcccttactttgaaaccacatacagttgacacatgtgttaaaatctgtaaaacctgataaacaaccctggtaggtagtgggccccttagctaactccatgaaaatcagaggaatggacaacctagattaagaggggtatggcatccaaccctatcattcttttatgctccacaaaagaggtaaagtatcacgtgggtcaaaattccatcccagtcatccaggagtgggaacagaggggcagcctaaggaaaagatgaggactaggctggggcaaacccaagatagtggttctcaaactttagtgggcatcccaatctactggggagttttctcagaatcagatgtctgggtccctccctacacctgatatatcagaatgtcctggagcacatctatttcaacaaagctcaaactgctgacacaggtccaatagaaagtttagaaataatgagaaatctaccgcaactatcagcagttccaaaataaaagtcatccactgcaaaactaggtttagcaggtcagaaaggggcgaaaaaggatcaccagcctgcatgtctaacaggctgcgctaggctggagcctgtaggagaggtccattattatgaaacaaaaactgtgttctataaacaaaatttttgtgtgagaaatatttcaaacatctgaaaaatatttagagtatactaaatatctctataccctacacccaacattaccaaatcttaatttacgattacctgattcagattttttttaagtaataggacattaaaggtataaataaagcccttttgggtacccttgtgtaatcccattcctcatcttctcttcccaaagacaatcattacacttaatatgcataatttaatactatcaccacatatgggcatagccacaaacaatattatttttcatgttttcagattttacacacgtgaaacgattctgtaagaattcttctgacttgcttccctgttccatatggtttttgagattcacctattttaatgagtgaggctagtttatttttcacagctgtaatattcaactgtatgggtctatctaaaaatgtatgtattggccgggcgcggtggctcacgcctgtaatcccagcactttgggaggcagaggcgggcagatcacgaggtcaggagatcgagaccatcctggctaacacgatgaaaccccgtctctactaaaaatacaaaaaaaaattagccgggcatggtggcgggcgcctgtggtcccagctactcgggaggctgaggcaggagaatggtgtgaaccagggaggcggagcttgcagtgaggcgagatcacgccactgcactccagcctgggtgacagagagactccgtctcaaaacaaacgaacaaacaaataaataataaataaaaatatatgtagtcttctgttggtggacatttaagctggaatgagcattcttgtatttttttcatacttattttcttgaacaagtgtacaaggatctcttagggtatatatacacacacacacccagaaatggacattttaggtaaatgaatatgtctgcccaccttcacactaaacaccaaataccactactctctaaggtggttggatccatttacatttccactacactatatacaagcttatctatccacaaccttaataatcctcggtttatcacagcactacatttttgccaacctgatcggtgtgaaatgtcatctcagtgttgtttcaatttgcatttccctgattgtaagtctctcacaagtacattttcttgcttttaagtatacatttgccaaatatgtgtgtcttagagttttttaggaaaatctaacccatcttgtctgaattggggcagtccttcccaaagcaccctgccaacagccaccacagcaggaaagctaaggtgcaagagggcagcaagaaaacagctgacttaaacaaggaatcatcttggacaaagggccttaattaatgcatttgttaattagtctttcccttccctcttttgtcaagccttacttccaagacaatactccaggccctgtgggtctgcatccttagaacaagagcgagaatgagggggagggggtgctcaagctagaacgtttctataaaagtatagctgtccttactaaaagaaaataagtgactgcagaccaattcacactcaaccttgtaagctaccatccacctccaacagactcctttcaaactcatcacgtttggcaccttctttgaaacatcccaatctttttctccagactagacaccgtcccccgcccttcagcaaccctttcatctcccttcccccacaatgactgaataccctctcctttttccccattctattttctagctccacgggaccctcgtccctgcctgtaacacgttgctctctcccttccctctagaactgcaagtcctttccccttccaagggacatccgcagtcaaaacaacccacctcatcatccaccccaaataaaaacggaaatcccatgtattacatgccaggcaggcgggtgactcggtcccaatcctcccagcttccttcccccttcaagcctgggatagctgttctttctcggggagttctccaagtgtggtaggtccaaaccacctggaaaaaactcacatggccttctgtgccgtaaacgtctttaccaaggccatgtatgcatttctggtttcggcatgaacgaaattcgggccatttactgaaaaaagacaccttacgggcgcctccacaaaagcgggcaggcctccctcccagtaattccagctgaattggtttagtcagtgcagtggtggggaaggtggcctggcagagaccaaacggtccccacgataagaagtttccgaagctctgccccactcactcaagaaagccctctccccgagagcacaccccgcacagaagtctttcccgctgcggctccccagggcaccaccaagctcccaagtcggccccctgctcttccgtcccaccccgtaagagatcattactcccaaaccagcccaaaaagggctgggtgggtgtgccagggtccagggcctgaccccctcccccgagatctgtctccctcggctcctgggggccgggggatcgacctcttcccagccccctctgctcggggcccgcgccggcccagggtggccctgggtcccagccaagctacggctctcattggctatgtgaccttgggcaagtcacttccccctctaagcctcggtttcctcctccgccgagcagagacctagagaggtcctgccctgcacaccctgggggagggggctacccaccgggtgggaaaacgctttgtgagcgctcggcgcggctgaggcgcagggctcgcaggggctccggggccggacaaagctgacccggacaacgctcctccccgtcggcggggccgggcgcctggaccacacgcctccggcccccacccgcgggaccgacccacgcccctccctgcctggcccgctccgggaccccgtacctgctcccggcgctcggccgcaggcgccgccaccctgggctcccgcccggagaggcccgtggcccggagggctgaggcggtccgtggcggcgggctccggccggggcggcggcggtggggggcgcgggcggcgcgggggcccaagctcggcggggcccggcctgggagacgacgactgaggctgaaagtgcgcggcggcggcggctgctgaggcggcggcggcagcgaccgcggcggccgcgcttccgctcatggcggggccgcgagcagcggctccggctgcgactcgactccggcgcggcaggcgctggctgggccccggccggcagcagcggtggcggcgacggaggcggctcccgaagggggaggaggcggagccgggaagcggcggcggcggcggagggggcggggacgtggagggggcggggacgccgagccgcggccgccaatgggcgcggggctcctcagccgcggctccgggggcgggagggcggcgccgaggggtatcctcagtctccgccgctccctgagaaggggaggcagagcgcgggccacccgccgggagagccctgctgcaggggctgccccgccccaggcccgcccctgaggcgcggccgcgggcctctggggccaggcctcgcgcgacccaggctggggctgcgcttgggctccgctgcgcaggggttcgcgcccgcgagggggccggaactcggcccagatagctactgctcgcagcccgcctgccagactccctcctccgcttccccgcactggagacgcagcctcctctcccctcctctgcctctcttggctgtttcctcaaagtttttccctttcagacacttaggaaagaaactctcccttctgttcttaggctgcgtttcagtgataaattagtccccgcggacccagagagaacagcagaggcagaaacgaaagagatggaaacgagctgcagtccctgagtccccgagaccatcttgaatgctgagcaggaaccagccaggctcagccctggcccctcgcccctttctctgactttctcactttacatgcccttgttgttagaagacttagatagaaacatccagcccagctgggcctagtctcaaaagatggggagggtgtgaggtaaggaaaggcttttgacctgtcccaacggctttcctgtgaggggaagaattctgcgagttggtgaccccctttgggccctcctccacttggatgtgatgttggtcactgaaaccgtttcctcctcatgtttgtctggctctcatttcaaagccgtagaggagcaaaataaacaaccatgtgttaggggtacctctaaagtgcaggcacgtgggtgggccagggtgcagctaaactgctgagtggatcatttcaataaaaccttatcctcagccattctccactgagcagagagagaaagagctctatttgaatctttgacaacagacatttcaaattccatgctgacacttaataggtgcctgatctttcattcgtgctggtctttctgtcatcagcaatgctagacactgggaatacaagaataaaaaagatacagtcgaggccttcaaagagtttacaatctcattggaggacagtgagatatttttagaagttaaaaacttacggatgagcaggagttcaccaaggggggcaggttgggggaaagtggactgggaaaacattaagattgtatttggccaggggacgtaagattttctgaatcccatccttgactttttggtcacagaggaagcaggtagtatattacttgctggagcttgggtcccagtgcccactgtagaacacctgtcaactactgcacggaggcaccttctttcctccgataggtctcagcagccttgagcaacattggatctatttctgtgccaaagtccaaaccccagtttcagctcttaaaaccccaatttgagcaaatgccttgaccaccagccctagaagagaacggacagatgagcagtttaatccagtaaccaaaggagcccatccaaggatgccttgaggccaggaagaaacaggaagaaataaagggagaggaccaggcaaagccttgggccacctcaccttgccagtttagggaaacaaaataaagaatggaccacattcatgttggttgcgatctttagctcttaactttgcgtcccccaatgatgatcaggaagagagatgagcattggggtttaggcaacgacaggtttaataggactggagtacagcccgggtgatgagtgataagaaaagaacagactggaatttagttaagacaagaccaaatcatgaagagtcttgagtgccacattgaggaatttgaacttaacctgaataacaaaagtgagccattgagcacataatgaggaaatgatgtgattagatcgtatttcggaaaaactctggctgctgtgtagaaaatggattggagggtgctatggtttgaatatttgtcccttgcaaaactcatgttgaaatttaatccccaggccgggcacagtggctcacgcctgtaatcccagcattttgggaggccgaggcggggggatcacctgaggtcaggagttcaagaccagcctggccaacatggtgaaaccccatctctactaaaaatacaaaaattagccgggcgtggtggcacacccctgtgatcccagctactcggaaggctgaggcaggagagttgcttgagcctgggaggcagaggttgcagtgagccgagatcgtgccactgcactccagcctggctgacaaagcgagattctgtctcaaataaataaataaataaataataaaaataaaaaatttaatcgccaatatggtagtattgagagacggagcgtttaagaggtgattggtagagccctcatgaatgtattgatccatacatggattaatgggctatcatgggaatgggactggcctttataagaagaaaagagacctgagcaaggatgttaagccctttcaccacgtgatgccctgtgccacctcaggactgtgcagagtccctagcagcaagaaaaccctcacgaaatgtagcctatcaacctcagacttctcagactttgcaactgtaagaaatacattccttttctttatatattgcctagtttcagttattgtgttatatataaataagcaacagaaaacagcctaagatagaggagaaccaaaagagaagaaaactggctaaaaagttttaggcatggggtgaaagtgacctgaactaaagcagagatagcaggaatagagagattttaaggtggtagaatcaacaaggcttgaggaagatgagattgattcaaggataacaaagatttttcacttggacaactgagtgacggtggtgccattcctgaaaatattaacagataatacagagaactatgaagagcagagaactatgaccccggttaaatcagattatttctgtgactctccacataaagcagaagggctgaagcaattggactagagtcaccactatacaattactaatgtcctctgagatggggatccaaagatatgcaaaggagaggcacaatagaaggattgcccattcctttttttccattaaaaaaaattgtgggccaggtgcagtggctcacacctgtaatcccagcactttgggaggctgaggtgggcagatcacctgaggtcgggagttcgagaccagcctgaccaacatggagaaaccccgtctctactaaaaatacaaaattagctgggcgcggtggcgcgtgcctgtaatcccagctactcagcaggctgaggtaggagaatctcttgaaaccgggaggcggaggttgcggtgagccaagatcgcgccattacactccagcctgggcaacaaaagcgaaactccatctcaaaaaaaataaataaataaaaaataaataaattgtggtaaaatatattatgtaaaatttattattttaaccattttcaagtgtataattgtaatttcaagtggcattaactatattcacaatgaattagctgggcttggtggtgggcacctgtaatcccagctcctcaggaatctgaggcagataattgaattgcttgaacccagaaggtggaggttgcagtgagctgagatcgcaccactgcactccagccagagtcaggcgacagagcgagactctgtctcaaaaaaaaaaaagaaagaaagaaagaaagaaaactgtattcacaatgttgtaaaaccatcaccactatccgtttccagaacatcttcatcaccatcccagacagaaacccattaaataactttcagttccctcctcccctcagcccctggtatgtctattctactttctgtctctacagatttgattattctagatacctaatgcaagtggaaccatacaatatttgtctttttgtgtctttctggcttatttcactcgcataatgtttacaaggtttattcatgtgacagtatgtattagaatttccttcctttttgttttatttttatttatttttgttttaattattttatttttatttattttggcaacaagagtattgctgtttttgccaaggctgggatgcaatggcgcaatctcagcttaccgcaagctccacctaccaggttcaaatgagtctcctacctcagcctcctgagtagctgggattacaggcatacgccaccacacctggttaattttttgtactttttgtagaaacagggtttctccatgttggtcaggctggtcttgaactcccaacctcaggtaatccgcctgcctcggcctcccagagtgctaggattacaggcgtgagccaccaagcctggccttactgcttttagttcttttgagtatatacctaggagaagaattaccgcatcataatggtaactctgtgcttaactttttgagcaccagactgttttctataggggctgcaccatttttgcattcccaccagcaatgcataagggttctaatttatccacagtcttgccaacacttgttattccacccccacccctacctttttcttcataatagccttcctaatggatgtgaagtggtatctcattgtagttctgattcgcactccctatttcactttcaagcttagcacaatgtctgtttacttgtatttgccccagcctggcttgtaaatcattattttatttgggggttaatgagggagtggaggagagaaattgtaagaaaatactgaaggggcgccgggtgcggtggctcaagcctgtaatcccagcactttgggaagccgaggtgggcggatcacgaggtcaggagatcgagaccatcctggctaacacggtgaaaccccgtctctactaaaaatacaaaaaattagccgggcgtggtggtggtggtcgcctgtagtcccagctactcaggaggctgaggcaggagaatggcgtgaacccgggaggcggagcttgcagtgagccgagatcgtgccactgcaccacaacctgggcgacagagcaagactccggtctcgaaaagaaaagaaaagaaaagaaaatactgaaggggctatttcatgaaaaacgataagacaatgatagacctaatagcatataaaaccagaagaggagcaagatggtatttcagagtattacagagtaatactttgcagccttagcaactgaaggaatccagataaggtagacccaatggaatttgtaaccatgctcagcaaaggaagtgaaaatagcaatgccaagtggaaggggctgaggcaggagatgaaatgaaccaccaataccacatgactactttccttcacaaacacatcacaagcacatgtgagacaactatatggtttccctgaaatgcttggggatgtaaattgcagggtgagagccagagcgaaagaaaacatgctgagcatttttcctcactattatcacattaataaacattagtttctatttccttaggccacattcctaaaggtggaattgctaattcaatgttttgaaaagttctaatttccagagagatcatagcaatttatttgtttaatcatttatttttatttaaatataagggattgaattggtcatatttctcacttgtaaggccactctcatttgttatatttatttattctcttttattcacattcactaatctcattcccctttctcaccacaggcaattattccgatgtgtttcatgtatatccttttgtttgtgtttatttaaaatatgtagtattgggctggacatggtggctgacgcctgtaatcccagcactttgggaggccaaggcaggcagatcacttgaggtcaagactttgagaccagcctggctaacatggtgaaaccccgtctctgctaaaaatacaaaaattagctgggcgtggtggtgcacgcctgtaattccagctacccaggaggctgagacaccaaaatcccttgaacccggcaggtggaggttgcagtgagctgagattgcaccattgcactccagcctgggtgacgtaatgacactctttcaaaacaaaaccaaaaccaaaacctcccaacaaagagatttttcaaaaaaaaaaaaatagtagtaggataaaatatgtactattttcttagatgtgtgtatttttttcttttgtaaataacattgtaagacacatttttttttcttatttttcttttttgctgcagcatgtttttaagatctggcccattgcttctatctactgcatattactccacccatcacattttgcctaaggtcttcttcattagggacacccaaattgcctacaaccaaaaacatcactgccataactgtctttatacataccccttatagaacctgtgtgagaattttaggagggttgtatatatagtatcagaattggaattttatatttttttctctgttatatagtttttgctttcatatttttattattggtaaggataaatgtgtgtgtgtggtgtgtgtgtgtgtgtgtgtgtgtgtgtttcttcaaccacagtattctaggaattttctgatcacatccttagccctatcctctatggcttctttaaagactaattgagtctgtaattgattgtaatacattgaataaatgtaatgcatgagtccataatgatgctcaaagagcaagaaaagagaaaggaggaaaaaattcatttgccactattggaaatactatgacaccaactcctttgtcaggaaattggtaattaaagagaaagaatgaagcatttaacctgccattttaggaagaaatgaggttcatccccaattgatgagaggaaattcttctttacagaagaatgtcatctaataaatgtagaaggattgatagaattaaaaacttaccattttgcaatctccaatgagataattgattcaagcaaggatcatcagtgaatgttaaactatttaaaaagaaagaaaaaagaccaatctaccattgtatctatttcccaccattcacttgctctacaaacacttccaatttgacttctgctcctaccattctattaactacatgcttgaaagacaatgctggcttctcaattgccaaatacaatggtcttttctcagttctcatcctccatgatctcttcatggtatttgacaatagcagccacctcctctttcttgtaactctctcctttcatctacaaaagactggctatccattgctgtataacaaaccactctaatatatttagaggcttttaaaaatttattgttatttttcatggttctgtgggtagactaggctcagttgggtggttctcacttgggatctctgatgtttcagtaaatggtgtctagggctggactcatctgaaagcttgactgggctagacatccaggaaggcttcttcactcacttgtctggcatctcgaaaggatggctggaacagctggaggttaatagggcaactctctgtctccatgtgactggcttgggctccctaacagcatggtagactcaatatagtgaagattaaactctgattttttagtttgtccaaattcctacctaagggccctggggactcatgccctacaaaccataaagtctcatcagaggggttttcattttaactctgtatagtgtggtctgttttctaacctgactctggcataacatcacataacaaataagggaagaaatcaaaatattttaaccctaaatataattccttgccatatcttgacattgccctgaaaagttgtctcttgtgggaaaaatccacattccatagagaaacccctttcccgtttttttccttccttcatttccagatccaggagataatcaactaagagccaggcacccttttacatcggataagaaacattttacaacctgttctttctgaagtctgctatctgagagcttcctctgcacaataaaacttgtctccacaatcctaacctaaacatttcctttctgttgatcccaggtcttcagataaactcaaccaattatcaactggaaaatatttaaatctacctatagcctggaaggccccccctccgccaaaaaccaatgtacatcttaaatgtatttcattgatgtttcctgtctcccaaaaatgtataaaaccaggctgtgccctaaccacctcagacttttatacatttttggaagacaggaaacatcaggtctcaggatctcctgagggctgtgtcacaggccacggtcactcatatttggcccagaataaatctcaaaatattttacagagtttgactcttttcatcgacaatagataagacttcttacatagtgcctggctttccccagagcaagtgttcccaggtggaaactgcaaggcttcttaagagacaattcatgctctttctcacccaatatgcatcatctactattttcagcattggtttctttagagggggaaaaagaactgaaagacttttccaaagctgagtgtaaaatccatctatgtttttattgtttcatttctattttttttttttttttgagtgtctgtcacccaggctggagtgcagtggcgcgatctcggctcactgcaaggtccgcctcccgggttcacaccattctccagactcaccctccccagtagctgggactacaggcacctgccactatgcccagctaattttttttttttttgagacagagtttcgctcttgttgcccgagctggagtgcaatggcgtgatctcagctcaccacaacctccacctcccaggttcaagcgattctcctgcctcagcctctctagtatctgggattacaggtatgtgccaccatgcccggctaattttgtatttttagtagagatggggtttctccatgttggtcaggctggtctcaaactcccaacctcaggtgatccgcccgcctcggcctcccaaagtgctgggattacaggcatgagccactgtgcccagcctaattttttatatatatattttttagtagagacgggattttaccgtgttagccaggatggtctcgatcttctgaccttgtgatctgccggcctcggcctccccaagtgctgggattacaggcatgagccaccacgcgcagcctattatttcatttctaatgatgtgtctatccatatctaaccccaaagcaatttttaaaagaagtttttgtagagatggggtctcactgtgctgcccatgctggtctcaaactcctggcctcgagtgattctcccccgtcagcctctcaaagtgctgggattacaggcgtataccaccacacctggcccccaaagcaattttgaaatacctttatcggccgggtgcagtggctctcgcctgtaatcctagcaccttgggaggcagaggcgggcagatcacctgaggtcagaagtttgagaacagcctgaccgacatgaagaaaccccatctctactaaaaatacaaaattagccgggcgtggtggcgcatgcctgtaatcccagctactccagaggctgaggcaggagaatcacttgaacccggtgagccgagatcatgccattgccctccagcctgggcaacaagagtgaaactccatctcaaaaaaaagaaatacctttatcaagtctttcaaaacatttagctgaattttcatagaagcaggaacaatctttacacttgcacttgtgtttccacagtttacttaatatttaattatgtaatgtaatttctgtaataaataaaactaacacaaacagatttgtggagaaacttctcaattggtaggctcagtaagtcccagaaactagtttaccagctatgagcattcagtgcacatgggtgtaaattagtatattttacagacggaatagagggcattggttaatacaattaatcggttaaaagagtttctaatgtatcttttttgaaccttttgaattggaagtacataaaccactttaagaaacatagactcggctgggtgcagtgtctcacacctgtagtcctagcaatttgggaggccgaggcaggcgaatcacttgaggccaggaatttgagaccagcatggccaacatggtaaaaccccgtttctagtaaaaatacaaaaattatgagggcgtggtggcatatgcttgtaattccagctacttgggaagctgaggcacgagactcacttgaacccaggagacagaggttgcaatgagccaagatggcaccactgcactccaggctgggcaacagagcgagactcggtctcaaaaaaaaaaaaagaaaaaaagaaacaggctgtattggctttcataatccaaagcctggggtggatctggcatgacttgattcagggacttgaatgatgtgtcagctcccaatcttcctctgtctctcagctgtgcttaccaccatgttggtttcatactagactccatgcagtgatgagacagtgatggcagctcctggcacagaagagaaaacacgtaaccctctcagcaatcctaacaaaaagtctcactactttgtatcagctaagattgggtatatgcttgcttaccttatactgatctgtgaccagggagatgtgatgacctgagtgacttaggattgagtcccatgcctctctgaagccctttctaacccctggactgagaagaattgccttggagcattccagcttgctattatataagttgatttttttttttttttgagacggagtcttgctctgtcacccaggctagagtgcagtggtgcgatctcggctcactgcaacctctgcctcccaggttcaagcgattctcctgccttagctcccgagtagctgggattacaggcacccaccaccttgcctggctcttttttttttgtatttttagcagggacggggtttcaccatcttggccaggctggtctcgaactcctgacctcaagcaatccacccgcctcggcctccaaagtgctgggattacaggcgtgagccactgtgcccagccttagaaattctttttttgtttgtttgagacagagtcttgctctgttgcccaggctggagtgtagtggcttgatctcagctcaatgcacctccacctcccgggttcaagcgattctcctgccccagcctcccgagtagctgagactataggcatgcatcaccactcctggctaatttttttgtattttcagtagagatggggtttcaccatgttggccaggccggtcttgaactcctgacctcaggtgatctgcccacctcagcctcccaaagtgctgggattacaggcgtgagccactgcgcccagcagaagtccattcttgaagtaatgattgggttaaggaaggactatgggcttcttgagggcaagaatggcattgtgtttctgtctgtatcctcactcttcatacatagcacccagcatgtttccctacacacagcagacatcacttaattgtgaaccaaaaaactgcaagcatctttcttcattcactgtgtatcttactgctgtttatagaagacttgcccttgctgtgcaaaatgccagtccctatttgcctgggttttgtcatcttttgatctcttgtgctgccagaaggcctcaaagcataagtttgaatggggcttggactccgagacccatagagctaagctccgtatagaattccctgagggaagccttttcctttccatctcaagtccggcatattgctctataacactggttatggtgatgctgcagttttaattttaccttttgtgtttgttctagagccactttaaaggactctctttgggtctttcccctaatcctcctttctgacccccagcttcccttggtccctcgcttccctgcagccacagctgcctggctccagggcactcagacggcactgtcgcctaggcaacccagaaaggggcttcaatctactgtctccccagaggggttgggctggccctgagccaggaagaggcagggggcaggggacctgtaccagccctgcacagggcatgtcgggaaataaacagactactggtgtgctgtctgcattaagagatagggggaatgtcatgggtgtgttgtctgtgtgttatgtaagcaaacagccaaggatgccactgcccgctgagagcaaagaaatggaacaagagaaagaaggccctcccatacatcttggactcaaatctgcagtgatggagttaactggccaaggctctgttttagtttcctagggctgctgtaacaaagtactacaaactggatggctcaaaacaacagaaatgtatcttctcacaattctggaggctagaggtccaaaatcaaggtgtcagcagggccatgctccctctgcaacctgccagagaacttccttgcctcttcctgctcctagtggtttgctggcaatctttgacaatccttgacttacagccacacataactccaatctctgcttccatagtcacatagcgttctccctgtttgcctctgttttcatgtggccttcttcatataaggacactagtcatattagatttagagcccacccttgctccagtatgacttcatcttaactaattacttctgcactgaccctatttcctaacaagctcacgctctggcatggggatttggacttcaacatatcttttttaggggacacaattcatcccataacagcctcccagatgggtatgaaatgatgggagagatggttttagaagttcccatagtataagagaaagccctttctagggctaattgacaagactaaggaagctctggaacaccaggctgaggatcttggctttgtttagtagaggggagccatgaagggtctcagagaagacagcagtgtggcaatctataagactcagggtttttgtcattggttgctttttatgttttagtgccagtgaaatgaaccactcttttctccaacgcatactcccagctgcctctttaagtaacagccctacacagccagttgtagcatgacaaaaaccttcgaaatgaatagcacagagtttggtgtggttccgaagtaagactgccacttgccagctgtgtcagccttagttgcctcctcagtcaaacgaggattataaaagtaccaatctcaaagagttgttacagggattaaatgagtatgtatgaacttatataatatatatataacatattacatatatgatatacatacatatatatgtctagctacctgtctcagaagaaagcctgacaaagtaagaactcagcaaatgttcacaattattatgcaaagatgagtagttaatttggctaaggagtaaagtagaagtcattattattagtgctggttattaagactttagaccctggctgagcacagtggcacatgcctgtaatcccagcactttgtgaggccaaggggggtggatcacttgaggtcaggagtccaagaccagcctggccaacatggtgaaaccctgtctccactaaaaatacaaaaattagctgggtgtggtggtacgcacctgtagtcccagctacccaggaggctgaggcaggagacatgcttgaacccgggtggcagaggttgcagtaagccgagatcacaccactgcactccagcctgggcgacagagtgagactctgtctcaaaaaaaaaaaaaaaaaaaaaaaaggaataggaagagaaagctttcacttttactttatacaattttaaaataagcacatagtattttaataatgaaaacttaattccatttagaaaattattaaaataaagcattttgtatgcaagcaacattattataggcatatcttgaatctgctctgattttcttcaaggaaatcattcatgaatatgcatagactatttctggaagtatcttcaagaagctgatgacagcggttgcctctcaagagggagattgggggactggtgtttggagtcagggatgggaagaaaatgacctttatgctatattttcttttacaagatttaatttgtttttaaccaaatgcatgtattatgaattcaaataaattaaaagaaaatttttaaaagctacaataatttataattaccaatgaataatgtgtaactcacctcatgactgatcacaacacaccagtgcttctgactggagttgatcctaagcagagtgctgacagtcaaactcaggactccaagtccagaggttttttttgcggggggaggtgagggggacagagtctctttctgtcgcccaggctggagggcagtggcacaatcttacctcactgcaaacttgcctcccaggttcaagcaattcttgtgcctcagcctccttagtagctgggtctatagatgtgcaccaccacacccggctaattttttttttttttttttgagacagagtttcgccctgttgcccaggctagagagcagtggctggacctcggctcactacaagctccgcctctggggttcacgccattctcctgcctcagcctcgcgagtaggtgggactacaggccccaccaccacgcctggctaattttttgtatttttagtagagatggggtttcaccgtgttagccaggatggtctcgatctcctgacctcatgatccgcccgcctcggcctcccaaagtgctgggattacaggtgtgagccaccgtgcccggcaatttttctgttttttaagtacagactgggtttcgccatgttggccaggttggtctcaaactcctgacctcatgtggtccacccacctcggcctcccaaagtgctgggattacaggcatgagtcacagcatccagccatccacggcttttaatactacatcattgcccagcatagttgcctcaaggactgcacccttgcaagcccagtacctccaggaccaccccccgactcaacaagccatgacagtaacatcacaattgccatagcagaaaagtcatgactgtggaattaactcctcaacaaacattaaatattcagctcagtgaatttttatatatgttcacctgtgtaaccatgatctggatcaaaacatatagaccatactggtcaggcacagtggctcacacctgtaatcccagcgctttggaaagctgaggaggcgggtggatcacctgaggtcaggagttcgagactagcctgaccaacatggagaaaccccgtctctactaaaaatacaaaaaaaattagccaggcatggtggcgcatgcctgtaatcccagctactcgggaggctgaggcaggagaattgcttgaacccaggatgcagaggttgcagtgagcagagattgcaccattgcactccagcctgggcaacaagagtgaaactcaaactccatctcaaaaaaaaaaaaaaaaaaaaaaagatatagatcataccatctctccggaaggctccctcaggccccctcaagtccataccccctaaatgtaactactcttctgattcctatcatcatgaattaattttgcctgtttttaaattttgtataaatggaattatatggtgactacttgttcgtgtctggtttcttttgcttgacactattttgtgagatttatccatgttgttgtatgtagtagttgtttgttcattccaggattgaaagtgctgagtcacagggcatagatatgtatatttaactttacatatactgccaagcagttgtccaatgtagttgtacaaattatactcccactagcaatgtaaaaaaaatttcagttgttgggccgggtatagtggcttatgcttgtagttccagcactttggaaggctgaggcatgaggatcacttgaactcaagtgttcgaggctgcagtgagctatgatcgtgccactgcactccagcctgggcaacagagtgagactttgtctctacacacaaaaatgttccagttgctgcacatcctcacagactcttgctattgtcagtccttttaacttctgccattttggtggggggtcactattttaaacccctcttggttccttgattttccatctgctcagtcttccggtctgatagaccctcaatggactttgaactcctgaccaacacttcctgccctttctttcctggaatagagccgtatagtgttattacctgattgaatcctagagctcaccacacacaattctgatctctgccacaggctgagacctgactccagcccagactaagctctaatgctaatcacagactggtctctactctaatcacagactagctcttagccccacacactgagccctaatcacaactacagggtgaaccctgatcccaaccataccctgagccattaccccagcaacagattgagctttcatcctagatagaggtttaaactgatctgatccaaattcagactgataaacacaagtgggccaagcacagtgtcagaaattattagaagatgtcaaattgcaagaataaaatgcattgtaaactactatttctgtagcctctccttggttcacgtcaaattttaattgtgactgaattttgctaagttggggaaagaaactacaatcaaccccaccctgacatgttataaagaacaggctgggggcgggggagtgtggctcaaagaagcctaaagctgagccagtctgcagatggtggcgggaagacgggtaaccttcttcctgtcctcacaagatggcaggtttattttaagggtgtttttaacagcttaaaaaatggattcaaagaacactgggggaagcctctgatttttgggcttctgcccatgatgcctttttttttttttttttaacaatggtatttgactcccagtgagatttgttccttcattacattctgatcatattgcttttcacatccccctccctgcagaggctgttgggaaggaaaaaggaaacagccttgaagaatgaatgcttagaggttctatttttttttttttttttttttgagacggagtttcgctcttgttgcccaggctggagtgcaatggcatgatctcggctcaccgcaacctccgcctcccaggttcaagcaattctctttgctcagcctcccgagtagttgggattataggcatgcgccaccatgcccggttaattttgtatttttagtagagacgaggtttctccatgttggtcagactggtctcgaactcccgacctcaggctatctgcccacctcggcctcccaaagtgctgggatcacaggcgtgagcttccacacctggcctgcttagaggttctatttgccctatgtctgctaatcagcagcaagctgggaacataattttcactttttctttttttctttttttttaagacagagtctcactctgtcacccaggctggagtgcagtggcgcgatctcggctcactgcaacctctgcctcccgggttcaagcaattctcctgcctcagcctcccgagtagctgggactaccggcgcatgccactacacctggctaatttttttttttttttgtattttagtagagacagggtttcaccgtgttgcccaggctggtctggaacttctgagctcaggcaatccgcccacctcggcctcccacagtgctgggattttaggcgtgagccactgcgcccagccaattttcactttttcttatgcccatgagaaaaatcttgattttacccttagtaccaggaacacccttaatgccaggtccacagtgcaaagtggatcttcatacacgttctctctactggacaaaaatcctgattcgtttgagatttctaaaccttaactgggcaagacaacttggatgatgaggccgcgtggcattgtggaaaaggctctggacggagagtcaggagacctggacagtcatgccatcctatgtcgtgccactacaagtcccaccctctctctaggcctcccttctccatcaataagagtaaggtttaagtgcagctctttgtagtgtatttacatacattatttcatttaatcctcatgagaagcataataagtcccattttataaaagtagcagggatttcgagaaattaagacttgctgaaggtaacagagtaatcaaatagttttgattggtttggttttgtttaagttgaatgtaacctgctaatgttgttatttgtcattaattcactaattgacaaacattaattcagcatcttcatgtgccaaatactgttttttggctcaaggaacacggacgttttcaggaataatcttgttggttaatggtctacacaggtcaatgtgtcagttaaaaaaaaagtataattgctgggtgcgtggctcacgcctgtaatcccagcactttgggaggccaaggcgggcagatcacctgaggtcaggagttcgagaccagcctggccaacatggtgaaaccccgtctctactaaaaataaaaaaaaattagccggacatggtggcaggacctgtaatcccaactacgtgggaggctgaggcaggagaatcgcttgaacctaggaggcggaggttgcagtgagccaagatcatgccactgtactccagtctgggtgacaaagcaagactccgtctcaaaaaaagaaaagaaaagtatgattaagggtcttcttcttctccttctccttcttcttcttctcttaatggagtctagctctgtcgcccagactagagtgcagtggtgtgatctcagcttactgcaacctccacctcccaggttcaagtgattctcccgcctcaggctcctgagtagctgggactacaggtgtgtgccaccacgccaagctaattttttgtatttttagtagagacagggtttcactgtgttagccaggatggtctggatctcctgacctcgtgttccatccaccttagcctcccaaagtgctgggattacaggtgtgagccatcgtgtccagcccctttcttcttctcttaagacaaatatgggttaactttccatctctgtccccctggaagtctaataaaggggcaatgtcagctgtggtattcaacagcatcgcttatggtaaaaataactcctgattggtaaacttcttctgggccaggatacataagtacctgatgagaacacagctttgggccaccctaattgcagtgacacttgtaaccagttcatcgtctatggagaacctgatagctatgctcccgagacactagatatgattcctatttgggacagggcatttcttttcttttcttttctttctttttttttttttttgagacggagtcttgctctgtcgcccaggctggagcgcagtggcgcgatctcggctcactgcaagctctgcctcccgggttcacgctgttctcctgcctcagcctcccgaatagctgggacaggcgcccgccaccatgcccggctaattttttgtatttttagtagagacggggtttcacagtgttagccaggatgtctcgatctcctgacctcgtgatcgctcacctctgcctccaaaagtgctgggattacaggcgtgagccactgcgcccggccagggcatttcttcttcttcttcttcttcttttttttttttttttttccgagacggagtctcgttctgttgcccaggctagagtgcagtggcgcgatctccactcactgcaagctccgcctcccaggttcaagcgattctggtgcctcagccttctgagcagctgggactacaggcgcatgccaccaggcccgggtaatttttttgtatttttagtagagacgggattttgccatgttggccaggctgttcttgaactcctgacctcaggtgatctgccctccttggcctcccaaagtgctgggattacaggcatgagccaccgcgcccagcgggacagggcatatctaaactaaggttgtcgctgcacctgtgaatatgatcctgtctccttgcacctaagctgtcacctggggggccaaagaagactaatcactggataactacaataactctgctgaagagaagtgccagatgttgttctgctggcacagtgtgtcatgtcttgaatccttctgagtgaatctgatgcaaagtaaagcctatggtattgagggtaaatgtctggttgaactcaaagaccacctaataatggacatttcaggggcaaatccagatccagtagttttgaagatataattccaaccctattttgtctgactctagccatggttctcaatcttggccacacgttggactcacattgaaatgatattgaatcccttgccacaatgaacacagcaataaaaaaagaaagcactgctacacacaacatggatgaatctcttgggcatgatggtgaaagaaaggagccagccacaaaagagtgcaaactgggtaattccacttatcagaagttcagatgcagcccaaactaaccagaatagtggctattattgagggggtaggtattgactggaggcagaagggagccttctggggagctataaatatcctgtatcgtgatctgtgtggtggttacatgggtgggtgtatatattcataaaatatgtgaaggcagggaatctagaagcagaaagataggctgaatccaaaggtgggtggggggcttaactagagatttgaggcctgagctggaggctgaatcttctgtaaaaactcccactgaccctgcaaggtggaaagtgtgagccccgtggaaaggtactgaatagtaattctatcagagggacccaagactttgagaaaggagaaataggagaatgggacctagatgttcaactcccaagggaagcgggaaagcagcctgcagctgcaaccaaaaggaaaactccactatgcaaggagctatgaatataaaaacccaggggaggtaacattttgtggatatcaagtgacagttttggagatggtattttactttttatgtgtctctttcttcccccatctatttttaagacttttaattgcaggagaattaaataaagtaatgtacgaggctttattttagtcagactggagcccagacagcacctgaaattaggtcctgcctttgttaaagtggattaatttattcctagcttcaagctgggatgaaacttctggtgtaagaccaaattgaaagagaaaatccaggagtcatgcttcatgacaactggctgaaaggatggaggccactgtcttggtggaggaaggatctcagggaaagcgacaggacatgggaagtgtttccatatatctgaaggtttgccatgtgagaaaaaggcagatttgctcaagatgagtgcagaggggaacaaggaattc

SEQ ID NO: 59 - DNA, 162537 bp, Homo sapiens
gaattcatgtcctcatggaagagagggaaaaatataaaattacaattttggtgagttctgctaaggaggcacacatgggcggagttgaccatccaaggaggtcagggtctcagtcttcccagagaaacggatggtttagctgagctctggggatggatgggaatggattagatatgtcaaggccctgctgtaggaagaagcacagggtggacagagcccaggagcctaggtcagtggagagcagctgacagggccagggccagtgggaaaggctggaggggaagagggggaattcctacagggcttggcagaactagagaatgggctggagggctgcaaatggagaccagggaaggctgatggagccatccagggaagagatgcttgggctaaggcaatggcaatgcaggtggcaggagggggcagctcagaggtggtgcaggaggtgaagtggacagtgccagtggacagagggagtgtggaagtgagggcaggaggtgctgggttgactgtgggtttccggtgaggatttccctgctctagaccttcatgggagtggaatcacacaacatgtggtccttcctgacccttctttgactcagcatcatgtttaatcatgactttttatcaccttcagctgctgaagagttttaagaaggtgggtgactcacacaagtggtcttccagaaagatggcctcaatgccgccatgttcccatggacctgagccaagctcttcccagcacgggagcagctcactcctgccctcaggacctggcacaactgctgcagtttagaggaagcttctggcaccctctcctcctcctccacctggttagaagccaggatccctcatctatgtctctgctgtcggctgtgactaaaccaagaggagctagatgtctctgcccattttctattgcttataacagaatacctgaaactaggtaatcatctataaagaaaagaaatttgtatcttacagttctgtaggctgagaagtccagatcgaggggttgcatctggcgagggccttcttgctgctggggactctctgccaagtctcaaggcagtgcaagaaatcacatggtgatatggtttggatgtttgtcctctccaaatctcacattgaaacataatccccaatgttggaggtggggcctggtggaaagagttttgatcatggggtggactcctcatgaatggcttggtgctgtcctcaagatagtgagtaagttctcttgatatctggttgcttaaaagtgtgtggccctcccccttctctctcttgcttccactttaaccatgtgatgcctgctcccacttggcctttcatcatgagtaaaagctccctgaggcctcaccagaagccaagcagatgtgggcaccatgcttcctgcacagcctgcagaactgtgagccaattaaacctctttcctttaaacatttcgcagccttaagaatgtctttatattgatgtgaaactgctgaatacacatgaccggggctgggtgtgctggctcagatctctcttcctctttttataaagccttcagttccactcccatgacaacctcatcaatccattaaactattaattcactcatctatgaatgtcttaatccattcatgagggcagaggtgtcacgacccaatcaccgcttaaaggccctacccctccatcctgctacgttgagaattacatttcaacacgagtttcggaggtgagaaacacgcagaccacagcaccaagtgtccaggaagagcaagcccagccagaagcctttgggcaggcagcagccacagggccgtctgctagaggatcactcctggggtggagacacctggaagctcaggtatgcctcttgtttcccctaaattaaacaactggtttatttgacctgatttgcagagatggatctgcaggcccaaggtcaggatgactgagagctctggttactgtggattttaggtaaacaggatcccagagggcatgggcggagtcatgccagctcagggcacctgtgcaggtctcctgtatggagtgctcggtggagctgcctgaagtcaccatgtggggagcgggaggtgccacatacttttaaaaaaaacagctttggggagaactcactcactatacaggaccaaggggggatggtgccaaaccattcacaagatctccacccccgtgatccaatcacctcccaccaggccccacctccaacactggggatttcagttcaacaggaggtttgggtgagatctgaaccatccaaacatcttcatcatggaagacgttgtcctgtgtggacgtttccctgtctccatgtggggccacggcaggtccagctctcttgggcacattcaatgctagagccatgctgtggggttgtgagactcagtgtctagtcctggctcttctgctgctgggctgtgtgttcctaggcaagtagcacaacctctctgagcaccagtttgctcctctgtgaagcaagaagcatcagggcctctgccttcctcactgggctcctggaattgatctgtggagtggagatgcccctcctttgactctcgcagccaccaaagccccagtcacactgcactttcaacgccagctgtgaacacccgcatcctcctacacagagtgtgttgtgaggacagaaccaagttgtggcagacatttgtccctttacctcttttttggttcttattttttatttatttatttttttgcctgagatcctttctactgggacattcctcaatgcatgagtctttttttttttttttttgagatggaatctcactctgtcacgcaggttggagtgcagtggcacgatctcggctcactgcaagctctgcctcccgggttcaaacaattttcttgcctccgcctcccaagtagctgggattacaggcacatgcaatcatgcccagctaatttttgtgtttttagtagagacgggatttcatcatgttggccaggctggtcttgaactcctggcttcaagtgatccacctgcctcagcctcccaaagtgctgggattacaggcatgagccaccgcgcctggcccaatgcatgagtcttggtgggactttgtgacaccaggaggcagagcctgggtgcctggggaagagtgggacagaggtggagagagtcacccctccttctgaggcccctgtggctctgtcacctgaaggaggctgttctgtccattgtccagcatctacagaaagccattcagcagcctgtccgccaggtgttccttccacacagtgcttccaggcctccaagtgttctagaacacccggggcctctcacggtgtcggcaaacatctggggtttgacaggcttcttggggcctgggtggctgtttggggcctaaagagatgtaatgcggagttgcagagaagccaagaggtggggctggaggaaaaagccaaggaagaggctctgggcctgcaaatctccctcgcttcccatggacgggaaggggacccgggccggggacaccagcactgagctttcagcttgaggcaagatctccagatggggtggacacagtctgcagagggagtgaactccccgtccccagggctattcaagcagaggctccttccctggccttcgtgtctcctccttgtgcctggctcacccccttctatgtaaggagagagtcatcacagctctccccatggggagggaaaaagggaggaggatgagagggagcgaaggaaagaaggagacggaggaagagaggaaggtgagaaggaaggaaaggaaaaagggaagatgggaagcagggagggagaagagaagggagggagagaagggggaatctggcccccacgagcaagaccctaacattctctcttcgtggaggctgatggaagctgacttctgtgcggcaggaagtgccgtacacccgctgtcaccaggtggtggggggcgggtcttgcagaggtcacctcagttgtctccccactgtccccaattacccaggccagataggaggagaaggaggtgagcccctcttcccggccctggacgccatccgcgtgcaggacacagacagacaccgcagcaacaaggcccagaccccatggaggggagggtgtggaaactcaggaaggtcatcctgcaggctgggagtcttcaggagctcaggggtcagggaggagggagagacctccactgtgacctggccagggagcgagagagcaacagtgagagggcggcccctccgctgaccccagagaggttggcgggtgaaggccaaagccgagctctgacatacttgcactctcaggaaggactggtgggcacggaggggcctcctgctgcgtcccacaagcgggtcaatgtcttgggttgtttctggttccgagcatcacagtgttcagaacaacttggcagctgaacgacgctttctatcttgggttgtgtcggggagaggagtttcatcctgaaggcaaaggggccccggcccgaggacaggacaccatcactggcagcttgcaagcccagatgctggagaaagtgtcccacttgggagcaagtcaccgcaaagtctccacctgtctccacttccccaggtgcccggatctgtccctgcacttcagggtgatctcgggggctctcgcagccctgcccacatggtgggccccaccaacttctggaaccctcagggtacctgggaggctgccaggcagattaaagacaccccagttttgaccatccagtcaaaacagaagccacagccactcagaggtgcacctatcagcaccgaccatggccctggggtctcgctcctttcagtggctggctaggtgcgtgcacctgtgcacctggagccccaccaggaaacatacttcaaagcctgagccaagggcatgctgacagcaactttggaggccacccccatctcccctgctctttctgcatggaccccaaatactcccactcatgagaccaggccctgggctgagaaggcaagatccccttgccccaccctggccgaatgaatgtcaccctccaggtgcagagatgagtgggcttgcagcagcagccaagctgacggcatcccttctgctggcccctagacctccgccttctggcccttgggctccatctctccactgtgcactgacagccgagggccgaggatcgaccctggacgggtgggcaggcatcctcactttccacttccaatggaaggggtgagcgacttggaattctaaacatcactttcctctggatgggggaaaatgacccttggaaaattagtgacagcgcaacaatcatagtgcgggcctctggtggggctgtaggaaggattagaggaaagcaaatgcttcctccggcatccaccggttgcttggaccgcattcagaacccccggtgtgactactaggttcatggcacaccccacaacaggatggcaatgatgcgctgtttccaaacagatgcatccccctccctcactgggctttctggttggtgcactgagcagggacgagcagccctgtggcaattaggagatgcctccgtcatcgatccattcagccgcttggcaagaagcagacagaagccctcaagggacgattccccggccacatgtgatgcaaacaagaccgacctcaggagtttggctcagaatacggaataacaacgtcatgttgcagtcatttccactgtatgttaccacaaaacatttagaatgatgggcattacccatgaaggattgaaatatttccatcaaactcggacttgaaggctttgatttatttcctctgtgaaaggagatggaccccaccctcggcatagcgtcctgcactgttggtgtagtgtcttgctaggaggccggaaaaccaagctggagcccggggctgtgggcatgagccactgccctgtgtagctccctacagatctgcacctctgaaaggtttgctgagatgctgccccgtccaggcccagagttgatgagtttcagatcttctgcctcggccacccctccctgtggacagaactgctaatttttgaagttcaagggatccccgctttcttgtgagctgaacccagtcaccgtttggaccccaaggcttcctttgtccttactgacccagcgtggccatttccaagtggccaagctgcctcactgagaagcacagacctgttagaagatgccagaagcacccccagaagatgccaggcccgccagcagacagagatgcatcttcagagaagagaagttgtcatgcccagaccttccaagaagccgggctggagatgtgtgtgagatggagcctctagtcaccccatctatcctgatctgacccacgcagtggtcacagtcaggcttcatagagtcccccagagggtggggtcttaaggaactcagtgacccagacagacctgagcttcggtccaggatctttggattcacgtgcagtctgtcccagtgggatgctgaccaggtcgggtggctcctacctccctctggggcttgttggtgtacaggtgtgcaggtcaaggtgatcacaggttgctggaagcacctactttcctgcaggtagatgctcacacctgctgaaacagcccccaggcctgggtctctggattctgcctcacatcccagagtcaggggttgcagaagcctgtattgcctgggcgggggagggggaagctgggctagcaagggcttgttggggcctgagtcagaagtgggtgtgatctacagggaggggctcgagcactggacatgagcgtgccagacccagcaggggctgtgggagcagctctaggctcagtctgcagacctggcctccagactactcttctcgtctcccaatctcggtcttcccatctgcaaaatgagattgttggctctctcctgggggcttgccagataccccattcccagatggtaaatacgctcctgaagaaggtccccggggtcttagctcgggaccagccactgcagtcgggcaaggacaggccgctggacatgctcagatgaggaaggcagaactttgagaagcaagttgaaaactggaatctctcatttgggtattctgagtggcatgatacgttacgtgtgggctacctggagaggcgggcctgtcaggctatttgggttccctgtaagtgtgggcagcatggggccgtgggagggagctgacatgagtggccagggctgaccatgccgaccatctccaccaggactcaggatgctggcagagccccacccagacttctcccagtttctacatgctggatttagcacatagaagcactgtgcccccctgggtgtccagagcctggcacgtggccggctgtgaatacacaagtgctgaacacataagtactgaacaaatgaatggatgtgccagtgccaggcttgttgagctggccgcgggctctgctcgaatccttgatgtttttgtgcagaaactgctccacttcctgcatccccctgccaggaggcctggacctcagtctgggctgaactgggcactgttatccctgggcatgggtagggtaccaaatccttaggagggaagagcagcagtcatctttgctgcccccagggcacaccctgctgaagagtcccctttgctctcaaggccttcgtctctcagtcgggatgcctggtggtggtggtggtcggtgaaggggtgggcaggcagtaccagctggtctctgtggggagcctgaactccagagccctgcagagagagccaggcctgggctctagtgcctgcaggtgctggccaggggcctggctgtgtcagttggtctgagctgtggtctgaggggctcagcaggcaccacatctgcccctgcccagccagcctggacccaggtgtcaggtgcccagtggtgaggaggtggctgcccagagcgagtccttcctcacttgtgccatggcgaccgtgcctccccatgctctgtgggcacgcctgtgtggacctgctggatttagcacatagaaatagaggacagtcaattaaattgagatttcatgtacattcatttcattttcagataaataaggaatactattttgtcaatatgccctgtgcgttcttggggacatacattgatacatacttataccaacaagtggtttgctgtttatctggagtcctgtggactttctggaagcaccatccctatgggctcggcacccggcacaaacatgagtcagacttcctccctaaagcgtgcctctgatcacctccccttcctgcccccaaaccatcagtgtccccaatctgcggaactcctcaactctttagatcacaaccaccatcaatcaagatcctcctatcatacaccccacatactattgtactcacatctttattatttttttagagtgttatcttattgattttactctaagcatggagtggtcttgattttgttttactcttttctccccagcattactgaggaataatcaacaaattaaaattgcttatagtcaaggtgtacaccatgagaatctgatatacatatagactgtgaaatgattatcacaatcaaattaattaacacacccatcacttcacatagttactattgtgtttgtgtgtgtgtgtgtgtgtttaggggggtgaggaactaatgtattttttacacgtatgcagaaaagaaattagtttctaacagagctaatatatgcccacctgggacccagcaattccgcttctaagtatttacccaaaagaaataagtgcatgtgtgtatagcaagacacccaccagagcacacatggcagctccatctagaagagcctcaaagtggaaacagctcaggcgtcaacaggaaaacaaacatagaccttgggcaatggaacacttctcaggagtgaagaagagtggttctgatagaggcaataacatggatggatctcagaaacattaggacaagaaacaaggttcatgcactatgatttcagctgtatgaggttcaaggatggggaaaactcattcatggcagtgtggtcaaatgcaaaatacccagttaaaatttgtgtttcagataaatgatcaatagtttttttcgtgtgtgtaaatatgtcccaggatatgtcccaaatatttcataagacatacttatactaaaattttatttgttcatccctcattgtaagccttactgggcatcctatttgggttttttttttgtttgttttttgtttttttgctgcattttgcaaacctaatggggaatcccataacgggactctctgggtgtgtgaaatgaaatgtcctatagccagatcttggtggtggtttcatgggtgtacacacacacacacacacacataaaaattcatcaagcttaagatttgtttatacacttatgatttgtcaacttcactctatgagaattatacctcagtaaaaagatatgaagacaggtacttcctgtacctgataaaggacattgaaaccaaaccaaacaaccctgtatctaatattctacttaatactgagagactagactttcccctaagataagggacatggtaagatgtccattcttatcacttctacgctgttctggaggttctagagggggtaattaggcaagaaaaagaaataaaaggcatcaagatggaaaggaaaaagtaaagctatttctatttgcagatgatcttacatgtagaaaatcctaagaaattaaataaaaaactattggagttaatagatgagttaggtatggttgcaggatataagatcaatatataaaaattccttttatttctatacactagcaatgaacaaatcaaatataaactcatgtatttatagtcaactgaattttgcaaaaagtgtcaaggccatttaacaaggaatgtcttttcaacaaatggtgctggaacaactgggtatccacgtgtaaaagatgcaatcggacctctaccccatactgaatacaaaaattaactcaaaatagatcaaagacctaaatggaagaaaactataaaacttgtagaagaaagtgtgggtttaagtctttatgaccttgcattcttaatatgacaccaagaaaaaaaatcaaaaaacaagtaaccaaacaaaaagaaaagatctagaatagatgaattagatttattcatccaattcataaatatatgaaaatagatgaattagatttcatcaaaattagatgagttggttttcatccaattcaaaaaatcatagattaatttcatcaaaattaaaaacttggctgctatggtggctcacgtctgtaactccagcactttgggaggccaaggtgggtggatcacctgatgtcaggagttgaagaccagccttgccaacatggtgaaaccctgtctctactaaaaatacaaaaattagctgggaatgatggcggacacctacaataccagctacttgggaggccgagggaggagaatcacttgaacccaggaggcagaggttgcaatgagctgagattgagccactgcactccaacctgggggacagagtgagattctgtctcaaaaaaacaaaaattaaaaactcgtgtatttcaagggagacaatcaagaaagtgaaaagacaacccacagaatgggagaaaatatttgcgaatgtcatatctgataaaggtctagtatccagaatatatagaggactcttacaattcaacagtaaaaagacaaaccaaatagaaatgggcaaagggcttgaatagacgtttctccaaagaaaacatgcaaatggccaataagtccatgaaaagatgctcaacattattagtcattagggaatcacaaatccagagaagactaggatggcactccacagccactaggatagctaaaattaaaaaggcagatggtgttaggtattggtgaggatgtggagaaactggaacctcattcgttgtggtgggaatgtaaaatgatacaacctggcgattcctcgaaatgttaaacgtagagttactgtgtgacccagcaactccactcctagatatcttcccaagagaaatggtagcacttggacgtgaacattcccagcagtgtaataccagccaaaaaacgaaacaactcaaaagctcatcaactgaaggatggataaatagcctgtactgtgcccaaaccatggggtgctattcaaccataaaagaaggtttgcattgacacacactacaacacggatgaaccctgaaagcagccagtcaccaaagccacacgcagtgtatgttccatttgtatgaaatgtccagaagcagtcaatccaccgagccagaacgtggattagtggttgctgggactgaagtggagcggcggatgtggggtggctgctaatggtgtggggtttctcgggggtgataaaaatgttctaaaattaggagtggtgatggttgcacaactctgtgaatatactcgaaaccaccgaatttacactggaaatggatgaattgtatggtattcttggtcaataacgctgttatttctaaaaaggtctgagaaaataaggataaatgtctagcgtttcttccgcttccagtgactggccttgtcactcttgggcgtgtggtctgccgactcagcctaaagtcagccggccactggaggcccttggtgatgtgggctgccctctgtgcctcctggtgtacaccccatggggaagtatgcccagatgttccagaaccttcccaccttgtgccccaccttcatttaccttaagcctcacccacccaccttcatcaatggcctcccctgggctcacagtgacggaccctgatggcagaggcatcctgggtagcttccctggctgcccagcatatggcaggaggggctcacttgtggctaaaccaacagatatggtttggatctgtgtccccacccaaatctcatgtggaattatactccccagtgttggaggtgggtactggtgggaggtgattggatcctgggcacagatttccccctttggtgcggttcttgtgatagtgaatgagttctcacgagatctggttgtttttaaaagtatgtgacacctccccgccctctctctcttgctcctcctcaggttatgtaagaggtgcctgcttctccttcaccttccaccatgatcatcagcttcctgaggcctccccagaagccactatgcttcctgcacagcctgtggaactgtgagccagttaaacctttgttctttattaattacccagcctcaggtgtttctttatagcagcttgagaaggaactaatccaccagccaggctccccgagaccaacacctaacactttatgggaagcagaggggtcagagttcctgcgaaggcctcacccagggcacatggctgggaggtgggtgggtgcagggcatgcctgcagcatctaccccacccccactccccacttcatccagggaggcccctgctcagccttctggcctctgctggaccctttgagggctcttacaggctcagagaaaggcagcgtccttttaggaacggaaaaccagaaagaatgcttgaaaagagagctgcctccgaggagcggactgcctgttggtttcttggtgccttgcaggggaaggggacctgcccagggctccatccactttgggaatagccttctcaggagtgacagagccgggccctcgccctgcagaagcagtggtgaacatccaaagatggagtttagacatgcactattttccagtggtgcagggtttggctctgtgaagccggcacagccagatagttgagagcattttaagtttcacccaactaatgttcagtgtgatgaggacacggtcagaagcagggtggaggctggggtccccaagtggggttttaaaaatctgtatcagtttctcagcctgcagtgattttgtccccacaggcgtttgatgggatctggagacactcccttgtcacaactggaggggacccttccggcctcttgtaggtggaggccggggatgaggaacacagaacagcctccgctcctcccctcaacaaaggatgacttggcccaacgggcccatgacactgtggctgagacacctcgatcctgtcccagggagggatgaggccagaccctggctgagaaaccctcatcctaccccagggagggacgaggcacagaccctggcagaaggcatccgagcacagcaattctcccagtgcgctgacactggctaaagacatagccattattcttttgggtgataaaagtgatgcatgcttgttggaaaaaaatttgaagaacacagaaaaatccaaagaagaaagtaaaaatcatttaaagcaggggggagagcagcaacatgatacatgctcatgcttcatgttgtattttaatctcaaacagcataactgtgcagtggacccttaaacaacatggagagtaggagaccaagcccctgcagatgaaaaatccacctacaactttcaactcccccgaaacttaactactaatagcctactgttgagtggaagccttgtctataacatacaaagtcaattaacacatattttgtatggtatagactattcatgccataaagcaagctagagaaaagaacatgttactaagaaaatcataaggaagagaaatgtatttactattaagtggaagtggatcatggtaaaggtctccatctttgtggtcttcatgttgtgtaggctgaggaagaggaggaggaagaggaggggtggggggttggtcttgccatctcctgggtgacagaggcagaagaaaacccagggagaagtggaaagaccctccagttcaaacccgggctgtttgagggtcagctgtacattgatttgatgaaactgcccactggagttccacgtcttctcctaagcacagaccacgctcattctcagtttcaatttctttaaggtgaagtggaagcttacagacatgtgacacagtctgaattcaggatttttctagaatgatatgaacgggcatcacaattgtttccagctgcctcaccctttactaggcggaagctttttttttttttttttaaagcaacttatcagtatcattttctaaagcgtaaagcttcattttcgtagattagtaaccatatttttgcactcggatttcataggtaggtttatgtactagttaacaaaataaattaagtgatgcatggtcagcctcccgtatccactggttctgcatcaacatattcacccaatcttggatcaaaatgatttaaggaaaaaattcagttaaaaatacaacaataaaaataacacaacaatgaaacaaaaaatacagaataacaactgtttgcttagtattacaattactttaaatctggattacttataatgcctaataaaatgtggcatattatattttaccacaagggtccacttacatgtggattttcttccaactctgccaaccctgagacaacaagaccgcctcccccataatattacaccacattttgttaggtattataagtaatctagatttaaagtatgcaggaggatgtgcctgggttctatgcaaacactacagcattgtatataagggagtggagcatttgtggattttggtctccttggggatcctggaatcaatcctccttgggttccaagggatgaccgtagttgtgattagaagtacagaggtattagcagatgcgtgaacccactgacctcagtgggcagatgcagctgggagtaggtgggcagggtgccaggaagcaggtgccagctggggctgccagttccatgtgggcatcagtggagctctgcagccagagtggggtgtgtgagttaatgtggctggttggctacttagaggtcagcttggtggaggccagctaggtgggtctggttaggcggcctgtgtgggttaatggggccggttggcttagaggcagcttggtggaggccagccaggtggggctggttaggagtcctgctatctgtggtctttcagtctgtttctctgcgtgtggctgtagatttgcaaaatcggcattctattacacacgtgatctagcagcccctcgtccccacttaacagcatacacacctcctgatagtcctgtttcaatgtggtggaggaggagcacaaagctcgcatctctcaccccagactctggggcctgagccgagaaaagaaggcctgtggagtggcgcacagaggtgaagacagggatggagatgaggggtcaggccgtggcctcgctgcactctctcaggtcccgtgtgattgagcaccagaggcagcatgccccaggtggccgcgtcggaggtccatggacaggcaggccatggggggacgctgaagcctcctggtgagggccattctggtgccgagtgtgcctctgggtggcaaagccggcctcatgtcagggaaggagcctctgctgggtggtggggctggacagccaagttgggcggtcacgtccacggccggcccgaggggttggaaggagctctctattcagcaggtcacctcagcgctgggcttccttctatggccacttgtatgtgattgtgattatttttcattggcaaaataaaatccatgctagaaaaatccccaggattctggtgctttccacatttgcaggggattttggcatgcctgggcacgcacctgtcttgttttggcgaccccaggtgcccatgctgccaacatcacttgggggccagtgggttcttatgacatcttcaccatccccactccgccccattaccaatgacctgggcttggcaggtcactggagatccccttgttcatcaaagggaggacacagcctgagtagagtgtaaagagtttccgcccaaccccaccctcccaaacccaacaaacccatccgtctacccacatctactcctccagccctcctttcctccatccacccattcttccttccatcttcctcctttcagccctccccactccttttcctctctccctccctcccttcctccctctctcttctatccatctctcccttcattcaccaatcctccagcccttcctcaactacccatttttctatctttccatccttccttccatcctttcatgcatatctaacctccctccctccctctcttccttcctttcttccttcttcatgccttacttcccccctctctcctttccatctctccatttctggacacatttcctaactattttttcactcgtctatctttctctccttccttatttccctccatgcatctgctctccctccctccttcctccccctccctcctttctttccatccagcaggtgctggctgagcaccaggcggtgtcagaccctggggtgctgagatgattcagacccagccttggcctcgatttgcccacagtctacttggacagacagacgaggcaatgtggactttccctgcagggtgatgcctgcctgggtgacatggagcccagaggaggggtgcctggcccaggtttgggtgaggaggaacaccccactccgagggaaggggatgagcaggagccggtgggcggccgggagtggaagtgtgacccatctccagcagagcaaacaggttgaaccatgggtgggaagcaagaggggtgcatgggtggactggttggagcaaaggtcagaggcagggccaggagggtgggctgtgaggctggacacacctaggagagataaggaggtgcaggtgccttgacacacacgtgtgcaggaagtaggggcctggcccacaaagacaccgtgccccctgcacctgctgtctggccagtttgcacaaatgcatgcactgctcaggctctgtgtggggctgctcagggtctggggcaggtgcagagtggaagcgagaatgcagcgctctggggcgccaggtgcctgcctgaacttcctggctccaagcagttccctgcctgccaggctggaggatttgtcttctggggctgcacagatggagcctcctagactgcagggaggacaggtccctgtactggtgcaaggactcagtgcctgtgagctgtgtggcctcggggcagccccttccctcttaggggacctgttttggcccactggacactatgattgaaagcacaggttccagcttgcaggtttaagtcctggcaatgaccttgggcaaatggtttgcccctctggtcctcagcgccctgccctgccaagtggggcagcagcccctgctgtgtgagagcctgcatgctggtggcagcagctggaccctaagcaggcttcagccctggacactgcaaattgttcccttgagcttccatcacagtgctgccggaggcgcgggaaggcaacatggtgtgttgtaacacgctgcctggtgggagcgtctctgctaggcctcgagggccctcctttgaggttggccaggaaggggcaggagagaggagagctggggccagcaaagcaggctcagagacgcctccagattcggtctgagttgaaagggctctggtcgcagtgtggagcaggtgtgccctacattgcaaatcccactgggtcttctcattgccccacagcagccccaagaagcaggtggtgtcgctcactcaagccctggagtcaggaagggacagaacagggactcgcccagtctctgcaggttcccgccaatgcactcctacctcctgcttgcacttactcctcatgatgaagtctgtacagttccaaccactgtgtgggttacagcaaagaggcttctctgagtagacagagtgaaaggggtgggctggtctcatggtcagggctgccgctggctgggcacctgctgcgtgtcccagggtgagctggattcttaaccattcggctttacacaccttccactttagaacagttgcagcttcacggagaagttacggacacagcaagagctcccgcgtgccccacacccagcttcccctactgtgaacatctaatattagtagggtgtgcttgtcagagttaacgaactcatgtcaatgcattcttgttaattaaggtctgtagtttgtttggctttcccacaatacccttttctgtcccagagccccatccagggccccacgtgacactgggtcaccccatttcctgagactccctgggctgcggcagcttctctctttgcttgcttgtgacatcctcaccagttttgaggactggttttgaggatttcacagaatgccctttagttgatctcatagttggactgggttatggggtttgggaaggaagaccccagagggaaaacacccttctcatcacacctgccgctggcaggtgctgaaggcatgacttatctctgtggtcccctttctactgaggaaggaggtacagcagctcacagaggtgacaagcctggaggaggcggagtgggcctcatcacccagggatgtatctagggctcgctatccccctgcctatacctgcacttgcatatacctgtacctgcacccgcatatacctgtacctgcacccgtccacctatacctgcacctctccacctgtacctgcacctctccacctgtacctgcacctctccacctatatctgcacccctccacctatacctgcacccctccacctgaacctgcacccttctacctgtacctgcaccccttcacctgtacctgcacccctccacctatactcacatttgtacatacctatacctccatccctccacctacccacacttgcacataccttcacctgcacccctccacctacacccgcacccctccacctatacctgcagtcctccacctatacctacacccctccgcctatacctgcacccctccacctgtacctgcaccccttcacttatacctgcacccctccacctacacctgcacccctccacctacacatgcacccctccacctatacctgcacctctccacctacacttgcacccctccacctatacccacacccatccgcctatacctgcagtcctccacctatacctgcacccctccacctatacctgcacccctctgcctatacctgcaccccttcacctatacctgcaacccttcacctatacctgcacccttccacctacacatgcacccctccgcctatacctgcacctctccacctacacttgcacccctccacctatacccacacccctccgcctatacctgcagtcctccacctatacctacacccctccgcctatacctgcacccctccacctgtacctgcaccccttcacctatacctgcacccctccacctatacatgcacccctccacctatacctgcacccctccacctatacctgcacccctccacctatacctgcaccccttcacctatacctgcaccccttcacctatacctgcacccctccacctacacatgcacccctccgcctatacctgcacccctccacctacacttgcacccctccacctatacccacacccctccacctatacctgcagtcctccacctatacctccacccctccacctatacctgcacccctctgcctatacctgcacccctccgcctatacctgcaacttgcacatgcccatacctgcacctctgcacctggacctgaactgcctatacctataccagcattttcatcaggaccctttggagttgaggctctgagtcctgatgcccaggtctcaggcactgaggggtatcaattggccccagacagtaaatgcagcctgcttccaggggcagacatccaccccaaccccactctggctggcgttcctgcacagaggctgctgcagtgccctgtgtgtggggaagggtgcgcctcccctgtggtctcctttctgggggccggcccccgcccccaccccatcccaccacagagcctgatatctgggggtgaggtcatcgttatttatgtgatggccctgctgcccggtggtgtttgcacacaaaggccccgctctgggactgtgccatgcgggccggcattccagcacattcctgcagcccgcagcccagccctggacaatagctcgccctctctcctttgccgggccggcctctgtgaacagagcactgttgacagccgaggctgctctcactcccgaagaattccaaaaatggaacaatgtacgcccggcctgggactctcaggcagctgctcagagcagggccctggaaggctgcggtctggaactgcctgtgtagctgtccttttggccggcatttcaatgggaacctggggcagggcggggcgggggggcgggtgggcgccacgagaagagaggaaatagaaaacacccaaaccaacctggaagcaagccagcacttccctggccgcacaatccccgtggtgaggaggctgagatggtgggctcaagcacactgtgctggccaagtctatgcaggcactgacctttgcccaagacctgtgagtggttccccagctcctagatcagctcctgcctcagacaagtaaatgggggtggcaaggcaggagtgacacatttgagcagtgggggaatgagggagaacgagagccgggacccctgcatcctggtccagggctcaggccactgctgcctcccaaagatctgtcctcagcccaggtggggaccaccctgctcctgagtacagtgcccccctgcattgcagtctcaggacaacttctgaaagcctgctgtggctggaggaatgaccacacctggacgtccacagccacttgtcccaggatttctctatcctgcaatgcggccggataattctctgctgtggggactgtcctgggccctgtagggtatttagcagcatctctggcctctgccctccagatgccagtaccaagccccttcagttgtccccacaactgtctctctgttgggggcagaaagaaaagagagggaagagagaacatccaaaccaccctcaaagcaaggtagagctcccctgagtgcatggtgctcgtcaactcaggaaagcacggataatgctgccggaagttggttctgcagctggcgaggtggccacccgggacaaggatggctctggcgccatgcccgtcttggactagaaggaaaagacagaaggacgagtctgcctgtgagtgataccaacacgggaaagcagagctagagaaggagggatggagaccccaagttccgatgacagactcctggaaccagctatgcctgaagctcttctacatcaattaaccctctccttttggctgtaaccagtttaaattggtgttctgtcgcttgtagctgaaattttctgcacaacccaccttcttcacccgatggcacgctgctgtctcttcccagccaatcttggtcaggagaaacattcactgttgctgcagggggcttgggctgtcatggcctcccaaacccagctgagcttgctgcatattgttaaagccctgcgggtggaggagagcaaggcatcccgtgcccctcaaagtctgccaccagcacggtcatcccagctgccccacctgccccaggagctcctgtcatcaagccctgcctcctcttttcttcccggagctcacatcatccccaggaggtacttaggaccagggatctcaggcctggtgcagaggtgaggacagaggtgtaggagctgggactcggccccacacccttcaagttcccagttgtgaacgtctgggccctgggatcagcaaagccagcctcccctcccggccatgtgtttatgctggacatgaatggagcccctggaggccaggaagggtgaggcctccaaagccctggggaagatcctggtagggggacaaccccaggctggatgggctttgaattatccaggtggcaccagaacctcagaggcctctttcacaggcgggaatgatgtggcaaagcccagctggccccaagtggcttcacatattccacagggagcagggacccactcacttcccagcagcccctgtgtgtgtgtgtgtgtgtgtgtgcatgcgtgtgtgcacctgcacacccatgtgtgtgagtgtgtgagtatctagcaggggctggtgaggtgagggcagcttcttccaccttccgggctctgggtgggtgtcctgattcatctttgtccttgccctcctcacttaagacctgctatcctggtgcatggcttcttccagccccagggctttgtggcaacttcccactggtcagaatcatacattgaaaaatcttcctagaagcaccggggggttgggtggcctttccctaccaggtctccagaggttccagcccctctggttcctgtccatgctttcctgctggaggtggggactctggggaagccacctactcctcatgcagctcttccaggagtgcagcggctgctgtggccaattgtgcccacaagcctgccagcctcaatcttactggccagttgtcaaagcccagatcccaggtctcaccatgttttcctctgagagggccctcactgtccgggaccacctgccatgcagcaggcacttgagtccaggatttgggcctctctggcagggctgctcccctgttgccgcaagtgctgcattttgaggagtcatttccacgcccccggcatagtcacgaaaagccccttgggtttgccctgaaagcccaggttgtggttgagggtctttctgtgcatctggcaaccacatagccctgtgcctatgccctgcagaaaggctggcttctccgcctccttgtctcctctgtggggggtgggcctggccctgtcatgccagagaggaatatcggtgaagctgccggatggcgtcaccgcgggaagaacaattggatgatgacaatcgaaggaaggtgaaagatcttgtcccagtcttcctgtttttgtgcacagttgactcagatgggcactgataacgcggctgagggctggtcctgcagcagggctggggtggctctggctctatgcccatctgtgccatctcctgcttcttcctgtgcagagcaggggtcagatggcaaagccttcatggctcaggtgtggctgggggcacctggaggtcctgagatggggagcagggatagagatgaaaggttctcacgccctgccctcgggctgcccctcgtggtgatggcaagcaggtgacggcagcagcaggagagcagtgccctctgccaagggaagagctgcccaggcctagagtcccaggatgtagcagtgcccagtcttctcgcagagcagaacacatccctgtcaggtcttcctggcctctgcttagacctggcgggggaggcgatgtgtcagggaaggatttcttgagatgtcctagccgccctagtccccacgctgctggacagctcaccttccagaaagctctcccaccccctggagtcatgccgccccaggggccccaaggccaccgaactctgcctccttccaaacttcctttgatggtcgaagcgccccctccacacgccatgaacacagtgcgtgagccaggttttcggcatgttttcgtcgctttcttcataactgcccaaacttggaagcaacccaggtgcccttcacaaagcggatgataaataaactgcggtacgtccagatagcggaatattattattcagtgctaaggagaaatgagctcttaagtcgctgaaagacaggaagagtaactacacattactcagtgaaagaagccgatctgaaaaggctacaagctgtatgactccaaccctgtgacatacggaaaaggcaaaactgtggagacaggaaaggatcagtggttgccaggggctgggggaggtaaggagtgagtggatggaggacggaggacattgggggcagtgaagctattctgcgtgatactgtaatggcggatatatgtcattatacatttatccaaagccacagaatcaccacaccaacagtgactgcttatgtcacctactgactttataataatgggtcaatattggttcctcaattgtaacaaatgtaccacaagatgcaagatgttagtcacagaggaaactgtgtgtgtgtttgggaaggtgggatatgggaattctgcactttctgttcagttttgcagtgaacctaaaactgctctaaggaatcatctaatcattgattaaaaaagaaaaaaggaatttgcgtgcaccacacgccagcttcgaatcctcaacagatttcatcaccgacagcagtgttccttaggctgatctgatgcagatcctttgaaaagattcccgtgggttcctggtgttggttaaaatgccttttattccagtgctttggaaatagtgcagacacaaaactagggtaggctcctaggctgacagctctaatacagccccagacccaaaccaagctgacaaatctcacacagagctgcaaaagcaaggcgatgcctgtggacagcatcaatgtggtgagtgacatcttgctgggtccaaggtgctgtctgtgtggcaggtgagggactgacggacggcttgggtgccatttctttgacgtggggcattcagtgccaccccagccactttctcttttttcagcctgggaatcttccctgagattgcgatgccagtgggccttcctgggtggatgcgtctttcatctccatgctgcgttctcatcccagctcacaacccacagcattccaggaggcttcagtgtgagctcagaggtcagcaggtcctctttaacccccgtacagtttcctatggctgctgtgacaaataccacaattgcagtggcttaaaacagcacacgtgttatctcacggttctggaggtcgggaatcggacacggtgtcaccgttctgcagtcgaggtggcagcggggctgggttctgctggaggctccgggaagaggccttgccctttctggcttccagaggccgcccatgctccttggctcataggtcctcctccatctcaagccaacagcacgtccctccgacctctgcttctatcctcacatctgctcggctccccctgcctcctcctccacttataagcacccttgtgatgatgctgggcccgccagacagtccagggccatctcctcctctcagggtccttaaccttcatgcctgcaaagtcccctttgtggtggaggtctcactgtcaagggtgacgggttaggatggggcatctttgcgggaggcacgattctgccgaccgcagcatccctctttccctcatttcacatccactcagttcagaaccctgctggctctaccccgccatcaccactggggctgaagccacatcatgtctccctggaggactaccccaactcctcgttggcctcctggcttccatcgtggtctctctccagtctcttctcatcccagcagccaggcggttcctgggaaaatgtgagaccaagcctcccattagttcctgtcttcaaggaaaatcaaaatccttccagtggccgatgaggtccaaacccatctgcccatcctcccagttccctctgctccaccccacgggcctctgtgccctcctgcctcggggcctttgcactggccgctcccgcctcctgggctgccttgccctgtacctccgtaatccctgtccactgtgctccaaatgtccccgctctactctgcatcacttgcgacttctagcagaccccaacgccctcttgctcccgatctccttgcctgtctcaccacgctgaagcagcgccatggggcaggggttctgcctgctgagtttgctgatagagcagggcctggctggagtgggcgctccacacagattggtgcggcacatgcaggaatgggtgagaggaggctggcagaggcttcaatggaggaggaagatacagaacacagggctagcatatccaccgggtcttcataccaagggcccagggctggttcaggcagagcaggagaccacagcccagctcctcgggaggtcagaatcgtctctctcctccctcaccccacagcttcccataggctaactccattaccaaacagccttttggagcaaactattcattgattcacttactaagcaaatgttgaccaggtctggtcaaggatgtgtggatgctgggataagcaaggtccttccagaaggtccaagttcatggtggggatgcaggacgggatggtcgtggctgcactgaccgagcacctgctgttccaagcacgttccaggtgtcagctctttatcctccccctggagcctgcaaagctcaacctggccatctactccttcatgctgtgtccctgctcccacaccttcacctcaccactgagccctgccagctcgcctctcccactggccacctcaaccctccccatcacagggtgtgttttgcagtctccttgtttgtttcttccaccaaactgggggctcttggaggtcaaggcctggggtcttcgatgtcttcatgtctccagcagctggcgcacagcaggccctcagaaaaagtggataaaaaagaaacgatggctggctggctgcataatgagttgataaatgaatgaattccagggggaggtcttgcttgggcagagtcgcaggggtaagtgaggagggggcggtggaggggcaggggcaggcccttgctctgagcctgaggaggggtgcagagtctggaaagggaggtggggctaagcaatgatactgctgcactgctgagcgcctgctgtgccggggtctaccactggactttcccaatgacactgtcaactggggaccagcgactcccaccaggccgaaagtataaccctaggatgtggtagaactgggctttgacacgaaggcctcaaaggcctgcctgagacgtctggactctgtctgcaggctgtgctctcagagggcacataggggcccccctgccttgggaagcagcttttgagcccgcctcagggaccccacctcacctgcgctcgggatctctctgctctcacctgcttccattgttttaatgcttccagatgagtttgtatctggaagaaaacaaggattcatcggtgaattgtatttctagctgctgcaggcactggggagccataggaggtttcagagtcaagaagaactggatgaaaggcggtccctgtcactcttggaagccattgacttttcaggttctttgtcttcacagcactgactgttggctgtgtacgccccagatcccacgcctccgcagtcctgccagccttaccgctctaccctacagagactgcagcttcggacaaaagcccattcggcggaacagggctgactagggatgggcctcttgccccagatgtgcctgggatgatggtgggacagcttcactccaaccctggggcctggaccaaatctccaaggagcatgtgtgaggggctggggcacttctccttggctggggtgttgagggaccaagggctcctccaacaaaactccaggcccctttctgacctatgctgtggtggagcatctccttggggaagaattgtcagacactccagggtgcaggagctgactcaggtgcatgaggtcctggctgggacctgggattggcacccccacccctggggctggaaccactcacccagcctgaccctggaagcttaccctcctcacccgctgagagtgtcgggatggggctacagagggcaaggtggaaggccaaatccagcctgccagcccctgggaggctcggccacgggggttctctgtgaggacagccaccctctttcttgactgtggtcacagaagcctgatgcattggattgtgcctttttgattttgcaaatgagacctgcccctgtccctgcgggggagcctacggcctatggacgcctctcggcccttggagcacccgctaccggtgcatgggagtccgcagcccgcctgcagcaggagcacgttcccactgccccaggctattcttaacaagccaagcctccggctccagggctaaaaataccacatgggaggcctgtgggaaagctgctgctggctattttagtgatttcgcgctggaggtttggggtccctgcatgctgccagggcagggaggacactgcggcctgcactgcccaggccccctctcagcccatgttggggctcctctgtgtcaggggtcctcagagcccaacggcagcagcctctggtgtccagggaggcagaaggaaagacctgggagtcttgagctccctcatttcagtttcggagaaaccagctccaagtggggagcaggtgcccggggtcacagtgtggtctgcggtggagagaccagagggcgtctggggtctcggtgtggtctgcggtggggagacccctggactgctccctgacatgtgatgcctggtccagctccccccaatccgaggggcgtttgggggccacagccgtggtgtgcaggttctgaatgggcttcttagaccaaggcatagcttcccattacctttctgaagccttatctacacactttctttcccatgagccttttcttccttgatttcccatcatctctcccacagtttggcaggtgtggcagaggtggctttggccccactgtgggaatgcaaaaccaaggctcaggaaggagagacgcgtgtcaaggctacggctgtgcagggctgggccaggctggcctcaccctcccaagcctgggcgtcttggtggtgcccccggcactcaaatcggccctttgctgccggttccccatgcccagggccccgtgccatgctggtgactgatggccattgtgttctcagactggaaggcctggctcctgggcagccactgtgtgtctgcacccatgagctgtgtgtccctgcgacggggctctgatgggcaagcatggtgatcgcccccgacaggcggcacaacgttccattgtgtggggcccaccccgggccggtccattaactgcccctgcccagcagggccttctccagggtttgacaaaggcgccttttctgtaccctcctgttgccgtgggagaggcctgggtctggtgcccacctcgggggctcagaggagcagctggggtggcgggagggggcccaagcctgcttcccaatgctgcctgctgcagaccgaaaaggccagacctgggcgtcaaaacggctccgttgctcgttggccagaaaccctgggcagtcggtcaacctgtctgggccttgctgtgtctccctcttaccctggtccaggggtccaggccagttctcgcatgagatccagactcaggcatgtggtgagtggctgtgctcagggaagccccccatggcctgaaggacagaggcctgggatgcatcatgatgttcttttgtggcagtgacagaggcaggatggaaggccccactgccgggcccactagggtgggaccaggccaggggagaggaggttcgaggcctgtgccgtgcatgcaggattatcagggttgaggggtggcatgagaccctcttcctgccactgggctggggctggagtcctggcccagaaggccaaagggccttggccaaattccctccatccatgtctgtgcctcagtttcctcctctgcagaatagagatctctaaggcggctcccatcttgacccgtgtagggacctgggaggacaagggacaaagaggcacagccggttaccaggctatcactgtggggaagcagatggggatgtcagggtaggaggcatctgacaagattccctttggacaagatttctgcctgagccaggacctgcctccaggacctcagacagcaccacctggactcaggagtgtctcgggggcctccacaagagacacccacccacacctgcctggggagcaccctgctgtgccacactggtccccttaaaactagaaattccacgacccacaagaaatcagccacagggaggcccagcgccatgaccgacggggaacaggaccccaaggggaccaccagggccagcacacgtggacaccacacggccccttcctgaggacagggcggaggccaaacctagctccccgtcagtccttactcaggccctgccttgtgaggacctcagaacatcatcccccaactcacagatgagaaaatgggccacagagagggtgagcgtcatggcagacaggatttccacccttgttcccgcgagtgatttttcgagggccctggtggcctgcagccctcacggggctccctctccttcccatgccgtcccaccctgtccagctggctctcctgggctttccaggcccctctctcctcccatcctccgctctcctcctccctcccgctactctcttctgtgccagctccaagcaccgcacccaagccttggggacacagtgtggcctccagcattcctgccctgttttcatttaggggacacccccaaaatactccgcctgcgggaggcggcagccgccccaggccacctgggaatgcgcttgcaagccttggctgggccgcgctggcaggggcagggaatgcagaggcggcagagtaggaggggccaggaccccccagcacggcttttcgggttaacgcgaaagaggaggccgtgcagctctgggcccggaggggacctcaggaatgtggtggttcagagctgacatccacatttccctgtctgcctggatccagttcggggacagtggggcagggccaggagcagggccagcaacacagccaggcagccgtcctggggctggctgggagttcaaagccctgccacagagccccagccctgccacccatcgcgggggcttatggagctcctcagatgggctgggccttcctggaagatgacccctgggactgggagaggctcctcccctgtccccataggctgtcccctctctcctcatcctcagtctctgagcagaaggcacctccctcaggaagaccccccaggacagcgaggggagggcgactgctcctccagcttccctggccctgcgtgtcttctctggagcaagctcagttctgagcgttcctgggcccacgggccccttgcggcagagacacggcttttgcgccttcacctggttttggaatcacaagccaagctcaggcaacacctggggagatgaacctggaggccccagtgggcaggtggacctcgtggtgctgaccaaactctagccaagtttcgaggcccggttctcagatgctcccccagatggcccacagctagctaatatctagggctgagatggtccgagtggggcagggcacagacccctccacgggcaggatttcttcccaaagctgtgccatccctcaagtccctggggatgctagtgacagtgcagaccccaggcccggcagtggggctgcagtgacccacagttatcatggaaactccatacctgaggtaagagcttggaccttgtcctgggaggtcccgggctgcatcactctgggcctcagtttccccttctgtcatgcaggaagacatcgctgtcctgcctgtctgtggttaagaaagggtccccatttgagatgcctccaggatctcagacagcaccaccctgacacaagagtgcctagggggcctcggcgagaggtactcaccgcacacctgcctggcaggctccctgctgcagctaaggatgcagcagaggctaaacaagggggtcctgctacctcgcccctgcaggcaggaccacgggagccctggcggagcacctgaactgggcctcctggcttcaggaagcagagtggcagcagaaggcctggaggagaaccccattggccctgtcgtctgcccacagatgctgtacttgcctcctgacctcaaatattggctagggcaggcagaggggtcagcattgctggccaggcagcaggcgccagtcagtctgctgctgagtgacacagacaatgtcctggctggggccagccccatcccccacctgtgctccccttgccagacaaaaggcacctctgcagcaagccagagcctatggccaatgcctgctcttctagctcacgcccccaagagagggtcccacctcatccgcagtgttgcctgcgcctaggcaggcacctggggctaggggtggagcttcccctggttcttctggtgtctgggacaaatatttgttgaatgaatgttaagtccagtgaggtcagtggcatcatcaaccctgactccaagaactcctgagcccccagcacatttattctcccctccagctgacctcgactgagaggggatgagaagaccttggaaccttaagggtctgggtccaactcctggctccatcatgttcctgggggaaaaccctttgcctctcctactctctggatcctcatctgtggcctgggcactacatcacccaattgctaggaggtcaagtaagatttagcctgcaaagcacctgacctggaggatctggccatgaactccaccccgccccccacttcccatacgcagtgacatgctgagctcaggacaaggtgtggggtgagtggtggtggcggggggttgggtggttcagagattttagcacagcccacttgtgtcaaactactggtcagcagtagcagataagaccaggacacaaaccattgtaaatcacatgcactagaagattctctgccttcagagaaaacaaaggagccagtgaagactctggtgctgtggacggcttcagggaggaggtgacctgcagacggtcctgagcccagggtttgacccagcaggaggaggacaatgcaaagcacagactgaagacgaggccccaggagtgcagggaacctgcccacggccacccatcgctgattgctgcccaacagcagggctcagcagctgcgtgggccagcgcgacacagggccggcccacttggcagagtcagaggggtgtcctcttctccttccagaaactgctgggccttttctagtgcctgaaacattcccgtttcacactagaggtccttaaaagctgtgcctttgtgaggtgtcctttgtgaaaacacctctgtaagtgtccttgggaggcaggggagtcacctgaagttgtgacatctcagggctcccttgggacatcattcaacaaggatgtgcagaaggcaacacccttctggaggtggacaagaagcaggtgcatggggctctgggcccacagcaggggtgcaggcccagtggccattagaagaccctcctgccaggttctgtgtgtactcatgccgggactgtccctcccttctcccacagagcctctgtgtcctctcaccgggcagcgctgactctccttctcccatgacctcctgtctggaggccatgccctggcctgtctgtttcttggctgagtgttctgaggtcgctctctatctcgaagctgcagaacgcaggttctaaggagtgagggggcaccccaagagcaccctcccttccctggagctgacacagggctcacagcaggtacctagggccctagttcccctttacttcgcagctgggaacctgaggcctggagagcgggagctgcccgtgtgaggtcgtggagtgagtcgggcatcacccagagccccagcccgcctgcccctgcggggcccttggctcggctgccttagacaaaggctcttctttgaagcgcctgagacagagcccctggtttccggccccagcccaccgggaggcacccgcctcggcagctgtcttcatttgctgcccgccagccgggccggcccgggccttggtttattgtcagcttccttgccagaaatatgctccaacaaatgctgtaaacaaaagggacaattgcagaccatcacgcctgcatttctctctcatatgcataaaatggggtgcggctggggctgcctggccagcagcctctgctaagcaaaagccccctctggacgtgggcctgaccacagcagcctcttcccctcctctgagcccacagccctctgagcccgggtcacagacaagtcccgacgctgttctaccttcagcctacccatggagatggtttcttcatttatttagcaaacactgacctagtgcttgctaggggtcagcactgttccaatatcccatgaatgtccctcattttatcctcataaaaacctatgaggtagggcatatcatgatcctactttatagagaaggaacctgaagtccagagaggttaaataagaggcccaaagacacacagctgataagtggaggaagtggaattccaccccaggctccacctgtaggctccagagtgtaagtcctgaccagagagaagtttgggaagaggggtccatggggcagaggactcggagtcctgatgaaagaaagaaggggactccagaccgtggaaaagcagatggctgccctcccttgcacagacctgctctgggtagcattgctgggactctgggaagtcatgagtacccacactctctccttccacggacctcagaagtatctgtgatagcttaactgttatgggctgaatcacatccccccacaattcgtatgttgaagtcttaactcccaggaccccggaatgtaacattatttggatacaggatctttacagatgtaatcaaattaaaaggaggtcaccagggtgggtcctcattcaatatgactggcatcctcataagattaggatacggacccacatagaggaacaaccctgtgaaaatgtgaggagaagatgctgtctacgagccaaggaaagagactgcagaagaaccagccctgccacaccttgatctcagacgtctagcctccaggacggtgaaagaagaaacatctgtttgtaagcagtccagtctgcagaactttctggtatgacaaactatataaatcaatcaatgtaactttcttctctctcttcctttcttccatccattcatccatccatctatccatccatccatccatttacccatccatccactcatccattcatccacctactcatccatccacctactcatccatccacctactcatccatccactcatcatccatccattcatccatccgtccatccactcatccattcatgcactcatccatctatccatgcatgcatccatccatccattcatccatccactcgtccatccatccactcatccatccatccattcatccatccatctacttgatattgtttggttgtgtccccactcacatctcaccttaaattgtaataatccccatgtgtccagggcagggccagatggagataattgaatcatgggggcggtttaccccatactgttctcatggtagtgaatgagtctcatgagatctgatggttttataaatgggagttcccctgcacatgctctcttgcctgcctccatgtaagatgtgcctttgcttctcttttgccttctgccatgattgtgaggcctccccagccatgtggaactgtgagtccattaaacctctttccttcataaattatgcagtctcaggtatgtctttgttagcagcatgagaatagactaatacaccactcactcatccatccatccatccatccatctgtccgtccatccactcatccatccatccacccattcaatcatccatccatccatctactcatctatccatccatccactcatccaaccatccactcatccatccatccacccattcaatcatccacccgtccatctactcatccatccatccatccatccattcacccacctccctccctatttaaagggcttacgatctcaaagctgttagagaccttacttgctggatggagcctggtctagcccttcctctgtagggatctcctgcaggtgtcctcagggcaggtgtcctctctgtgagccactctgtttgcagatgctcaggctgccctctgccccacagagctcttccctcttgccttggggtgttcgttgggcttggctcctccccatgggatggcacttgtcacagggaaggagctccagtgtctatggctgcccccagcctccgcattcccagagggctgcatgggcctctatgtgaggacctgattcagggaaggtcttttgccacagtgagctgcatcagcctggactgtcagagaagccctgttggagtgactgctgggttcgagggggtgagtgggaggtctggctccttttgcctgggagacctgaagttggctggactctggacctttcagggcccctgccacttgcccagagtgtatctgaggtcccagggtgtggcctgagagattctggtggggacccctgaactgagtgagggcagccatcacaagccccattctaatggtggcagagtatggactctgatgtgtggaccgctagatcggctgagtggcacagcctcctggtgcctcctcatgtgtcaagtggggatctagtaacactggctgccccagtggctgctctgacggaaggagggaagctggtcctgggcttgtagctgtgcttggtgtaaacatgctgtctgcagcattgccagcacagccccacctcagccccatgcccagcacactgtaggtgcctggcacctgttacacagttgctagcgggctgtgcactcaggcctggctctgtccctgggctaggtggtgctggggtgatccaagggttccttgggaatcctgaggattccagggaaccttgggaatcgaagaggcctgtgctacctcacactgtcctcctcacacggcgttgtctgcaggcccttggcaactcctgacctctccgaaactcttccacatgatgaggtcagcagggaccctgccggcattccatccaagctactgatcccgcccagtgccggctcagtgccagagtcctcactgtggtgacctgaacactttgtttcacgattcatagcagggaagaggagttgagtccggatgatgatgtctgcagacatttcctaactgtttcacagagaagagggttgaggagtgcagactctgcctcagctccatcctgagggtgggactatcaggtgaagggaagctctcagaggacttctcaatttcccaagactcagagaagaggatacaaagggtctgagagccctccagccctgtctgagcaattttttttccagcatgccaaggggacgacaacattgactctggtcagggttctgggtgcccgtgacgtctgcagccgcacacccaggggcccccagctcctctccacgccagcacagactcctgggaactctccctgggaagctgacggggtcctgggatgtgctcagggtcaggcctgcagaagggccctagccagtgttgggaaccggctgctggctccggcctgggctcactgtgtggcccaggctcgccatgtcaccctgccttcccctgggagagaggaggccaaggcagccagggaacgcctctttgtcttggtgcccagggctgtcagataaagccgttgagccagccgcaactggggcatccagactgcttttccagccacgccaggcctcgccccactgtcccgtttgcccaaagggggctgatgagtttagtaatgtttactgagcacccgcccgccttgtggagctgacagccagggagacgagtcggctgcagactttgccctcacaggcaagacagccacaccttgaactctgactcaaggaagagagtgggcagctcaccagagaggccagaggaggcggcaggaaggtggggtctctccagccaggggcttcctgaaagagctgccttctgagcaggccccccaggctaggaagatgtgcacctgccgagctgggcaggagagggtggcccagtggaggacccagcatgggcagaggtttggaggtggcaggtcctgagggaagcggaaggtgagtgtgcgttctggggaagataaggctgcgtgcagaggccgagagtgcaagccaagaggctggaggctgtgaccctcaggctccaggcagccaggcaaggaggagaggagaagatgccacactagagaagctggcccactccacccctttgtcttctcctcacctgcagcacccttctctcatcccaaatgtgcacaacagggcgtttttctgctcatgagaataatacctgttgattgcaaaagcaatcagaaaacagagaagagttagggcaccgcaggcaacctcagcagagaccatcagagctcacatgctgacactgagatgtggttccttctggtcttttttatgttcttccacatatataccacccacttgttttttcttttctctctctctcctctctctctctctctttttttttttttttttttttttgagacagagtctcactttgtcacccaggctggagggcagtggcgcgatcttggctcactgcaacctccgcctcctgggttcaagggattctcctgcctcagcctcccgagtagctgggattgcaggtgcccgccattatgcccgtcaattttttgtatttttagtagagacagggtttcatcacattggccaggctagtctcgaactcctgacctcaagttatacaccggcttcagcctcccaaagtgctgggattacaggcgtgagccaccgcacctggcccacacttgttttttctaagtcacatcagagtgttgttttgtaactttatattttcatgtaaaaacttattatgatatcttgccatctgattgctggtttctttttttgagacagagtctcgctctgtcacccaggctagagtgcagtggcacaatctcggctcgctgcagcctccaactcctgggttcaagtgattctcctgcctcgactcctgggtttaagccattctcctgcctcaacctgctgagtagctggaattacaggtgctcaccaccacaccaggctaatttttgtgttttttggtagaaacatgttgaccaggttggtcttaaactcctgaccccagggtgatcctccccacctcagcctcccaaagtgctgggattacaggcatgagccacctcgcccagcctaattgctattttttaggaacatattcctttgtgaaatattaaaacacatccatctggggagagaagacgccagcccagccctgagcagaggtgtgagtgaggaaagacaggagcaggcggtcagggtgcaggaggcaggtccccagggacttgcagaggcttgggctcagcacaggggtggaggcgggggtgcaagtcctccccaggggtggggactccgatccctctcggtacctgtgcagggagtcagcaggacggaggaccaagcagcaactttccagcctccactccgttgttgggctgttccctactcctgtcttactgccccacacggcttaccctcgtcctctgggagcctccatttttctgatcattctatccactaaggggtcccccagcaatatcctgcctcacccccggtctgttttctatggagcagcggcatgacctgcagccattttgttattcatttgttagcagcccctctcggacccacggagaaagaacttgcacccattttgtccagggcagtgcctggcacgaagcagacaggtgcttgtcagacaggtattgaatgaactgttcctcgccccatccccaccacaggggccacgggctcagaagggccctgcacatggttggatgctctgatcgtcctggaaggagggtcttgcattttcatcttgcattttcgtcttgcacagggctccacgaatctcgtagctgccctgctgttcccacatcctgccccttaaaaagtcctgggcaggaaccctcctatcccaggctgtggcagcttggggctcattcttttcctgagcccagtttcgccctgcagggtgcagggtgctggctatgagtccttctgccccaccgcacctcagccaggtgaggacagggtgagggtcttcatcccttcaaccttgacctctgctcctccccacaggcagccaggttgtgacagcctgtgaggacctcttggctcccggagccttctctctcctggaatagagatgacaccgtgctgccattgaactcaacccgaaaaaatgatctgttgcaaagctcacaggaaataatggagcaatgttacacgataaactgtaaagtgtggtgagcatgtgaacaagcgtccaggacccagcgaagccccaggctactgggctaggcgtcagatgagaagaggcagagggcaacctcctgtaggatctgaggccttcatgtgctcagcccatggctgtcgtcacggtgacgtgtgcatgcgatgtatctgggccatccttgttcttgaacgcgggcagtgagtcccacggtgatgtggcatgtcacgagctgaaggaggggcacctgcattcaggcttgcgaaccagcgagacagcctttggacctttcggagcctcactttcccacactaagaattggagtggaattcccaaggtgctggaggttgaaaggcattgagaatctaaaacgctttgcagacagcaagaccctctgtgtaagttaagaatgctcactcagtcccagcaggtactcagagggatccttttatttctccagaacattctgcaggtgagctggggaagcccactggccctggcctcacccccgagcccgagccttcagcctgggaatggtctggcctcttccttgctggctctccagcctggcctcgcaggaccctgggcgggaccccaggaaccctcacccgctatgtgcttccccaagaagcgctccctgtggcctaatttgagaaaacaatgggcctcaatccatattaatgaccctagagggaccctttgtcctcggtgcacaggctgtaatcagcggggctccgggggctctggcctaatttggagggacaggttttatcatcacccttgattcgggtgacccaatctgacaggcccacgaccccctgtatgcggggtccacgtcagagatgggcttcctcccagcggcccaccccagcgggctggggagagggaagggggaggtggtggccatgggggaagttcggggtgaagaaggggtcacagccagacccccacttggatgggcctgtgatcgggttctcgggaggagcaggatattgattagatcagtgaatggtgtggaggcagctctccccaggcacgtgctcccgaccacccaccagcaagcgtctgttgcctgccggtgccagggctgggtggggactctgggacaggccggctgcctaggaggggccaggcaggagccaaggggctggctccagggactgccaggagggccccagggaaggggagccgggaagcgttttggctgcctccggcgtgaagtcgtggaaacgtgtttgcaggttagggccgtggcatcctcgttgcaccatttgagcgcctatggggtgccagatacatgacaaagggccacctcatttaatgcttccctcaaccttcccaggccccgatccccatgttctgggtcaggaggcccattcgaggtcaaggggtgggcgaaggctgacgagacaaacccagggactagctcctgagtcccaaaacctgtcctcacccacccaggggtcccctgcacgctctccagggtgtgcggtgcgtggctgctgggtttgggtgcattagagcctgaggcaagggcttgagtctgaattctcgctacggaccaaatgtgtgcgtcctccctaaatacatatgttgaagccttaactcccaatgtgatggcattaggagaggggacctgtggaatgtagttgagtcctgagggtgcggccccgtgatgaaattagtggcctgataagaagaggcccagagaaccggctctgtctctgctctctgtcgcacgaggaccccacaagaagacggccacctgcaaacagccattgaatctgccagtgacttggtcgtggagttccagcctccagaactgtgagaaataaatgtttgcgatttaaaccgcacagtctgtggtgttgtgttggcagtctgaactgacggagacagcatctgatttgggaagcgaccccgggaagcaatgggaggggatgaggctggttccagggggctcggctgggctcaggctctgggtctgcacaaggcctctctgcttcctggggtcggcagctgctgggcacctgctctcagcattggctctgtgcagggacaattcaaacctctgttcccaccactgctgcccatggcccgttggctggagcccagcctctgtggggcaggaggtgcgcatgtccaggtgaggaacagcaaagtcacgcagcagagggcatggatctgggagtggggaaggcctgggaaccgtggcaccatcaatcacgccatcctccaggtttcctcacttgcttttgggacaaccctgaactcctcaaggaggcaaggaaggcctccttgacctacccctccctggccacctctggctgtgccaacccgacacgcaggttcaggcttctgtctcctccagaactgctactctgctgtgcccatcctgccaagtcctgtgtgtgatttttgcccgggttccctcatctgtgaagccttcccggaccccactgttggggcagaacacccctcgtgtgccccgaacaccccttgggccttccgcagagctcctgcgtagctttccctccacccccacctctgaggcttctttgtgctcacctcacctgccgggtcatgagctttggggctcagcaaattctgctgggccctggaggcagcaaagtaagcaaattaaataataataaatcataaacaagatcacttaaataagggaatttaccctaacatccccaagacccagcaaagcctctggcccacggttggagccccctaccctccaaaaatcgcggcataaacacagatgaaggagatgggtagacaattcctattctggagtttttggatccagaggagaggcaatctttacaaatatggtcaacctgtgtcagccaaacagcctcgagccctggcctacttcccagccctgtgctcatctggagggggagaccagagtgggtgaaacatggttcccaccctagagacattgttggagatgagactgtgttactgccagacaagggtgttattgatttgatttagttcatttccactgaactcagttaattcaattcagtgcaacccagtctcatccagtccaactgagcaaaggttttccaagtacctctgagggtggcacgctagcctgggtcctgtctgcactgtgagatgtagaggaagtgcctccttgtctgccttcctggcccttccaatccagtggggccagagtccacaggacacaggaaattgtcagaggtgggccagtgaggtagccagggacgtgggctcaggtctggacaccatgttttcctgggaaagtttttgcattcccatgggcttacctgactagagcagggaagaggccatgtggtccttgtctgtctcctagcctgtctctgccattcgactggaagctatgggaaggctggctccctgccctgctttctgggtctcctctgcacaaatctcagggaatgagtgaatgatgctgtgaagtggggctttccactcccttttgcagagctctttctgctacactttgctgtctccacactacaggctggcatggtcagaacaggcttcagggcagggggtacttgagctgagcttctagggtagggaaagaattgatactgaagaaaagagagaaagacagcaactgtgtgaacagtggcttttttagccgcctggcactgtagatgcaattaatttctgcattacaaactatcccaaaacacagggcttaaaacaatgtctgaatctttagcttggcagataaggctgggctcagcttggtggttttctgctttgggctgggctcactggtgtgtccagcatcagcagcaagtcaggtaggcagcatcactgatattgcctgggttctctcttatctctgggctttggctggaacatctggaccagcttggcttggccccacaaatttgtcattctcttgcaggctgccagggctgtgtggaggtgtgagaccacagggcagcacgcaaggtccctggaggcctgggctagaatcagcactctgccacttccaccatattctgttggtcaaagtgagtcatacagcaagtccaggttcagggtggggagacataaccccattctccacgggagacactgtagagtctctttgcaaacggcatggctgggtagggtgtttgttctcagtccgctccctcaattcttccatgagaaggtaccagcttggggcgagctcctacctgccacagtgtctctgccctctcaccttgcatctccagctggcacacagcctcagagcccatcttgccagtttgtctatactcaggcttatgggggcaggcatgaaggcctgtgagaatattgggtcctggtgcccaggcagaggctccacactggccaagaggccctgaggtggcgtcttgatttccccaggaaaaggatgccggagcagcacaggcccttggagacaggctcttcttgggtccctccagggcccagctatctggaagactggccttgttcttcctctgggcacagtgagtgacagccgcagaggtctggggaccacatgcaactctgtggtccaggcttgctcctggtcagctctgctctggtccagctgctgaagaccagctggaggggagactggggcctgcctttcacagcctgctgctccttggaggggaggctcataagggcaggcaggcggccacgtgggggctggagatggactctgggcctcagtttccccatctaatcaataaagcagttggacgaggtgaccttcaaggtccttaccactgcaaaccctcaatcgccggcgagcgattgcagagcaggggtccacagcagtcatggggtgaacactgcattgtgtgtggagctggggtgtggagctgggctgtagggggctttgagtttgtctggttgaacccccgattttccagagttgtcaagtatgtgtaggctcagcctcacccggtcagcaagagggaggccagactcagtcacaggctgacaactcccccaccctggagtcaacgcccttgcatgggccgagtcccagcacgcggagggaatggagagttatgaagagcagggccagacggctggcgatggtgcggtcacacaaggccagcctcagtaggtgtcagcgtttggttcaatgctatgctgtccccgctgaacagcctgcagcagttttgggaaacacaggagtctgcattctcacttggcacagggtcctgcagcagatgcagcaggtcctgctggggatcacggcatcaggtgggacccaaggggcaggcagaaccaccttcacccctgccccccacctgcacctgcccattccccactcattaaagcacccatcagagtgagaatgaatgcatgtgagtgaatgaatgaatgacaccatgtaggtagccgggtttgattttgatagccatgcacatggaagccatgggaagggtgtgtttagggctttgtaattcagactgtggtgggagttgcagcctcttggtcacccgcagggcaggggctggggctggggctggggctgtgtggggcagggcagagcaaggcagtgtcgccccaggattgtggccaggctcattcccccatacctgcttcctcccagctcttgagtccctcattttcccctccagctcctgaaggccggctccctgttgcccctgtaaccctctgcttcccctctcctagtcccccctgcccccattctcaccctcccgggcctacgattgggggtgagagcagggaaggggccggccaccagccctgccggccgaactggccccggcccgtggaccaggtggcgcggtggctgcccggcggcgcgggcagctttcatcccgggccggggcctgagaaagcgtgggggctgctttatcccggccgagccagcggctcctgagaagcattgaaggcgcattactcagactgacacattccgtttccctcggcgaggacaatgagggagggccagtgcaggatatggcgctggccttgtgcgcggttgaaggttttttgagaaaaatgtgatagatcacaatagagcactttgttgtcgtcgagggcattgggatggggccgggacgccgcgggcttcatcattactatgatgagaggagatttagtgccctctttctttcctctgtcagggagaacaatgtgtgaggaaagcggaggtttcccattataaatcaccgtaagccccatggaaatccttccctaccctggggtttgagtggggcagacattgagcgcggggccccgcggcccttgctgcccgcagccggctccggggccgcctggacgacgggcggcgagggggccgggggtgcgcggcctccctgggcctgctcagcgcccaccacggccccctcccaggcccccacccgtgggaatcgaggctccgggaaggcccctgctctccaccccgaaaagcaggactagtcatggaaagcgaggacgctgggcctgaccacccgtcaatgaaagcacggggtgtgcagagctcgtcctaggacctgggggcctggggggtctgggggggctgggtctgagaaaatgccttgtgtccggcttagcgcgtcccaggcggccccagtcgtggggactgctgatctctgctcccagtcctcatgctttgcaaagagaaaaatgaggccacgatgagccccaattattccacctatagaagggagctccaccacgaggacccaggtctcctggacccaaatctctttcccacggggcaataagaccaacccttcctcaagggccatcagtcccagaaacagggtggccgacagcttcccttcgtgcagggggcttcattcagggagcttcttattcacctgcccggcagcctcactcaggagccgcttccattctgccacagagagaaaccaggagtggcaggacgggaactagaaatgtggactcctgacctccttccaactgacagcaggatctttgcagaagggccaaaggccacccttctgccaaaagactgggcctttttgtggattttagaaagggaattgggtgagaatatcatctattattgcaaccctcccagtgcggctgggctgtgtcccgtattcgaatccacgaaacagatggctgttcaccctaaagaacacaagtgaagatttgttctggtggaactttttctgttgccaaaaattccaggtcaggttttgatgccaagtaagttatgagaaaattctgggattcagaggtttttggatttcagaatttggataagtgaggtgggtttgtgttactgtccgtacggctatttttattatctgaaggcttggtccccaaagagacctagcctctgctaatgatggctcatgtggtctgactcgagccccagttattccaccaatagattggaggtgatcattgcatctgcttacagagctgttaaaaggatcaaatgaggcccagcacggtggctcacacccataatcccagcacttcgggaggctgaggcaggaggatcacttgagcccaggaatttgaaaccagcctggagaacacagtgaaacctcatctctacaaaaaaataaagaaatgagctgggcatggtggcacacacctggggtcccagtcacttggaaagctgaggctagaagattgcttgggcttgggaggttgaggttcagagagtcgtgattgtgccactgcactccaacctgggcgacagcacaagaccttgtctcagacaaaaccaaacagatcaaatacaatcactgctaggaatgtgggtagtgcccggcctggcccaccccgaaaatgcaatgcgtattgctgctatgattactaggattgcctcaggagggtcagagttcaccaaccaaacgaggggcttagctgtgcccacagcctctccccctgggtctgtggctgctttgaaggagccccaacttatgacccaggcttgcttcacccctttctaccctctgtgatccagtcaccccaaagccccctccagctcagcccttgtctgcgatttccacctccaggtgtccggtccttccttcatgtcttccccctggcttgaaattcttgtcctcaccgtcacgtgttctggaactgtctttcttccatcagggagcagctcaactgttcttcctctgggaggagggccctggtatccacagggagtttcagtttcctgggggcaggagtgcgtccagaggctcacagtgggtgtgtgtgcattggagagagtttcaaaggcggccccggagcccctgcccagacctgcaacgatagaatctctggaagtgggcccagaaacctgctctgtacacccatctccgaccatttaaaatacactgtggccttgaccccagaacgcctggctccggccgccccgtgtccgcttccaccacagcgaggcggcatcaatggcatcccgtttcaagtagaataaaatcaacctgcttttcatgtctgctcctgccaaggccttctccctccttcccttccccaccgggctccagccactccaccatgcttggtcccacctcaggcaggccctggccgcccagagtgtctcaggaggccacattcccctgcttgaggcctcagccccaataaaaccaccttgcactgaggttcctgtgggttttctgcagctggtctgcctggcttcaacttcccaggctaccccttatgagctgtgggaccctgggcaggtcaccttggctctctgtgacttagcttcctcctctgtggaatgggggaaataacagaactttctcctgcggtgaggatgaaaatggctttgacacattcaaggtactgagtttgtgcttaggaaacactaaccgctatgactccgtgaccaccctgtcaccttgtaccccatttttctatcctattacaggtttacgcacttcctgtctgtctcctctatgagaatggagtctgcggcagacactgtatctactcagttcaccgcctcattccaagcacctagcacagcgcctggcccacagtggatgcgcaagaaacccatggaatgaatgaataaatgaatgaacgagtggacaaaccacttccccaatacctagctcagtgcacggcctatgaccagtgcgggccaatgctcgctaaatatgacctattagtaaatcagtgaaactgctcttgctgtaaggaattctgtgccctttgtcctggctactcccggagccctgtcttgcagaggacacccaggtgggtcttttgcccaatttgtacttggctctgctggctttgacatgaagaccaccaccttccagaaacgcctcattttcttggcagcaccttccccccatccttcccacctctagctgcttcttcccagtgccctctctcctctcttctgtctgtgtttgggtcaatgttctagtaccagggcagaatgagaatctgggtggtgaggtcagggctgacggctttcttcaggtctagaagctgagaccagctcccctgaaatgtacacatcccagtgtctgtccgcctgggtcctggcaatgtgcccacctgggctccagggcccagcctctgagactcctcggggcctccctgaagggcggctctgaccctggcctctaactcaccttgctttgctgactctctagataaggcccctctgatcagaagctcattttcataaaccacagccacactccctaaccccaccgcaccgcctactcacgtaggtctcatgtcttcctagacaccttgacgcctgggctggataattcctgcaatggccactttccttattcatacattgcaagtttcttccgtggcataggtggtctttgcttcttggtctcctgttattgactattgtcctatcatccggtcctggaaaaccccagggggaagatgaggatatgctgtttgtcctgaccttccctcggcctttctctctgcgtgaggattarccacaggcatccgcaaggcaaagggtgcttctaaggtgcttgcatcctaatcctaatgagaaccactgtgcatgagtgaccttccagcagagccagcgagaggtgttctgccctgcccttccctaacctgtgcctgacatcactttccctggcactgagctggatgtccccactcctccccaggtccccagccctctctcttcccttctctccaccaaaaggctaaaaagataaactgcctaaaggcaaggttccattcacttttgctttagcttttgtcaactttggcaaacaattgcacagtgtctcctggttgttctgatgtcgtctttgttcccactgaatttggtttctcctccagggctcaggtaagattgcactcctcaccagctctgagagtgggtgtggtcacgggacttttttgaccaagggggtgcaagtgaaagcagtgtgtgtatcttctggatggaactttaagagccagtaaatgttcactccttccactgtccctggtcctcctgagatcttagagcccaggctgagattgagcctccgaaagcctctgctctagactgatgggaagaaaggcctgggactctcacttgccacggagcgtgagcaaaaaacagacattgtggtttaagtcactcagctttggggaggatgctttttactgtggcataacccagcctattcaccaggcctctgctggctgcctgcatttcttagtttttccattgtttttttttcttgtcctttgtccttttctgttgatttatagtatttttttccttatattaaaaatattaagtcttattaatggaattattttgtcaccagctgaaaatctccttaaacaggtgattggacctaggattggactactgccagaaagaatggcatagattcaattgttccaaaacgtgaattgtcatttttagtaaacctctttcaacatttagccaacacagcgctaacaagtctgattcgactcattgggttacctgcgggtacatgtttcagctactttatctccaaggttccttcaggaagcctctgtatccaaagcttggtgttctgcttctgttggcccctagagctccttaattaatgatttttttttttttaataatcaggtttggctgaaattattacagcagcctttctcaatgaataggctgtagaacacagtgccatgaaaccagctcctgaaaaacactagatctggaaaatagggtttcatggcccagagtttggggaaccgggcacgagagctgagtcagcatctttggctgtgaaaaatctctgcttaatgttggctgccacgggctccacagcctctttgccatggcatatcttctggcgtgccactgactcacaccatcatgaaatgagcgccatgcagaacacaatcttggggaaaagcttatctaaggaataaaattacaggtccagatcacttatataactggcgcttagaagaagagcccacccacattattttttgaggacccccatggctgatggtgaacccctgctctgaggtgggtggcttcccttcagccccacggcttgttggggggcaccctccacccagctgtcgccttggggtaaggctccccacggagccacccgaactcgctgctgctggaagcttgccaaactgcgagtcctgcgctttgccgggaggacaggtaatccacctccccgggagtcagtgttctctaacttggctgcacacgagaatcacctggagagcctgaaaaacttttcatgcccagaccgcaccccggacagattaggtcagaactgggggtggaacccagcgcccagtaactttgtaaactcccaggtgattgcagcttgcagccaagtctgagcaccaggctccaagtgggtgcttctgtaacttagttccaactggaaggagggcaggagcgggggacggggactttgcagaatcttgtgggattctgcaaagtccccatccccatgggagttgcaaggtttggattccactatgcctcaccctcgaagctgtgctcaagcctcttcaggcgcagccaccagacagctgcaggcccctctacctcagcttatcccttgcagggggcctgagccaacctcttgtccccagggatgctatgattaaaatgggccagaggcatccctgtgtgtgtgctgggacactgtccagttgctattcatgctgacactgtcaacatgatcctgataagaagttcctcttctttttcagaagtagctgtagcccagtgtctcccagcagcttgttagttttatcccatgctccttgtaaattcaaaggcagggtgtgttttccttttcacattggctgccggggaactcagagtcaattttactactacatcacacagtacacattgaggacttagggcatatattttgacttctgcttcatcttatgttttcctcacctactaaaaatcacattgtattgtgtgcatttttgtaattttgtaagcctcctagaatcttctttttgtgacaaagtaggtacgtaaagtcacaaatccacaaataaaagacaggcttcttttctctagttgctctttggttgcagagttgttagctcctctctctttgcatacggcgctgctccggccccacccatcacccactcagcagtggctccagcacagctccatctcccacagcccctggctgggcctcccggtggtctgtgggctcctggtcccatcacatggaggacttcaccctgccctctccccagtcctccctctttcggaaacctttcctggtgagacttgctgccaggtagagccacacctatgttgtttcatggcttagtggcagttggtccacaaaactctcccttccacccaatggcaaggttcaggttggtagcagcccactcttatttctctctgtaccccccgggtggggtcccaggcacagggcatgagccctgtggggcaccagggagttgtctgctgagcggcttcagagtctccaagaggctgtgtccctcaaaagtcggttctatgctgggtgggggactgtgggcagcctggcaaccccaggtgtggtgggattgatgatgytcccagatggcacaggttatgaactgtcctggctccacccgggccctgctgcttaggagctgtgtgactccgggtgacttccttgccctctccgtgccttccttttctcataaacaaaatgggtaaagagagtaggctttttatggggagagaacaagaaagggcagataaagcccagggaaccagcgcagcctctgctacccttaggattctgcaggggcagaagactctctgctccttagaggctgggcaggcagaggcccctggggttgtctgtactccaggagtgggaatagccacaggctgagacaaattgcagaatggtctcgggaaccaggcgcctgctgtgtgccggggccagccacagatccctgcggggcctctgtttccccacctgccctgctggggggagtgggactggccctgcaggagggtgaggctgaggccagaagggaagaagtgaagccttgaagctgtgccggcccccagcagctggcctgtgtgtgatgatttggggcggggggatggctctgggggtttctggcttcagccctctaggcttcccctcctggtgcccagcctgacctctgttgtggaggaccaggctcctagtctggaaccccagaagccagcgtggacccgggtccgccactgaactggaggcaggctggcctggccctgagctgttagctgtcggggcagctggctccagaggttgttgccatggaaacccagactgatgttctcctaaacagctcaattatttgtggtttttctgttgaagatcccagctaagcaggccaggacggtggctggggtgggatgggggctgcagggctgctcaaggagggagtcccctgagaaggccctcagccctgccttagccaatccttagggaaatggtccaaagtcactgagattttgggagagggaggaagggtgtgtttggaaaaaatgtgctgaggtcatcaggcttgtttccagaaaagcttctgtgggagggtgtgggtccagcatgctccttagaaggaactggggaggtttcccaccagccacggtgcctgtgcccagccccaccggctggcattcggtgcgggtgaactcagagaggtgccccatggggcactcagcccatgtgcaggacacggggccatggcttcccccactcgtccatcccagctttgcctctgggtgctcatgtgatctacagctcccctcgcctctcagaacctcaatttcctcatctgtaaatgggaacagctttccttgcccggctttcgggtgggggagaaggtctgagctaaggggttctgcaagctattcagcagccccttctgagggactgggatgtcccatggggaagcaggtatttggggataagaggaattgtgcagtgtcctcagatccaagacacacagctgttttggttttcagaaaagaaactggaaccagacatatcgagacctgggtaccttgctgctggaccatacagcagaggctgcggaaagcatgctgtcaggaatgagcacagcagtgaatcgcacgggctggggccccacactgctggcttggaagattctttggctcttgagcaactggtgtggccatggatgtctggggccgggtccaggccagacactacgggtcccacgttcgtcctgtccacatgaacccagggaaggttgatgggtgactggcacgtgcagtgatgggctcacaaatggcaacgtctcttggaaaatcttctagcaggaaggaggggaggaaagaaagtttaaatggcacaaaagcaattctgcacattctaggcaaggagagcaaataacacccacaaggcgccactcccctctcatgcgccggcagacacagctaattgatgacagagttctttcctccagcgtctagactctccctcccaaatcatcctcagcccagcaaccctggccaacacccggcaaccaggtttgcacatgagacagacccttctctgctatccctgggccaggtgctgcccctcagcatcagtgtctgcagatggtccccagcctccagtgggtgtagagctggtgccgttcccatcgacagcagccatgctgtcactgtgcgggttatccatgctctggcctcccctgggctgagcgtccctctgccctcccagccagctggactcaccagtgagtctgcatagagctgcttttctcaagctctgtgcccgggaatcctgcagattcatactctgcagacttggagctagcctcagatcctacctctcaaaccagctccccaggcaatgccactgttgctggttggagaaccacactgggaacagcaagggttcagacaacactgaaataatgaaacaggggtgaagagaatggaagaagaaaaatgccagacaccatagaatggagccaaggcttgcattttgattggatgagatgtttttccatccatgctgaagaaccaggatctagagaaagctgcagggccatgctccttccccttttcagaaatgcgctgggcttttctccttctctgtacttccagactccagttgctacaagggagaagaacagtgggtgaggtttgttcccctgaaaacagtcactccctttggatggcctggggagggctgggccggctcagggcgaggtttccatctcccactccgggctggaatcagccttctcctgtggctatccaggcttcttaccctgaggacccattcccttttccagtgggggaatcgtgacctggggggtgtgtgcacctctgggactctggcaatctgctgcaaatacattgttccatttactctggttgcataacaaaacaccccaaacttagtggcataaaccaccctttgttatgctcacagattctgtggctcaagaaatgggagcacaccaggggaggctccctcacatgcctggcagttgatgctggctcttggctgagacctcagctggagctgttggctagaaaacctacatgtggccttttcatgtgggttgggcttcctcacaacatggtggctagatttgaagggtgagaattaagagatgggcgtggggcgtgagagtgggagagggagacagattgagatggaagctgcatcatttttgatgacttgaaagtcatagctccacttctgccacagcctattcaagacagtcacaaaatcctgcccaggttcatggagagaggaaatagaccctgcctgttgatggggagtggcagggttctggaagagcacatgggcctggatatattgttctggccatttttggaaaatacaatacaggcttccctctggactccatcatttacattcttactgcatgcaaaatagacttttccttttatctacattgcacttccccaatctctcatcccatcacagcatcaggctcaaagtccaggaaagcatcctctccatcagctccaggtgaatgatggtcttaagttgtggtttcttgcccatctcacccaaatacagtggtgagccaggtagaggagagccaccatagacactccaattcagaatgtgtaaatataatgagcacacagatgtaattggtccatagcaattctgaaatccagctgggcatgtgttgccagttccctgtttggggctcagtcctactacctgagagtgagtcactgtggcttttggctctgtcttccaggctcttgctccaccctctgaatcagcctcccttttccctaaaacatagcctgtgtttgcaattgagtcatttctcagcctgcttcctgacgtagaagttttggggatccaaagatctctttgtattttgtgctgtctgtgtctcttttagtccaagctgatacacttctttaaaaacacaactttgtggtttttaaggcatcaatttataatccattctgctagacaagagcttgagccacacatctcttcaagataaattcttctctactttgggcttcctgtgagaatgctgtgggaaattgctcttaagatttatgaagaggcttttatttcatggagaggacctgtgaggcatgcacttcaggtccttagagggacttctgttggctagacagtacactgtggcaccaatttaggtctttctgagagcttaacaaaggctcttataatttcagtgtgaatatctttgctgtgaagccttttcttaatctgaattttgaagaagttaggaataagaaacagtttgattttcaaacccagcaagtcttggcttcttgacattgagtgttccttctttggcttgtctctgtcccttactttcatcacaagcagcaagatgtcagccagcactgccaaccctttgcctagggtgttggcttctggtacaatagatggactcctctatagaccagctctcccactgataacaagtgtgaactttggacaaaacttaaaaactacccaaggattctgaaaagtaaacaaaagcaggaaagttgttgaagggagtcagaacttggtgtgctgatggtctggaagtgagttcttcattgcttacgactttgcctctggagtgggatgcagtctcagagcaatgtggcaagggacaaggggcaaagatgctaagagaaaccccaccatctttctggctggaggaaccagggaaattagcccaggcagccacagctgtcactggagagtgaaggggagggctcagaagggagacagatgaggggtctcctaattctgcatacgcccaccacacacgtctcaggctggcccagaaccatgcatgtataggacagtctcaacagcactgctgaaaaggcttaaataattgaactaaaaattcaacaccatacacagatggtaaggcagagcttacagtgtaagtctaaccaggtgaaccgctgctgaaacaaaatggtcaaacactctccagtgaaagagtgcttccactaaaaagtgccaaagcccactggcaacacaatatatatttacaacgtctagggtgtagctcagaattacttgacatacaaagagccaataaaatgtgacccattaacaataaatgccaacctctaatgacccatatgttggaattatcagacaaggagtttacaagaactactataattttgctcaatgaggtgaagaaaaatacactgacaatgaatgaaaaaaattatgtctcagcagaaaaataagaaatataaaaataacccaaaagaaataattttaactgcaatatgaaatactaaaaaaaagaaattcaaatattcaaaagaagacaggaagggggaaatggaagaataacaactacaggggacaaattgaagaaaaattataacatggtagacctaaacccaaccatatcaataattacactaaatactaacaacatgaatattttaattgaaaggaagtggttatctgattaaaagactcaaccagatgccaaaagagatgcactttaaatataaaaatacaggttgaaagtaactggatggaaaaagttataccatgtggctgggcacagtggctcatgcctgtaatctcagcactttgggaggccaaggcaggtggatcatttgagggcaggagtttgagaccagccttgacaacatggagaaaccccgtttctactaaaaatataaaaattagccaggcatagtggcacacatctgtaatcccagctacttgggaggctgaggcgggagaatcacctgaacccaggaggcagaggttgcactgagccaagattgtgccactgcactccagcctgggtgacagagcaagactctgtctcaaaaaaaaaaaaaaaaaaaaagttatgccatgcaagtaataagcataataaagtcaaactggctgtattaataatagagaaaataaactttgagataaagtgtaatctttgagataaaaaatcacattttataataatgaaaaagacaattcatcaggaagtcacagcaattttagtagaacctcacaaatgcatgagcaaagatgaaaagtattaaacggagaaacaaataactttacaatcacagtggagtattcaactctccctctctcatcaattgatagaacaactagattaaaaagtctgtaaatacataaaggatttgaaaaataataataaccatctcagcatatgacttgatatttatagaaactgcttttggatattatgaaataaagattcttttgaagtacacatggttcacccatcaagttaggtcggatgctggtttataaagcaaatatcaataaatttaaaagtattgaaatcctgaatgataacaagaacataccaaagtatataggatgtagctaaagtattgcttaaagagaaacatacctttaaatacttatatttgaaaataagaaagatctaaaatcaatgacccaagatcccaccatccaaagctaaaaaaggaagagcaaaataagcccaaggtaagcaaaggaaaggaaataataaaggtaagagaagacatcaatgaaattcaaagcagagagacaatggagaaaattgacaaagctaaaagctggttctttgaaaagatcaacaaaattgatcaagagaaaaagagaagaaaaaagagagagaacacaaatcacaaatggcaagaatgaaaagaggggccattattacagatcctacagatattaaaaaggaaaaggcaatataatgatattatgaatgacattatgtcaaaaaatgtgtgacaatgatagaataaaaaaattcctcaaaaaatttaacttaccaaaacagacacaagaaaaaacagaaaatccgaagagctctatatctatttttaaaaattgaatccattatcaaaaaccttctacattagtttgtaacaaattaccaccaacatggtggcttaaaacaacacacatttattctcttacacttctgggcatcagaagtttaaaatcaaggagttggcagggctacacattccttctgaagacttcagggaaaaatatctttttcagcttttagaggccacctacattccttagcctggggccccttcctcccaccactctgactacctgcttctgtcctcatatctcctactactaactgtattcccgctgccttcctcttatgaaggccctttcgattacattatgcatacttggttaatccaggataatcttcccatctcaagattcttggcttaatcacatctgcaaagtcctttttgccataggaggtcacatatacacagacatgggtacattggaggatcattaatctgcttaccacagtggcataaattaatcattttttttctaatgttcattgattctgtgggttaggaattctgacagggcacagtgggggctgctcagccttagaccatgatatctgggaccttggctgggggctgacatcagctgatttcagctgagcgagtgcactcacttatgcgtctggcagttgatgtgggcttttggctgagattcagctggggccattggctggaacgcctgcacacagcctccccatgtggcctgggcttccttacaatatggcagctgggtgccacaggtgaagcttctgacagataaaaccaggaggaagctgcatcactgtttgcgacctagccttggaagttaggcagcatctcatctgcacattgaatttgtcaagctgtcacaaaatcccacccagtgtcaagggaggggaaaatagactctacctcttaatgaggagtggaagagcacgtgggaacagaaatatagctgtgttcatgtttggaaaatccaatttgccagagctgtttaacgattgagattgggtatttgagtatttcctgtgttccagggattgtattaagtgggaaaccaccccatgagatagggccatcctgtaatgaccagcatcaggcatctacccagcatctgcttccctcctctactctactgtcctgatttggggtcatgccattgatatgagatgctgtggcacgcagctatattcttagttgatggctggacctgagtgtgatcctgtcccttagccagcacctggtgtaggaatgcaggcctaagtcagttcaatgactgaccatggattggtgcaggccagtgggatgcaagagacaggatcctagaggatcttccctctggacattgccctgcgcaggtgtgagcatggtgagctgcagccacagtgcagcagggcagaggcaggacgcttctgctgcagacgtagtactctgaaccacactgaccctgatgcctgtctggccccagagtgccacttacagcagtcagcacgtttcctgattgttcaggctagtttgaaacaggcttggtgttacttggagctgcagggatagttattgatatagtctttcctcactttgcagctgaagagatcagactcaaagaggtaagcacactgctctcaagcttctgagtgcataagaatccccttcagatcttgctgaaatgtggattctgactcagcaggtctggggtagggcctgggggcctgcgtgtctagcaagctcctggtgatgtggatgctgctagcccgggggcctcgccttgatcagtaagagggtcaggatgtgcccaagaccaccccaccccaagtcacagaattaggctgtaatcaaaggcctgcctgactcccaagccacagccttggaatggcccagagctgacacgtcctactctatccacgttagagaggatgatccaaggaccaagccacactctgctgggtctactgggaatgggacccaggatacctgcttcctataccggaggagccctggcgacaacttaaacccacacgagactacttgcctctcaaattcctcacacattgattcctcgtgcactgggtccaagcttgctgggaagtcaggctgtgtctccttctgccagattgtcaagtaagaaaagcatttcccagaattcctttctcatataaatcactgcggggaggccaggcgctgtggctcaggcctgtaatcccagcactttgggaggccgaggtgggtggatcacttgaggtcaggagttcaagaccagcctggccaacacgatgcaaccctgtctctactaaaaatacaaaaattagccgggcgtggtggggcatgcttgtaatcccagctacttgggaggctggggtgagaactgcttgaacctgggaggtggagattgcagtgagccaagatcacgccactgcactccagcctgggtgacagagcaagactctgtctcaaaaaaaaaaaaaatcactgtgggaagggtgctctgtaaaaatgcacacgtgatggggtgagagaacctctatctatcacaagcatcttgggagactcttatgatcagacaagtttggggaactccaagctttggggatgtagagacatcacttattctggcctaggatggttctgtgtcatagtctggatggtgggtggtactattgttcccatattacagaataggaaactgagtcacagagtgcttcccccccccacccccatacatgctggcttccaaggctggtaagggggctggaactggaacgcaggtcttgggactgacctggcttcattgcaagtctgccagagaaacgcaaaaggacaagcagcattcccaagcatctggcatggtcatcggtgcaaacaccccgttcatgtaacacgggcctgaggtcagcagtagaggaccagtattggttttggccccagcctctgcgtggatggattgaacgcctgcatccctgcttttctctcaactctgctgtctcaaaggagaggtgggggtgggcctgagggattctctccctgcatggaacctacgggcttgatcatcgaggatatggggctagatatgtcccgaacctcagctcgtcctttcttccccgggaatggtcacggggagtcctgcgtgcatgtctggctttgttaataataaagaataaataataagatggtgagactcatcagctcacgaggtctgtgtaggctggcttcctcgcccgagaagatacatggatgggtctgtcttgtccccccgcactgctaggggaggaacctcaggaccacctgccacctctccaatgtgcaggaatggcagcattatttgcatataagtaatgtccctggggcagaggtggctctcgctgctgcggattagcccttgcttcatcctggttgcagagacctttgtccctggtaggactgagttgtctgagagaggtgtgtgcacatatgtgaaagtgtatgtgtgcatgtgcctgtgtgcattcatgtgtgtgcatgtgtgtgcttgtgcattgtgtgtgtgtgtgtgtgtgtgtgtacatccgaaggcgtagcttctgaaacgttgttgggaaagtcaggaaggagagctgagaaggtccccacatctggttaggagattccagggagaggacatttgtgcctcaagtgggtggctgcactagaggtcctcctgggtcatatgaaacttagactctaattctgtgactgtgggtaacacaggagggctcttgggtgcagacacagcttgggaggccttgtgttggttacttgtatgtgtcaactttcttagtcctcggtacccagtgtttggtcaaacattattctacaagctgctgtgaaggtatttttcagatgagattgacatgtgaatcagtcgattttgagtgaagtagatgaccctccatagcgtaagtgggcctcatctaaacagccgaaggccttaagagaaatagactgaggtccctcagctaggaaagaattctgccaaagatggccttcagcctcaagctgtggcatcagctcttccctgggccttccctggctatcttgaatctctctctctctgtgcgcacgcacgcgcacacacacacacacacacacacacacacacgcacacgcaccctctgggttctgtttctctggagaaccctgactaatatgcagttccctgcagggtctcccggggcagccaaccccactggcattgctgaggtcactctcccgtggacccagtcaagggctgactgtggagctggctcctgggtcccaggctgagagggacagagtaccctgtgggcacatggaccagagcgggggatacaaacctggcccaaggccaaccaaagaggcattcttgctgagtctagtggcaagtgaagtctaggggcagagaggaaggctgaaaccacataaatgcaaagggatttggtccatggattcccagcaggcatccctgcctctggccttacctgtggagccttcggtcagggcagctgctggtgagaaggaaccaccccctccaccccgccccacaaatcaaggcctctgtgactttggaatggctttaccctggtttattgagaggaattttaatgtgtgcctctgtttttttacttatggctgtgtcacatggggccacatctggatgcagggagcaggaagccatgccacagtggtgacaacacagtagctgttgtctacccacagctggcagttcagggctggtgtggcagctccaccatgccatcactggcccaggttccttctacctctccactctaccatccttggcatgtgactttagtcctcatggttgcaaaatggctgctgtgctccaggcattgcttcagctttcattgcaggaaggaaaacgtggaaggaataaggagcagcactagatgagggctgtcaaccctttccctgtaagccccacgacttctgtattctactggccaaagctgagcctgatggccaacccttactgcaagggaggttaggaaatagaatgttctagctggtcacaatgccaccctgaacagtggctgtgttctgttggtagagaaaggaaccttgggaaggcaattagtaatgtctgcctcagtttctcatgtagattttactaggtaagaaggagtgatactgaccacgatgcagaaaatatcttcaaaacctccttttaaatggttccctttccctggaagctgctccctcccacactctccctcactgctccccagagccgcagcctccacttcctgccttggttccctgcttcttccttcttctttcctttcccacctctgcatcgtcctcttgagtccagagactctggacccaaactgacctgttccagtcctggttctgcatccactggtcacacgaaggcttcactggccctcactggcctcatctggacaatgatcctcagaggaggaaatgagaccccgtgtgtgagggttcagggtctggtacatggggagtacgccacacatgcggtggttgtaactattgtcatggttggggtcattgcaaggggacaggctggctgggatggggcttgcagacgtggctggtcagcactttgttgggcagacctgtggtgggcagagatggggcctgggaggctgcactatggttgggggagaccatctgggtggtggaggcagagagcaggtgtgtggacttcctcccagggccaccagagggttattatctgtaaagctgccccccatcttgtatgcctgggaaataggctctccatactcctggctgagctgccacagtcaagaaggttatagaactgacttttatttaacgtgtttctttctttcttctaaaaaaaaaagataagaagtgtcctacaaaaccaacttaatctctccttccttctttccttccattcaacctccctccctttttcccttccatcttccctcttttcttcctttcatccatccatcatccatccatcaatccctccttctaatcatccatccattcatctttctcttcttccctccttctatctatccatccatcactatccatctgtctctccatccatccatccatccacccatttcttcttccttccatccattcatccattcatctgtgcatccatccatccatgcatccatccatccatccattgctcctttcatccttccatctatctgcccatccatcaccatccatccatcttttcttccatccatccaaccacccatttcttcttccttccatccactcatccatccattcatccatccatccatgcatccatgcatccatccatgcatccatgcatccatgcatccatgcatccatccatccatccatccattgctccttccatccttccatctgcccttttcttccctccttttttcatttggttcctgacaacccagctctttgctgggctgtgagcactgcaaccctgggctgtatgcagccagcctttggttgagaacacaagcaccctgctccatagcagaaacgcccttggtgttacgtgaaggctccgtaccctgtcatgagctgggcctggcctggcagctgttctttggagagtaggccccacctattccgttgctggcatcaggaggatctcccggagccggtgtcctattcccccagaagcaaggttgtgtgcatggccccacctggctgtgtttggaaggctgatggaggcctcccagggacactttcccccaaaataatccacagtgacactagttccataccaaccactacctcatttcctgacaaattgtccagccccaaacaaaactcgtcttatctagttccatctcggagcagcctgtcaactccaggcatcagcagatctttcaggaaatcacctattgtggctaaaattcgcactccaaggcgtgtgcggagccgcaggaagcaacagccaggatgcctggagactcggtacacaaagcaggcctttgccctgccgggctgaggaggctcaacccacaggcaccggcgaggggtttctttccaggaggaagttgcaaatgagtagcttttccatcttgagttttcatctcaagccctgacttccacagcaatcctgttggggcccaaggggaagtccaccatctgactcccagcatgccaggaggcccacagggctgggggagcccccagcactaatttgccttgatggcatcccaaccattccagcggaggctgaccctggaagccccaaggcttgaaatcgcctgcagggctagccggcccctcggtctggggagctaaggagaggtggggcaggccactgtggaccacccgtcctggtcctcaccacagaaccaggcccctcggaagctcctctgagagcagagatggggtggggacttgccactttccacggacaagaggtggatgggccagctgccagcatcccagtgtcctcacctgcccatccaaccacagcaggactaagtgtgtccgccctgaatcttggagagaaagaaaataaataaataaataagacaaaaaaaggatcccatcagatgccaaaaatgaagataacatgggaggaagtttattttgatgaggaaatccctaaatgctgttgaaactatgcttggaatggctaattagtgcttggggggctttgaaggaagcgctatctcacagggcggccacccccgccaggtttccctggcgcttgtcgcttatctgcaggaaacggctcgagcttctgaatccgcagcagcgcccagggctggcccatgactcatgcccgggcagctggacgagcctccgtggtggggacagagcagcagctcaggggacagccatccccaggcagtggacccggcccggtggctggcttgggcagacacagcctcccagggcagcaggaagagaaggttctggtaggttcgcctcagcgccccctgggatgcacacctgctgcacccaacacacccgctggatctgctgtgacccaggctctaaacatgcaggatttattcagtgaaggggacaggagcctcgaggaagtgaaagccagatggtgcccccagggccccggtgacacttggctgaggcctgagcataagcgcgtggctgctcggagcttccagatgctccgtccgccttggaaacagacgttttcctgcagggcccgtggcagagccctggacacaggaagaaagggctatttttagaggcaaggcttcagatgtagggctcagctgaccccatcccatcctgccctctgactcccacaggaagagtcatcggaaacgcctgacttggaggcgtgcagaattctgcctaattccgcctccattagcatgcagggttgggggtagttgggccggggttggggggatgcagaaactcatccaaccctgaaccgagccagcctggagcagagaccacacgatccaatatggtaataacctgggatcggccatgcatttgcccagacttcagcacactgccttcgctgccacccgtggatacacagcatggtccattgtattgggagctttgtgctgggccaggagtatcacgtgacaggccctgtcctttccaagagccacaaagttgagtttgggctagcgagagtccacttctcaatgtctatagtgacacggggctcagaggtgtggcccaagcctctcagagcccaacaaatgggtaacagagcttgcccagcccttgtcctcccgggctccgctgcagtccccatgctgcctggtcccctaggggcccaacagaaccttctggaaaggtgtggccggcattggcccccacacctgagtgcattctggctgctgtataacgctgcatttttggctgcaatccttccaaaaaagacgcagacccacattctccctactctctagcctcccacacgttccacatcttcagtctactcccacacctgggaagtcaggggcaaaagacatgggctgagatgggggtgaaaaccacaagggttgggggaagataaggaagaactttcttcacttccccaccttctggttctaagtttagaattttcacttttcactcacaatgattgtccttttgctaatggaagatcctctgtggatccagcagaagtcctgcctcccccacccaaatttcctctgtaaaagagaaatctcttcacacccatggaggggccttgcttttatcatgttcttccattttgaactacgagctgcttttttcatgattctatctcttggggcactgaggagctgtttggccatttccgcagggcacagagaacacaggacggttttgcaaaactgcagatgatgctctgtgggaggctaaggagggggagcctctctagacctaagctggggtgccttctgtttttaaaaataatagagatggtgggggtctcattatgttgcccaggctggtcttaaactcctggtctcaagtgatcctcctgcctccgaaagtgctgggattacaggcatgagccaccgcattcagccatcagctgaggtgccttctgttgcctgagtgttgctgtgccccagatggccaggtgagctgcaaggaggctttgcactgtcatgtgagcctttgcacacctgagcaggctccgtgcagccacagtgcttgtcaggcacggctggcatggctggcatggctgggcctggagtttgtttatatttcctccttaacagctgactcagaggtagcttgtggctccctggcctcagcgatataaattcattcaattggcaaccatgcacagaggtcctactacccaccaggctctcatccaggtgcaggggtgatgcagagaacaaaataggcgaaagctcctgtcctgacgcagctcagcttctggagagtggaaacctcatagtcaaaatgaataaaactccaaagtcatttagaaggagatcacagctgtggagacaatcccaggcagtggggacacagggaggccccagagctgagggaagggattgctgttttagagagagtggttggggaaggccttgaaagttgattgagatttgaaggaggtgaggcagaggggcacatggacacctcagggaagccacagaccctgcaaaggccctgaggctgtgaaatatccaagcaattccaagaacagcaaggaggacaggactccaaggccactggaactccctcgtcgacccccttctgatggtctgacggggcctggacaagtagctggatgagctgtaccatcagcccattttctcctgcccactttatccctcatcattaaccaacttcccttctctcctcccctcccgggagttccacccagccccaaccagaaccaagcctgggtccagctttggaaactcatgcctggctggcaggagcagcagctgtgcccacacaccattcccagagtaacagttgaatgtggagcttcaggccaggcggcgtggctcacgcctgtaatcccaacactttgggaggccgaggtggttggatcacctaaggtcaggagttcgagaccagcctggctaacatggtgaaaccctgtctttactaaaaatacaaaaattagctgagcgtggtggtgcacacctgtaatcccagctactagggaggctgagacaggagaattgttgaatctgtgaggtggaggtgcagtaagccaagatcacgccactgcactctagcctgggtgacagagagagactccatctcagaaaaaaaaaaaagaatgtggaggttcaaaacttgggatatttgggagactccccaaaggctgagtcatgctctggcctgaatgtcatcctgtccttgctccgtggaagagcagtggaaataaattcattgtcccccattaggaaaagcagaggccatgatagtggtgctgttctcaggcccagaaaaacctgaggaacatgctccacacctttttgcaggtggggatctacaggccagagaagggaggaggcctgccggggggacacgaagttagttggtggcaaaggaggggcccagaaaccaggtcttctagcttggatggttgaagactaaagactgtttacgaaaatttccagatctctgctttctgagcaaatagaattgttcttctcatccccgttgaaatcaggtgtggtggcatgacttgattgaccagtgaaatgtgagtggaagaggtctcagtcacttgtgagcagaagttttaagaaccagctcgtgcatctggcctccatgatgatggaggtctgggtgggactcgatcctccatcagcctgggtccctggagcacgtctggagcgggccctcactccttgcatgtgtggcacaagaagaagacaaacgttggttatctgaagctggcggtcagcagacgccagcctgtgggcaatttctcaatatcattttataggaatgcagcccactcattggtgtgctgtctgccacgcttttgtgttacaatagcagagttgaggagttgcgacagagactgaatggcctgcaaagcctaaaatatatattaaaagtagccgggcacggtggctcacaactgtaatgtcagcactttgggaggctgaggcgggtggatcacttgaggtcaggagttggagaccagcctggccaacgtggcaaaaccctgtctctactaaaaatacaaaaattagctggatatggcggtgggcacctgtaatcccagctactcgggaggctgaggcaggagaattgcttgaacctgggaggtggatgttgcagtgaaccgagatcgcgccactgcactccagcctgggcaacagagtgagactgtgtctccaaaaacaatagcaacaacaaaagtacacgtcactctttacagaaaccatttgctgatcctgctggcagccattgagatctgggggcctgtttgttgccatagcatggcctagcgcattctgaccgatacactttctaatcatgccgagaacttctgagtgccgtctcatgagcaaaacgtgcgctatattagtactgtagcaaagcgcttctggcctgtctccacgggctgagtgcagagcctccattacagtcatcattttatgtcaggaagggaaggtccaaggaggtggccggtctgaagtgacctcgggcttctccaggcctctgccacccacgctaaaatgagaagcccctgagaatttttaagttttgtctgcattgtggaagccaggacgcagaggcagaaggagacccatgggcctttctatcccaacaccaaccgtttaaaacaacagaagaaaagggaagccggtccagcccagagcagaaatgaggagtggtaggatccggctgccccaggccgcccagctcctctgtctgcttcctctatttgtgccgggcagcccccaactccctggcttatgtggcctgtggagggaccagctgtggcgggcaacaattttgtccaaccccaggccttggtgtccgcgtccctctgtgtgcaccctcttcctgcgtgggtgctgcagagccaacgtgaggggcccacaggcaggggcacccttctctgccccccaccaaacagaggctgctggggtggaacccgaggtcctgcgggaggggtgctggccgctgggaaaagcccgtgtccgggccccgccctccgtctcccccgcagccctggcttactgggctctcctctcccggatctcatacctcacattccccagcacggttccgacaggcccatgagtggggagtcctcatggcctgggaaggtggccgagaaagtttgaacagctgcagagcctgcccgtccactctctccagccacatttgtgtgtgtgtgtgtgtgtgtgtgtgtgtgttgtgttttgaccaacctcttaggcttatgtaacacacttggaagtcaagaagtaaggactcattactgacagcctcagagaggcttgcgaaacacttgctgtgaagaaatctttccattgagaaaaagttccctggtgctcatgctcccagtggctcaggtatgtggctgggggtgacggtggtgtgagaagcaggggtccccagggctccagagcccagcgccccctgccggagctgtgtcgcgcccggaaatggaattgagcatcgcttttgtcctctatgtcactgctcacgtcaccaccaacaaccgacgtcggtgactaaactctcgccgcgtatcaggcactatgctgggcccctgcgtttgtgattttcctgggcgcgtgcatgaccaagggctaggtgctcctacgcccattttatagaggaggacacaggcaaggcggtggggtcggggcccttgtcagcaggctgccaccccacacctccctgaggtacatgcaaaagcagacccctcccctccccacaggtatagctctatgtgggccctttgcatgagtgtatttttaagctacttgctagatcccaagaggaaatgagtgctcatcctgcagggagaggccagcattccactgggccatttcccttttcagagagctgatgtggaggattctgcgccgttcttggccatgccgtcatctggggccccaggaaccttacagacccgagggccagggtttggggcccagagcccagcagatagccatcttagaagcattctccccaggaccagggctgctaaacccaaccccacatctcccacacaaatgcgtctttcactggggctctggaaaccggagaccatgtaaatccaagaagatgaaattgtgtgggtctgggccgcagctacagactgagactcagcagccgaggggccccagcctcagagggaactcaatgaatttgtcagggaactgaaaacagatgatttcaatcagcaggggaaaaaaatgacttcatggccacagttgaccgaagcaagcggcgttcggctgccaggccctgcctgggaggcgcttccagaaagcctggcctcttccgcagcctctggccggggtcttccctgcgaggagccagcgccgctcgagccgcagcatggcccggcagaaggcacggcggccgtgatggggctggcggggcgcggtgataacccgggctccccgcccccgcgcttcctctccgctgcgctttcatgaatggccccgcttcccaaacagccgattggctgaacccccggccgcgacgcccaatcagcggctgtggccgcctggtctccgctccgcgtggggcctcggtcctgcagccatgaatggcgcagcctcagctgcctgcagccaccgcctaccttgcgggggccgcctccccccgagggaggaggagcaggggattttttctttcccccagactgttcagggttctggtgcaattgtgtcaatctgaggcttggctggagctcctgacaatagcccttgggcttccaaggttgacattcaaggtcttgtgacagtgaaagggcttgcatagttagaaatgaatttctttgcctatagcccgggctgattccagttccagggaaagaacggcagcctttccgtgtaagcaggcagccctgctggggacaaagacagggccgtgggaggaggtggggccccttcctggccagtgctggggggggcggacacgtgcaaactgctgggaacttcgcctgcaaaccagagggctttggccacccctcttggtcactggccttgtcctagcttcatatgccacgtgcatgaagcggctggggcccctgtcggggaacccagccattccgctgcatttcctgttaagtaggaaaacatgttctgtttgctgatgttataaagaaggcatgtgtttacaaatgctcattggggagagcgtggttaatgggccagcttccggcctcacctccccagatgaagtgattgtgtggctgacagaatgggcctgctcttcaggggaagaccccctactcgggaaaattagactcagcagaagccagaattcaaagctgtctagaaagtgcttttgcaaggtgggttgaggccaggatgaggaaggcctcgaatgccaaagtgaggaggtgtcccaagccctggggagtcatggaaggctggtgagatgcagagtgagattccggagtgtttcagaagcttgactcttccccggcagggacttctctgccaacacacctaccctgagcatggctggggtgaccttttatggaacttccaaattagaactgtgcaaacagcttcctgtgaccccttgatgagccccattttaaagatgagaaaactgaggttcagagtaatctgcaaagggtcccacaatttgggagtggcgagaccaggactggaccctatctctgcctgatgccataggggaaaggcacacccaggtgctgcacgcccacagggactggtgtgaggaggcttcagcaaaaaaatgcgggcagatcactaaacactggggcaggcactgactcattgctgcagtggttaggatcagaactggtgagaaatgtacctgctcccaaatttctatgagccagactctggtctcccaggtagattcgtgaggccatgagtatgcagcagggggcggcctgacaaattcatgtagatttccagttgtagcatctattttttttttctttttttttgagatggagtttcgctcttgttacccaggctggagtgcagtggtgtgatctcagctcaccgcaacctccgcctcccaggctcaagtgattctcctgcctcagcctcccaagtagctgggattgcaggcttgcgccatcacatctggctaatttcgtatttttagtagagacggggtttctccatgttggtcaggctggtctcaaactcctaacctcaggtgatccgcctgccttgagatggagtctcactctgtcgcccaggctggagtgcagtggtgtgatctccattcactgcaacctccacctcctgggttcaagcgattcttctacctcagcctcctgagtatctgggattacaggcatgcgccaccacacccagctaatttttgtatttttagtagagacggggtttcaacatgttggccaggctggtctcaaactcctgacctcagttgatccacccacctcggcctcctggagttctgggattacaggcatgagccaccttgcctggcctgtagcatctatttctgccagcctaatgcccagtatctgtttttaaccttctagttcagcagtttgtaaaatttctggtcttgggacccatttgcctcttaaaagttatcgaggaccccagagagattttgttgatatgggttttatctactgatatttactgagttagaaatgaaaacatagaaatttgtaaaatgcatgattctgcaagcatacattctgttagctctcagagtgacagtgtcatcatgggtcctatggcctctgggaaactccactgcacagtcatgagagaatgaagagagaatgaaaggaaaaaagacaattcatgcctcagtgtcttcatgaaattaactgcaacctctcagacctcctgaaaccacactttgagaactgctctacagagagcagattgagctgggcggcgggtgcctggcgaaagcttcatttcccagccttcttgtggctaggtccggccatgccataccctggctgaatggactgtgagccatcctccatggtgctgggcaacatgatagatctgtgagtgaaggagtcattgcagtggccacatcctgcctctgaccaatgagcttttcccttcttctccgccttccacaggctggggtataaatgaggcatgggtcaatttggccctcgtagacagggcaaccctcaggtgtgacagagcctgggtgaccagtatcatgctgccatatttgttttttgttttttgtttgtttggtttttgttgttgttgttttggagatggagtttcgctcttgttgcccaggctagagtgcaatggcgcgaactcggctcactgcaacctccgcctcccaggttcaagcgattctcctgcctcagcctcccaagtagctgggattacaggtgcctgcccccacgctcggctaattttttgtatttttagtagagataaggtttcgccatgttggcaggctggcctggaactcctgacctcaggtaattcacctgcctcagccgcccaaagtgccgggattacaggcgtgagccaccatgcccagcccatgctgccatatttgtcctggattgactatgtgggctcctgtgggaaaaagaaatcaacagccaggcttctgctactgtattttgcagtctttgctataatagcctaaccagaatcctgatcagtacatcattcttacacacctggcttcctgctcttattatgcttgcaagaagttggatgaaccatccagataagcccttgggaggagctgagtcttcagatggaagcatgaggtggtgaagcacccctgacagatcattcctttaacatgcgtttattgagatattcttgccatgagtccaacagagtccaggagaggaacatgaggtcacagctgatgggaggaggggacgctgggatggagcttgccagagtgtcgggggctgccatacaaatcaccacaccctgggtggtttcctacagaaagaggcagaaacgtactcttgcacagttctggaggctaggaatggagatccaggtgtcagcggggttggcgcctctgagggctgtaaggcaaagaacccatccctggttcctctcctggctcttctggtagcttcagccgcccttggcgttccctggtttgtggcctcatcgcttcaccctctgcctccatcatcatgtggccttgctcttcatgggcctctctgaggaaagcaagaggtgggagcagtgggcctgggccggggtcaacagccaaggtgtggccaaggtccacccaaggtcattggctccttgctcggcctcaaagccagcttgacgcagcagaccctctccccggtctctctttgtcctttcttcttcttataaggacacttgttattggatttagggcccaccctagtccaggatgatctcatctcaagatcttttgccttccctgcatgcacaacgattccttttgcaaataaggtcacactcacgggtttccctggccgtactctttggtgttgcgggggcgaatgggtgcagcattcagccactccagggctctaagtaggagggacaggcagaagccaccaccaggacaactggaagacttcctggaggagggggtgctaatttgggtcttaaggggagtcattgctgcgagaaaggggagtccacgtgggaagctcagatgcagggaggtgcaggaccttggcagggtgtggggcctccaggggaaagatgacaagtgtgctggaggccttgggggtggagggctgagtgcctcaggatgaggctgggagggccaggtgtgggaggtctcagggctttgttctgcagacagcaggagccagcaggggctctagggctgggagtgagagagttccctgcaggacaaaggtgggctaatggattcccactaggttcagggatgcagaggtggtcctgggagggggtgtaaatatgtgtcttgcaaggggtggagggggagatggagccttggggtggtccctgggaggaccctgggggcgtgtggggacgtctgtacagagtgcagcaggaaatcaggctggtctgtcttgctgtgtttccaaagaaaagaggcaaacccaaggggtaaggggcttccttagacgcagggcccagtgcacccgggcgctggcggtgggtctgggggctgactgtgtctgtactctctcctttgtctgcaggcctggtctgcactcagcggctgccaggacctcccgggagcgcccacacaccccacagcccgcctgtcctgggaatacctctccaggccctgaatacctgtcccccactccctgcctaggacaacgggggctgtcagggccatgggcaggcccaccccaccaaccagaccctacgtgggccccgccttggtcccggagccaatgtctggctgatcagggaacaagaggagccttcaacacctcaattctgggacggttgaggttttcacaccgggccacacctgagccactaggagccgggaggctctgatcgtctctccgcctgtctctctctggcatcgccagggctgacttcattccacgtccgcgcggaaacagcagggctatctcagtgcaatcctggttttgtattcagagcctcctctgagtgagtgccagggcgcaccgtgcaaggagcctggctttgcccactgcaatcccgtgccctcaccctagtcttttaacctctcacgactcaggttcctcatctgtgaaatggagctgtcttctttgtggggttagtggaagcaataagcgagaagtgtgtccacacaggcccagcctttctggggcctcactgtgaccagacactgcgctttggactaggggatgggatgcgacttaggggagctgcggccacctgtctctggaggctgaagtctccctgcggaccacccttcctcaggaccacccttcctcacttgcacgtctcccctgcagtcaggactcgcctgcccccacgccaggctctccctagtggatcaggctgtacaacctggtttgtatgaggaaaggcagccgctggggccccagtgcagcaagagaggggaggaggaggtgttcagagggaagacccctccccacccccgttggccccttgtcttcaaaggaagggcgtgacctttctgccccccagacccaccctgagggtcactgtggcggtgaagcctggtgccggcacttgtgcccgccctctgacttgcagtgtcccgagacatattcaggggagccaggtattcaatcagcaaggctcccaacaagatggggtgggtgggagaagcacccacaattctctagaaggctttcagggcattcttcactaaagagacacattggagtctggaacccctcccctagcagggggacacctccaagctgtgctcaaaactgggacaggatatttgggttggagtgttctccgtctctgcctctctgtctctctctctccctttctctctgtctctctctctctctccctctctccctgtctctctctctctctctctctctcactctctcttgctctctctttcctcctgtctctctaaaggtctcctttcctctaagggcaaagcagcagctgtcaggtccttagagcaggatccctggttggtgcaggcccagggccagcccctggtcccggcctttcttcccctgggggatgaacagtgaatgcagccgccctgggagttgggcgacctgcggggcttggagggaagggcaggagggcccagggctgacacagcacgcctggctggggtgggggcagtggtgtgggtggctgaccacattcctgggatgccgggctgcagggctgggcggctgtgtctacacctgtctgcccctgtcggctgtgagcaatgcagccagggacagggcagctagagccatgctgtggtctggccagtgggccaggcacgtgagctggttcatgccctgctgcaccaacaacgttcacctggagaggtcagtggcctcattgaggggaagaagggctctgtccctagagtctagcaagcctgggccatggtctgtggggcttgtcagggtgacttcacctctgtgagcctcagtttccctccctggaaagtggagcataacatgggtggggtccccggtgctggcctgcagagccctgggagacgtgtggagtacaagccccatacgctaggccaaaagatccgcagaccaggcagcttaactgatagaaatgaaagtccaagatcaaggtgtcagcagggcaggctccttctgaggctgcggggaaggaactggcccaggtttctctccttggcttgcaggtggcccatgcctctccacatcagcttccctcccatgcggcctctgtgcctgaacttcctcttttagtaggactgcggtcatattggattagggcccaccctaatggcctcctcagaacttggtgaccactgtaaaggccctatctccaaatcaggaaatgttccggggtcctgggggttaagacttcaacacaaacatcttgttggaggggggttgcaattcagtccacacccgcttccctcgtctcacttcgtccagcactcagcaccctctggccctgcccttagctgtgggtctggatttcccatctcttccacggtaagccctgtgagggcggcgtctttatcccatttgctgttacacctgcaattcctggggtgccggcttgttctcatcatttagcagaccattgctgaatggctaacaaatccaggatacaatttgtaggtgcaccaagccaggcaaggtatctgcgtcacctgcccgtcagtggccccaggctgggaagaccccttgggtcatgcttggacactctgcaccatgggcagccagaactcctggccgagtggtcagcggccgccacaccttgctggagcagaggcacccctgccatcccacaggcaagacggacctagctcggtttcccaacactctgttgagatggggctgcccagaagcccacacaagcccacacctgggggaatcccagccccacgttctggttcaagtcgctgctggtttgggttcagagcccaaacatgagctcctgctcttcttggtgtgatctgaggctgtggatatcctgagaacatctgtctcaacagaacaccttcctccatgttgcctatatcccaaattcactcccaagtggcttttgtctggcagattccggtggattatgcaaagagggactgccagagaatctgagctgttggaagacttctgaaacgtcactgcggtggcggaggcactgccccggggggacaaaagtcttgtctcttcctccaaatgtggaggatcaaattagagttgacttgtgtgtttccaaacccgttgtcgtcccagcattcaactaatttgaagataccaaaagcctcagaagagggtggcagaagaagaaagggacaaacacaaaaggggaaggacaagagggcagaccgttaaaaaaaaaaaaaacctacaagaatgcagtttgctcctgggtggaccctcccaccccgtgcctgccccgagctggcccctgacctgtgycggcagctcaaattcctaacatctggcccagggtaaggatatgggcaactctttaaggaagcgtgtcctcgctaggtgctgatcactcactccaagggactttgctcctggatgcccaggctcagagagggctgtgagcctcccatggtcacacagcagcagtccaagtgcctggggcagtccgatgcccacatcccccttgaggtcccaggtgagggcatggtcacaggatgcagacccctgcctgggtaggtctctggtcttctatggcacctacttgtaagcctccccagcaagttcaatgtggggctcccagcaccggtccttgggatttgggggttccttggtttcttctcttttctctctacccttcttctccctgggtgacctcatctgttcccctggatgaggtgtggtcccctcctcagttcaatgctgggagccctgcactgaacctggagggaaccagcaggctctaggtcccgacttttggagtagggcctgccccttccttcctgcccctttctctagggagtgctgtgaagggtgcatttgggccctgggggcccatgagtttgggcctccaggatagctgagagcacgtgggcctggcctgcccactcttcctgaagccccccagcttcgccccactcctgggccctgaccagcctcctgcctttgcctttgtctggccttgggtttcccaggcagtggcagctttgctctttttctcgcaggtctcaggtgtcacctcttgaaaattcaaaggaggatccttcgaattcatgaaccagcaacctcccaggaggtgggtcttcccaccctgcaccatccggccttaggaattcagtctggagccctccctccccagggcctggggcctggaagtcggagccagccagagcagggaagggtcgggccctggaaatccagagtggcctgcctgggccggggtggggctgggcatggggaggcgtgggtcctgtcggggttgggaccagcgctccagcttccctagctgatttgagcatttaattttaattccacaaatagagaaaaagaaagaaaactcctgaaagtcgcggcagatcctcacggctctgcagatgtcctgcggaggttgagcctctgcactttggcctcagctgcccaggtaccagtctcagctactgtcactggcggtgtggcctgggcagccatgtcccctccccaggcctcagtctcccagtgtgtcaaatatctgccccgtctcaggtctcattctgctgcttcccccttgtgatcataccctgcccctccccactccccaaggacttcttggccttagcccacaaacctatgcaggtggttccatcagagactgtcccccccagccaccccagccctcatcctaagtcccatgctcccctcccctgcaggaggccactccgtcctcctagtactctcttctcccagcatctccagttctccactgcccgcttttcctgctgccccacttgctggtcccctggagtcccccagacatcatcgctcctgcagtcagcaaggatttggtgggtgcctgttgagggggccgctcctctggggctggagtgcagcgatgcgtgaaacattatgatccctgatcgcctggggcttctggtcccatgggatttgagggttccttggtttttttctctttcaacccttcttctccctgggtgacctcatcagttcccatggattgaaatatccttatgccaatgacttccaaatttgtctcttcagccatgacctctcctccaaactctggacccatatatccggccatccacttgacatctccctttggggtctcccagacatgtcaagcagatcgtgtccaagctggtgtccaatcctttcccaggcaactcaactcccatcttccccatctcagtaaatcccactgccacccctccactagctccatccagaaacctctacaatctccttgcttctccctgtccatatccacgatcaggaatccatccacagacctgtgcatcctgtctctgcagatccacagcctcacccccatcagcaccccggtccatagagagagacctggtgacacagatggtacttcagagagaggacatgaatggtgtctctagtcatgagagtcagggtttaggttgaagctactccgccagggagaagtggagatccagggcccatccagggacacgcagggagaaaccgcttcccccagcctcagggtggagcccctggttaccctctgagccccagagccttgtgtccccagggaggcagagggtggaaaagactgatgggtagagagagtgagagcatcaagacccctctacactgcagtacaagaggctcccttttgggtgggcgtgacaggagacatcccagtacgtggatcccagcctttggacttggtgactgtgatcagctaagagtaaaactgttcttgctttattcttctgggaaagggctacacctgctgggttccacaccaggtgaagaccgggcaggtattctattcaaaagggtgtggctttgccacccatttgacaggagagaaaacggaggcatggagttaccaggatgtgagcagcacagcagagcagtcctgttcagggcctcacactccctccccacagcccccttcctgaccctacagcccccgttccaggcagttcctagcaccataaggtaagtggacaagcctcactctggaaggagagcacagggccctgtccctcctgggggcccgctgagaagcacagtggagttctccagggaccaccatcacaccgaggacacgttaccataaagaaagggcccctgctcacacacatttcccagtcactagcagtgagcacgtggcagcctccagcagctcggattcctccaggccacaccctagacctggccacccacattctggcttctcagggcacatggagcagccattcccctgggctctgggccccaggcacaagagacccaggcttgcagctgttttgcagagagtaagggcaaaatggaagctgcagtgatgagggagaaggtgctggggagagggagagagatagctggatgggcagggccgctgttgctgggacctcagccccaggacgggcatcctttcagcaaaatctttgctgggcagctatggtgggctagacactgtgaggtgatggcgtctgggcaagacctacaggacaggggacgcgcagcccagtgggaaagacagggaatcagctcaaccgtccaccatgggccatgtcagatccagttatcctaccatccagaagcagggggccaggaggttaaatgacgtgctggtggccatggtgtgggggcagaagggccagggttcaaagccatacccctttgaacagaacaggtgtagcctatttacccgcctctccctccatccatctgcacattaattcattcattcattcattcattcattcgctgagcacctgctatgtgctgggccctgctctcaagaagtttggattctggtggggaggaaagaaaaaatatccaggttcatcagacaagcaaataatacaactacaaaagttgtcaagagtctcctggaagagaaggagctggctatgtggggcctgcacacacacgtatgcatatattcacatgcatgttcatccatgtacacatgtgtgcatgcatgtctgtgtgtgctttgagcatgactgtacctgtgtatctgtgtgtgcacagatgtgcatgtgcacgtgtctatctgagtgtgtctgtgtgcaggcaggtttcatggatgtttctgtgcctgcatacatgtgtgtgagtgtgtgtgcatgtgtgaatgtgaatgtaattcccaacagaggtatgaacatagctcagaggtgggtggactcagtgggatgtgctttagggaggaaaagaggcccagtgtgccaggggtcagggcgtggggcattgaggggtttcgggaggaaggagcacgtggaggccaagctgtgaaaaccctgtagaccatgagaggaatttgagttttattcaaaatgcaaagggagccaacagaggaatttccacatggctagaaaaaagcacacagccatgggactgtggggagcacggagtggagggggtgtgagtggaggcagatggccaggccagaggccagcactgcacctgcccaggtgagaaaggctgggagatgagaaggaaacccacactgaccaagattaaaaacaatacgatacaaggaattaacagcagatgagacagtgtaaaaaaaaataataataatgaacttaaaaacacagtcatagaaattctccaaaatggaatacaaggagaaaaaagacttaaaaaaaagacaaggaagaacagaacagcagtgagttctgggacatcaagtagcctagcataggtaactggagtccccaatgaaccccagtgagcgtgacccagtatccgcctagtaggacgctgaaataaaaatgactgaccgactcagtgccagcgaggacatggggccactggacccctcccacaccacgggtaccagctctttggaaacctcttctgcagattcttccaaagctaaatatccatctatgtgtgactcagccattccactcctgggtattctccaaagggagattaaagtgcacagcctccccaaatctcgtacacaaaggttcccagcggctttatttgtaacagccccaagctggaaaccacccaaatgcccatcagcaggtgcttgggtaagcagaggcctggggtcaccgttggttcagctgttggcctctccttctgtctctccaagcgccctagggcaagtggcatcttcaagctgagccttggtttcctttcctgtgaagtgggtctagtgagtgggcctgatttgaggtggtgggcaggatcagcgtggcatcactggggaagctcgcagccgagtgtgaagggcccggcatggaggggtggaagatgtcaggctccaagcagcccccgacgctggcagtgctcaggctgacccttggctgcctcagctctgggaaccccatgcagcacgaggcgtcggggcaggtagtggggccataggaggcggcagggcctgggctgtggccccgttccctgaagggctccgtgtgttccatgcagcgggcagggtcaggggtcatgtttaaacgcgggggagcccagggcagtacctccaggccgcatgctatccaagtggcgtgggcaggcggccccttggatggtctcgggacagcacagcaaggccctgggcactcacctgaccagtcacgttggggccgcctgagggaacaggcaggcagatccaacccatggtggggggctgggacttaggatggtttgaggggtgcgccgaaagcctgggaaggagcctgggtgggagagtggatgcccggcacacacactcgagtggaccagaggcggttggctaggccacagctatcccgtgcccagcaccctggtagccagttcagagtgactgtcccagccctagctgagggtatgcagccaaagcagggcacacctggtgtttctggaaacccctctccccatgccactgcgtgccagctccagtggcccccgtgtcggtccttaggactctggccacccacacgctgagctcccacagggcaggtccaatgcccagcacacaggggaagctcagcccatgtgccggcggaacggtgagatgggtgtgaatgaacaaatgaagcatctctctccccctcccctccccagcttctcaaccacagaatctgtgcctggctcaggaaatgtacccttcgtgtgggttttctattgctgcgtaacaaatggtcaccaattgaaaagcttaaaatggcatttatctattgtcttaaagtttgggcaggtcaggagccaggacatggcatagctgggtcttctgtctcatggggctgcagtcaaggtgccaaccggagctggggtctcctctgaggtttgggaccctcttccaagctctctcggttgtggaagattgcatttccttgcccctgttcctcatggggctggatctccaaatcctgcaggagagtctctgacttcaaggccattttgaaagggctcacctgattagcttgggcccacccaggatcatctccattttgattaactcaaggtcagctggttaggaccttaattacacctgcagaagtccggcacctttgcgatataaagtaacctcaccacgggagcacatccaccctctttgcagccctgccacactccaagttggggagtacacaggtgtgtagacacctgggggcagggatgctggaaagcgtctgagtctcctcccaaccacgctctccttggctctgagactgagtcctggccccaggtaggtaatgagtgaagctttgcggaatgaatacacgagggaatgagtgagtgagtgaatgtgtgagtctggcatcttccatcaaactgtgaccttcccagggccagggtccacattggactcacctctgaaatcgccatgccaactagtgctcctggttacctatgacgctttgaatgctcacctgagcgagtggaggagggagtggcgcccctgtctctcctcaaggtcagtgtctgtgcagagcagctccaagacccattcctctgggagccaggtacagggccgcaagctctgtcctcggcaccatctcctctggctcctccatgcagctgaccctccagtgcacagcagcagcccccagggcagcactggccacacagggaccagtggaggcaggctcctggctgtgagaccttgggcaaggccttctgtcccgaccctcctggtctccatcagcaagagaggggtggcaacacctggctggcgtaaggatggagcattccccgcatggccagctctcagggcaatgcctggtgccgtccagatgcccacaccgttgcctcctttcatccctccaagagcatcaccaggcaggtgctgtcattatgcccattttatagcttggtaaactgaggcacagagaggttaggtaatacatacaaagctggggattgggcccagacagtctggctctagccatattggaagggcattccccctcacccctgactactgggttcctgagtagtgagttgaagaccctgctcgtcagtgtgctgtgtgacgttagcaagccagctgtcctctctgttttggccactgtgttgggcttcctggggctgctataaccaagtgccacaggytacacggcttaaaccacagaagtgtatcgtctcacagctctggaggccagaagttcaaaatgaaggttgggcaggggtggttcccgctggagctctgagacgaggatctgctccaggacctccttggcttggaggtggccgccttcctgttcccagggcgccctccctgtttgtgtctctctctgtgtccaaatttcccctttttagaaggatgccaattaaattggatttgggcccaccctcatggcctcattttaacttaattacctctctagcgaccctttctccaaacaacgccacatcccgaggtactgaggtatcctgagataccacatcccgaggtacactccaacatatgaattttgggaggacatgattcagccaatagcaaccacagcaaactgaggtgaatttccatccttgccccaggtagcactgtgagggactgagctgctaggcaccttaactcttttatttttattacctggggctctgaaatctcacacccaaaccttgggctgtgtgtccgtccctgggaggtcctgacctcactggcctctgacccagggcttatctgtcactcctctttcttctggattccggttgcaggcattgatcccttccctggggtttattttgctgggtgtcaggcaggaaaagggtcaaattccagcatgcaggtccgatgttgcataccaggacagcaggcatgggccacttcccctggctgcagggaatttgtccagactgaagaggatgcggccctgccagcggcccagagctgctgctcctccaggggcagctgaactcagcacccagcctcaggaaacagcggatttgaaagcagaaatccttttctctgaaaagggaaaagaaagttccttctcagcatctctggcttcttctcccctctgctgaccccaaactgaggcactcattttaccttagcaggggtaagaaaaaaggcacgttaaaaacattttgtttacacttattacaaaaataacgcatcgtcttttacctcgacacgtccccaatctcccctcaatcattaggggcaatcctgggttcgggctgattccagacgtccagaacaaaaggaaacactcgacctcaccccttccctcgcatatggcttactatctatctatctatttatttatttgagttatacaagcaatayatgttcagtatgcacaccttggaaagaagagatggaaaaatatcacctgcaacctctcagccactaataaccctcacaaggattagcatgtacccttccattcttcttccgacacacgtgtgcatggctgtgtgtgcatttacacgagtgtagttacgcactaattcaatcctgcaaacttggtgttagggttagacagctgcctttcttattagataattttttttaaattccagttaaaattagcaaaggtggcaaggtgcggtggctcacgcctataatcccagcacttcaggaggctgaggcgggcggatcacctgaggtcaagagttcaagaccagcctggccaacttagcgaaatcccgtctctactaaaaatgcaaaaattagtcgggcatggtagcgcatgcctgtagtcccagctactcgggaggctgaggcaggagaatcgcttgaacccaggaggcggaggttgcagtgagccaagatggcaccactgcaatccagcctgggcgatggagtgagactctgtctcagaaaaaaaaaaaattcatcgaaggcaaggagttgttatacaccttaacgttaacaaaatgggttttaaaaagagaaaagtggtttctggggaggatgtggcaaagctggcactcacacatgtatcagcaggttcatgggtatgaagcgcacatgtggtcagtactgccttcccacgcgcacccacatgcacccacgcgcacccacatgcatccacgcgcacccacacacccatgcacacttgtgttgaacctttgtcccttgcctgtccaatatctctcccacttcttcgtctcgtttttaaagttaattttatttttttctggcagtttcaggtttacagaaaaattgagaagaaagtgcagagagtttccacatccgccccctacccgcagttccccctattactaacatctcactttggtgccgggtgtcaggcaccaggcgtccttctggccacgctgatcggctcctttgtcacaactgaggagcgcctgggattactttattatgagactaaggctcctagtttacatgagggctcacacttggtgcagtacgttccatgaaatttgacaaatgttatggggacatgtgcccaccgcgccagtatcctacagaagagtttcactgccctaagcatcctgtgctcctcctgtccatccctccctccccgctaacccctggcaaccactgacctttttaccatctccatagttttgccttttccagaaagtcacgtagttggaatcatagagaaagtagccttttcggattggttcttctatctagcaatatgcatttcagcttcctgtgagtcttcccatgacttgcgagctcatccctttctaacaggaaaaaatattcttccctctgattggcccagggatggccacatgacccaagctagaccaatgagagttctacctgggatttcggccagagtgggtctgaacatagactctttcttcccatcagaatcacaaaagtccctcgcgttggcctgaaagtgaagtcagcatagagacagcagatgcacagagatggtgttgtcatgccatcattgtcaccttctcagtcgtgtggtgcctaaggtttacagctgggttctcttgttacataagccagcatgttcccagttttgcagaagggttagggcttctgttacttgcaaccaaaacccctaagataaagacaaatgttttttacatgcacctttttttttgtcaacaaattcatatgatgttattattttaaacatttttattagggtaagatttgcatgcaataaaattcacccttttaaagtgtacagttatgtgagtttgacaaacacagctgtgtttgatccctttgccacaactgagatccaggacagcctcatcagcacaaaaaacttctcactctgctccccctcctcctgctcctgggaaacacagaacccgtttcctgcccctacagtcttgccttttccagaacatcacataaatggaatcatacagtgtgcagactttgagtcggcttcttagcacgatgcattttggaccatccatttggcttgttctttttcatggctcagtagtattccactgaatggatgtaccacagtttgttcatcattcctcagctgaaagacatttgggttgtttctagtctggggtatttaagaatacagactctacacacatctgtgcacagatctttgtgtgtacttaagtcaactctaaggaggtgttaggaccttgaagtcaggacagttgggccctcaaaggattctcctcagccttgccacattgctttcagaactcagacatattctaagaatgagaaagagggctgctaggagaattccccctacaatcatcagaagaaaggcttccagaagcagccaccccactcttctctgttggcctgaacgaagcccaccatcagatgatgagattcaagggtccagtggggtgcagtgtaatgttttgataaacacatacaatagggaatgattcaatcaagctattaacatatccatctccttgctcacaggtatcaacgcatcacataaatatacaattaccatttgtcagtgcaaaataatgttaatatacaattactacttgtcaatgcaaaataatattaacatacaatcaccatttgtcaatgcaaaataatattaatatacaattatcatttgtccttgcaaaataatattaataataaatatgaatattaataatattaacaatgcataataatgtttacataattaatattagtcagttaataatattaataattaatactcaatgcaaaataatattaataataagagcatccagttggagttgccaggatggagataacaatgacaaaaatgatgataatgattatctaatgatccactcagccctggcatgggtctgacacccacatgttatttttttcaggtctcataatactattccaaaggtccccgtccctagtgtcactgtgaagatcctgaagcttgcacatgctcgaggcagagtgagaggcatgccttctgttcacccgagacccacagtctgctttagatcccaagcaggtgtttacggcagttctccccgaaggaccccaaccattgcatggcagttctcatggcttgttccatttggtgcatccgtaaggagactcaccccagggctgggccaggaatttcaccctcccacctgcttccgacttacagatgggacctggctgggccctcaccgctgtcttaccctggccaggcgactcaactcaaaggaagccacctacgctgttcaacctggttggaaatggaaaggactttggatgccatccagccgaggactgccacaccactgagagacccaggacacagagacacacggcaggccactggcagggtcctgccaatggggtggctgaccagagccaggcctggccagtcccagccctcctgccagcaaggacgcagatcaaagcagtgcatgggctgtttgattttcttgtaaggtcttgctgagtggatagtttcaccctgggctgctcagatctcggcgacagaaagggagaatgtgtcctctgtcctctcacgccctgtgtctgtgctccttgcaaaggttgtgaacacattcacgtggatttaattaatcgccgcaggtgcacgtccacctctgcctttccctctcagtgggttcccatgtttccacatggtgggttgagtgtctgcacgctaactggcttagacgtttggacggtctccattgtcagcatcatttattcattcaacaaacatccaccgagcatttcctgaccgccagattctcctttgggtgctgagggtgcagcggtgaacaagtcaccatcctcaggagctgacattctgtagttcagggagatgaacaataaaccaaataaacagtaagtaaccatgagatggaccatgttgggtgggcataagtgctctggagaaaaacacacaggcaaaggagtgcggggggattgggcaggtgcctctgtggataccagggccagctctgaccttcctgaggggggcggtctgagcaggggtggaggggtgccggagggaaaacctggatgccagggttggggaagttgcttcaagaaagcgcaaagcccccaacacgagagcttgactggtggggaaatgcgggagtttcggtgggctggggcagggtgagcgacgagcattgaaataacaggacgtggacgacgacgatcagcaggtctgtctcagcaggggcctcgttacatggggcggggagactatttccttgggatcagtgtttaggcctagaatcattagctttggggctgcgtacattttcatggccctggctcagtagttgttatttctgtactgttttccctcggtcctgatccagtttatagttaccaccgacaggatatgataatcatgctaaccaacccttcctgagcacatgcgtgcttcacacgtgtgaacctgctgatgcctgcgtgagcgttggcttcatcacatcctccccagcacctgcttttctcattttaaaataattttgttaacatgaaggtgtagaacacctctctctggactttgctgattttaactggaattttaaaaatcccctaataagaaaggcaggccaggcgtggtggctcacgcctgtaatcctagcactttgggaggctgagacaagcagatcgcctgagcttaggagtttgagaccagcctggacaacatagtgaaaccccatctctactaaaaatgcaaaaaattaagtgggcgtggtggcgcacgcctgaagtcccagctactccagaggctgaggcaggagaatcgcttgaacctgggaggcggagtttggggtcagccgagatcacgccactgcactccagcctgggtgacagagcaagactctgtcaaaaaaaaaaaaagaaaagaaaggaaggaagaaagagagagaaagaaagaaagagagagagagagaaagaaagaagaaagaaagagagagaaagaaagaaagaaagaaagaaagaaagaaagaaagaaagaaagaaagaaaagaaagaaaagaaaggcagccataagtgaaccctaacaccaagcttgcagaattaaatgagcaaatcgtgtcgcctctgcctgcctttctaccatcattgcatacgaagcttgttacttatgtcttcatctcactgtgtccccaaatctggggctgtgtgagctgatttggggtgggacacagatggctgggttttagccctattgtgaagggtgacttttaatgtgtaatctatttatggcaagtgacgttgatccaccacatatggcagtgctatcaagtagccagtaaaagtacatttatttaagaaaataagcagagtggaagcatcgtgtcagtgatgggacaggtggtattcagcagcctcaaggtgctggcggcagctgatgtcttaaagactgcactgtctcatttaatcatcccaagcacggatactggagggagtctttttttttttttgagacagagtctcactatgtcacccaggctggagtgcactgccacaatctcggctcaccgcaacctctgcctcctgggttcaagcgattctcctgcctcagcctcccgagtagctgggattacaggtgcgtcccaccatgtctggctgatttttgtatttttagtagagatggggtttcaccatgttggccaggctggtctcgaactcctgacctcaagtgatatgcctgcctcggcctcccaaagtgctgggattacaggcatgagccacggttcccggcctggaggaagtcttattagcctcatttcatggaggagaaactggggctccagggcatggaggctgcctgtggccacgcagcctgggaggcttgtcaacctcctttgacaagcacgccacctgcatcacagaacagctgcatttctaatgtcaggcttctgcttacatgcagttggtcttctcctgtgaatggggaaactgaggccttggaagtcagtcagcaggtcaggacacagttcagcccagagccggggctctggccccatccaggggctcccccagcagccaactctgccagcctttgatgcctcgctgagacagagggtctggacagtggccactcacccactgggcccacatccccacaggcctgggctctggacgctggaggcctgaggctgcaccccaggttggggctggcctacctgccacggggccagggctgggtgctttctgctgagtcactaacaaagctcaggcctgaccacaggacatttttgagattccagggctggttccacaacggccggcatcggccctgcggcatgtccggcttcaccctgcccagaatcacagcctcacagagtctagagggcccgtggggacgggagtcctgggaaccgaggttgggagacaatgggtggcccctcggtgtggtgtcctctgctcaccccttagcaggaccctgacggaactgggtacaggcagagattcatcttcatggcaggacttcaggcaagagaggccccggggttgaagacaaggggctcagagcttgctttttatacactttcaaattttctcagagtagaacaatttaaaaaaatataaaatatggttaaaaaattctcctacttaagactcccagacccctagttttcctccctaaaggcaactgacattaccagtttcctgggtatccatgcagggatattttatgcataaacaaccaaatctctatacatgtccatagagagaggcagacgtatctgcatgtgcataaacactcgtgtgtgtgtccttttatcccaaaggaaacacttctttttcccttgacaaaggacatcctctgcatctagcttctagaaagtgctgccaatttggggaccaagggagggaggctgcagaggaacatcgtttggtcaaatgtgaaatgtgatcaggaagccggtgctcagcaaacttatctgaagctcttggggaccccacaaagatgagcgggtccccttcccaattttcggaccgtcttggcagaggctccctgtcatcaaggacctgaggttgtcacagccggatggtgtgggagctggcactgccggggctcccgctgcctgggacacgtacggctgcccagtgatcctgagcgccgacccctgagcacctcagtgtccgtgactgtggagcggaggtacgtgcagaaccagctctgtcttcccagacactgtcgctttggtctaaagtgatgtaatgttgccacggaaattctaatccctcccatcaggcaaaaatacttcgatgggactgtgttctttcagcagagagggtgtgcatttgaagtatagatttgttaaacatagatgctgagaacatgactctgcttggcgttccatttaattgaccagaaacccgaaaaatgtcctggtcctcttcttaagtctgggggtagctgctgccccactatgcaccatcgcttatctgttcttttctgccccctgcagcagggaaggggctctggaagggtctgaatctggtgtgtccagtgtgatccctgcacccatgcccggagctgtgcctgggaccctgccccaagcaaagtaataatctgaatgatatcctcaaaggagcctggcttgggctaacaaggaagaacttccaacgtggagagctgtcctggcaccatttcttcctgctgtattagttgaagacctactgtgttcagggccgtgagccagggcacaaccaccccttgggagcacactctgcctcaaccctggagtggctccgaaatgagtcttcagtccacaagactgagggttgccaatccttctcggtgagccgtgagggtgattcctccttgggcttcaggggcaggatgccctcagaaagatgccctccactgcccccgcacacttcaggctccccatgaccctatgtggggaaggtgttgttgcaagaggcccatgggtgtgtgggggtagtggggcttgttggctgagcaagagctcaggcaatactgcccgggtggagattctgggactttgcacaagttgattcacctcaaccagcctcaatttccttgtctgtaaaatggcgcagtagtagtccttgtcttaccgggttgttatgcaacttaaataagaatatcgaggccaagcgcctagcccagtgcctgacatgtcgaaagtgcttggtgggtgccagtctttcccctcctcatcaagtcctgtggcagacaggccccccagcagagccggacctgccctgggagtcagggtaggaaagagatgaggacctcagcccgggactggctccccttcggccagcactgtgcaataggaagactatgtcagcctcacctataatttttaactttctaatggtcacattaaacaaaaaaaattggctgggtgtggtggctcacgcctataatcccagccctttgggaggccgaggcagatggatcacctgaggttaggagtttgagaccagcctggccaacatgacgaaacccctctctctactgaaaatacaaaaattaactgggtgtggtggcgcacgcctgtaattccagctacttgggaggctgaggcaggagaattgctggaacccgggaggcggaggttgcagtgagctgagatcacgccattgcactccagcctgggcaacaaagcgagactctgtttcaaaaaaaaaaaaattcaatttttaatttctgtgggtacatagcaagtggtggccacattttaaaaagtgaacaggacaggtgaaatacattttaataatatgttttatttaacccaatatatccaacatatgatgacaacatgcattcgccattgtgattattagtgaagtctttcacatcccctttttcctactaagtcttcaaaatctggggtgtattttgttcttccagggcatcttgaagcagaccagccacgttgcaagtgcttggaggccacggatgactggtggctgctgttctgggagacagaatcctatagcatccccagtcctgcagcacacaggtgggacaattccagcttgatgtctcagccagcgggttcccacgtcctccccgcctctcccaggcagaagacagagtgacccaggtaaccaggtatggacaggcgtatccctgggagaattttagcaggctgccccagcagcagggtgtgtctgtaacaccgtgccccctgcccctctcaaatccacacagtgggcagcttacacagggacagaaaccacactgactgtcgttcctgccacctgactattgtcctgtggcccagggctgcccagagccccttcctgcccaagtggcagctggcccgctggatctgcaggtgggtcttggggacacttctcatcagctcagccacgccgcccgggcagctcctcatgaaaggcctgccttgtgcgcctgggtgtgcccaggccgccgacgtcacccgaagccccttctcataaattccagctccgaggtttgcagttatcgggaggaagtttccaattgctggctcacatgtgggaaaatatgtaagcaagtgagaggcccttttgtctggggctcagagggggccagtaaccaggagggagggtggcctgtccccagtggcgggtgcagaggaagcggctgcgctcaggtttaatgaagtgccatgaatcatgaccacccatcaggcgcagatgctataaatcacctgtgacgggcttggcttgtttgttctttctgaagccaatacattgatcagggcagtggacacgtgagaaggctcactggaggctcagaccctcagcgacctgccgaggtgaaatcaaaccctcttcctttaacttgcaggaaaacaaggccataaaaaaggaactcctactaatgaaacctcctagattccaaggaggaaaacgtagctctcagaccaagtccgttttcgcccttgcatctgaaagggagtccggggaattgctaattttgaactttctatacacccttcctgcctctggatgtggccgcctgactcgaattcctttgcacaataaaatgagggggaaaaaaatcacatcacttcagcaaaacacaggctcgatttttcttgattagcggaaaagtgtgtgctatttaaaaagacacgtcatataactttttattttttagcattcccaagcaaaaaaaaaaaaaaaaggaggggagtgtgcattttgggaatatgagctcagctcagcacctaatttggaaagaccttgtgtttggtgatggacttggaaaaacaggcctgaatctgcattttaagaagatgagatgtgcagggtttcattccttcttctcctgggcttctctcagactccaaagagaagggccctctgcttctcaaagttcacaggacaaaggggcaccttggtccatggctgagaaactgagttgacccttagggaagggtgaccaggctccctggcaatctgccatccctagaggaccccatctgtacctgcctgctgctgtcacctggctgatgtcattcttttttggtgagggtggtcggcgatggaccctggactgcctcagggcggtctttggaagtggcctctgagtgcgtgtttagatgactccttgacaagcactggtttgcttgtcatcttcctcttcctccccagagtgagagcaggaaaccaggccttgtcaactgcaggcctgcactcctgcccctgggcggccccaacctgcacacgccgcctgcccgcccgccagtgccagggcgcccgctgcctgtcaggaaggccagggagcagatgcttgtgccgtgtgcatggtggccgagcctgtggttgggccacgggtgcagggatcctgtgtggcccctgccaggaccgtgggctctgcaggagggccagggccatagcatgggggaggcaaggggaaccttgtcatggtccctgtcctcagagacccctccagccagaccttccaaggtgggtggtgggcatcagggccttgcctggaagaagccactgccagccccctctatgggacctcagggacccgctgggctgcgagctgggaagggctcagctcagcctaggagggcagtgtgtttccaacttcgcaaggtcggctgagcacaggggttgaggagtcagtgtcctgcagggaaggtggcccttcctgcctggtcttggcccatgtcagctctagaatgtaggctggctgcagtgggggagtctggactagaggacacttttggggggcctcctgctatactctgcgtgggagaatacaggaaaagcccaggtctcagtaggccagtaccagccaggctcgccctgggctcccattggcgctctgtggagtgtgagggtctcaccccagactgggaggaaggggtgtgaggctgagaaggccagtgacatcctcggatgacctgggatgcagcagagctgagctggggccagatctcatttctccgcctcagtgcagcctgctaagcgtgttttctgtctgtggctgtctaggtacatggccagcaggcagggtcctgtcctcaagcccagtggctctgctggggtatagggctggccacaactcactcactcattcattcattcattcagtcagtcagtcagccaacgaccattgtgagcacccccctcctgccccccacctctgctgccagccacagcatcaacccttgaaagttgccacaaatactttccccggggcctggcttcaagtcgcattcagagcaaatcagagctcctcattttgggatcttgtcaggaaaatgaaggtgttgaaagctgctccccacagccctgacccagggcactggacatgggagcaggcgggggccgaggtctggcaagctctggaaccccatcccgccgtccttggcctccccatcctctcctctgcccctcagcttcctctcctggcccctctcccccggcttcccttccttgcagggcaaaaggagcaattgcctctctgtgcgtttctatttctgcaccttccgcttcctggctggtggccggctggctgcttcagaaagttctggaatccgcaaggccagctggtcctgggtcaggatgtgggggcctcagatttccttctccccaacagctccacaggcgccccaggggccgggcgcccaagggtgtcggggaaggctgtcaccaagtgaagggattggggagcaagtgtgtgaggggcaggcagatcagctttgtcatggtgactgaccagtgcctgcactggcaggcaggtagagggcctgctgctggttccacggacacgcgttgtgcacctactgcacaccaggccctgttctaggctctggaaatgcagtgacgaacaaatacacatactagactttattttgtcctttgcaatagcccgcaaggtaagcacctttactatcaatttttcagacaagaaaacgagttttaagtgatttgcccaaatctacatagttagcaaaccactcagaattcaaacacaggcagtgggcttgaggctgtgcccttgctcatcctcttcaataagtggatggttgtgtgtgtacctgtgagagagaggtggagaacagggggctccaggtatagtcactagaagtctaaattgttgtatactgtattagtctgttctcacgctgctaataaagacaatacctgatactgggtaatttataaaggaaggaggtttaatggactcacagttgcacgtggctgcagaggcctcaccatcatggtggaaggcaaggaggagcaaaagcacatcttacatggcagcagacaagagagtgcgtgcagggaaactcccactcccctttataaaatcattggatcttgtgagatttactcactatcacaaaaacagcacaggaaagacctgcctccatgattcgattgcctcccaccaggtacctcccatgacacatgggaattatgggagctacaattcaagatgagatttgggtagggacacagccaaacgaaaccataccaaacacattttttttttttttttttgagatggagtctttctgtcacccaggctggagtacagtggtgacatctcggctcactgcagcctccgcctcctaggttcaagcgattctcctgcctcagcctccttagtagctgggattacagatgcccaccaccatgcccagctaatttttgtattttttagtagagacggggttttgccaggttggccaggctggtcttgaactcttgacctcaggtgatctacctgcctcggcctcccaaagtgctggaattacaggtttgagctgccacgcccggcccaaacacatttttaaaaaatatctcagtgttccagtgtctggttgtgaatcctcacatcacctctgggcctgccttagggccgaggtaagagcatgcaggtattgggaaatctgacttggagtcacacactccctctctgggcctcatgctgtctctgtggaaggagctgctggtctctactgggcaggggtgaggccagtagagtggtgcaatgggtacgaccaagctggcaacccatgccatgtgtgcaggggagaacacggccatcaccacccaacactacttggagggctagaggtgaccccgtgggcagctgcccatgcctagagacacatggagatatacattggctgcttaaaaaatgggattgttctagacctgctttcctgaaacctgttttgctcacagattggtacagcgaggtcatctttgcatgtcaataaaaacagaaagcagggcataatctccattgcctggcagcatcccctgcatggttgcatcatcattttagggaccattctcatgttgatggacgtgagtgctgttcccagttctcctcttatcagcgactctgtacggagccaccttggacacgtgtcctttaacacgcatgcgaatagcgctgtgggctaagttcctggagggaggatttctggattaaagggtttgcaaattttacacgttgattcctatgggaggtgcctctgtgtttctgaggaaagcaagaggatgggcccttaacattgcacacagggttattgatgagttcggggagtgccttcttctttatattaaaaatcttttttctttactacacttcagtgtaggaaatccaggaagtacagcaaagtactcgttcattcattcagtcattcattcagtcagccaactattttttttttttttttttttttgagatggagtcttgctctgtcacccaggctggagtgcagtggcgagatctcggctcactgcaagctccacctcctgggttcatgccattctcctgcctcagcctcccgagtagagtagctgggactacaggcgcctgccaccacgcccagctaattttttgtattttagtagagacggggtttcaccgtgttagccaggatggtctcaatctcctgacctcgtgatccgcccacctcagcctcccaaagtgctgggattacaggcgtgagccaccgcgcccggccccaactgctattaatgagcaccgccttgcgctccccagctctgctgccagccagaggatcatttaaaaattgaaatggcctgttactccacacagaggtaacctattaatctatctgtctatctcgtatgatatttggttcgttaaatgtcttatcataagcccagccctgtgttgttaaatagccttcaaaaagataataataacaagacctttggccgggtgcagtgtctcacgcctttaatcccagcactttgggaggccgaggcaggaggactacttgagtccaggagttcaagaccagtctgggcaacacagcaagtccccatctctacaaaaaataaaaataaattagctgagtgtggtggtgcgctcctgtagtcccagctacatgggaggctgaggttggaggatcgcttggctcagaaggtggaggctgcagcgagctttgagtgccactgcactcagcctgggtgacagagcaagaatctgtctcaaaagaaagaaacaaacaaacaaaaagaaaaagttcaccatagctcatgcttattgtagaaaacttgaaaaatttggagcattggaaactgctcagtgtctgtgtttacaggctggtatgcttcactgtggtatatttgttatgcgtatgcagacgtttcattttatgtaatcagtatcatattgcggtaccagttttgtctcctgcatttcacttaacagaccgtgattatttccccatagtgttaagtcatttttgaaacatgatttttaatggctgaataatgttttatagagcagatgtttcatcaatgacctgtttttgctgtttccagcttttacgcattacaggaagtgctgtgatgttcctacttgcacacaggtctttgcacacatgcagaagggttttttagagtcattcttagaagttagatatgaagtctagctgcatagtgccaaactgtcctccagaaagctggtagcaattatattcccaccaacgttgtaagagaatacggccatcaacactgctgagtaaggatattttgtctataatggctgcaaatcacatttctttgcttactagtgagaacaaacacctttttaaaaataggattatcaaccatttgtattttgctcatgaaattcctatgtagcttttagtcagtcatctagtggtcattggtcttgttgatttttaagcgctttttatatataacaatatattaatcttttgttttctgcgttgtggtattttagcagtgtcttttgagtaatcagtttggtttttttcttaatatagagacttttatttcatgatcaaatgtcttgaacttctttttggtcactattattttgttcttttttttttgacagtcttgctctgtcgccaggctggagtacagtgacatgatctcggctcactgcaacctctgcctcccaggttcaagggattctcctgcctcagcctcctgagtagctgggactacaggtgcccacgaccacacctggctaatttttgtattttgagtagagacagggcttcaccatgttggccaggatggtcttgatcttattttgttcttttttaagttcagaaagatctttcttaactagagcttggttaactgtgcatttctgtttctgcagctggggcccagcagcacctcagctggaatgtggcgtttttcgttgcagggagaagtggtgaacctgcggccctcaggcttgtacctgcttcactgggggaggcttcggtgagggggtatctgggggacagaaatggcctgtagggtgatcccaccctagaatgttcagcaaagcctacagaaagggggtgctctgctctctctctgcagaaggtggcccagctcagcagacactgtgtggatgtcacagcccagtagttcagaggaccctggaccaccacctagacagagaaggccacagccttggcaatgtccagacccttcctcctctgatcccacaggtgtggcgtcacccagacaggaggctgcagctgtagagtcagacagccccctttctgcactggcaggagacgcccaggactggagcctttggcgggggtgggagggctgatggcgggtgtgatggggtgggagggtgacgggacagtataccttaggtgtgcatgctcctgtggtctcattcctatctgtaaatgggtccccccatttgtcctagcttttacatgaggacacacatttgtcctagcttttatatggttctatattttccaactactcatgtgtccctgggtttgctcattcattcattcattcattcattcattcattcccagtgccaagactgaggattcagcagtggatgagcttgatagtgaaagaagaatcaaccaaccatgggaggatgagataagctcagcagcggggagggcatgaagccaggcaggggacagagctgggtggggcaggatgtgggacattttagacgtgggaaggagagtggggaggggaagtctcgttcaagcagagacacttgagacacttgaggagggtctggttgaagcacacagtggttgcggatcagtgttccaggcgaggggcagggaggtgctctgtgggcagaggccccaggaattcattctggaatcagtgatgagactgggacttcgctttaacggatcccggacccctaattagaccgtcccatcttccctaaggattaaaatgccaccttcgcaacacgctaaattagtgtgtgcctagcaggtgccgttgcgggcattttgtcaggtccctgtgagtccccacctaaggtgctatggtgggagggagtgatagccaaggagaggcagggaggggctcagggttatgtgaggaggggtctttggactccagagttccccatcttacaagttaaatgtctggaaatacatggcttttggccccaccaagaaagccaatgatactgtaatgcccagttcttgcatttggagtggtttgaacgattatgtagtaactcctgagaagaacaagcattttacttcccccaccatcccaaagattcacaggtctgtcctccttgggacagtggagagacagtggattcctgcctgaataagcccttctcaccccacatgactatgacgctttgtaaaggggcattgcagaaggatgtgctgggggtggcagagaatcctgtggagctctaagcagggcttcctcaggaagagagtccctctcctgcccctccataaggtgggtatccccaggaatggggccccactctccatcttggaaatagaacacaggtgtgaggaaggccagggccccccaaccccctcattggggcagataggggtccagatgaggcaggttcaaccccaggtcatcaacaagtactagcagagatgcctggagctggcgggaggacagaaatggaaactgctcatggaagccctgggcaggcgtgggatgggaataactttcacctggctcagttcaggggagaactgtgttttcagtatagttagtgggtaatgaccaagttatttatctccagaataagggtaggacacaaatagctaaaattagaaagtggagacaatactaccaaccttacagggatgaaaggatgataagataataaatactatggacaactgagcaccaacaaattagataacctagaagaaatggacaaattcctagaaacacacaagttacctaacctgactcaagaagaaatagcaatctaataggcctacaattagtaagaagcatgaatcattaatcaaaagcctcccaacaaagaaagccctggacctgatggcttcaggagtgaattctaccaaacatttaaagaagaattaataccaattcttctcaaactcttccaggaaagtgcagaagacagaacatttcttaactcgttccatgaggtcagcgttactctcacgccaaagccggacaaggacatcataagaaaagaaaactacagaccaataccactcaggaatacaaatgcaaaaatcctcaacaaaatattaactaaccaaattctataacgtattaaaaagattattcaccatggccaagtgggagttatctcaagaaagcaaggtgattcagcacaagaaaatcaaccagtataattgatcattaggagaatgaaggggctgagcacagtggctcacacctgtaatcccaacactttggaaggccaagatgagaggattgcttgaagccaggatttcaagaccggtctggaaaaaatagcgagacctcatctctacagttttgttttctttttaattagccaggcttggtggtgtgtgcctgtaatcccaacaacttgggaagctgagatgaggggatcactcgggcttaagagtttgagactgcagtgagctctgattgtgccaccgcactccagcctggatgacagagtgagatcctaagtccaataaataaaaaaataatagaatgaagggaaaataaaaaccccacatgatcatcacagttgatgtggaagaggcatttgaaaacactcagcaccttttatgataaaaatctaagtgaactaggaataaagggaaaacttctcaatgtgataaagggtatttatggaaaatctatagctaacatcatattcaatggtgaaggggtgaaagctttcccactgagatcaggaacaagctaaagatatcccctttgccatttctatttaacattgtactggcagttctagccagagccattcagcaagaaaaagtaataacaggcatccaaattgggaaggaagaggtaaaactatccatattcacagatgacatcccctcccctcccctcacctcccctttgcttccttcattaattatagagacagggtcttgctctgttacccaggctggagtgttgtggcacaatcatatctcattggagcctcaaagtcctgggctgaagcgatcctcccacctcagccttccaagcagctgggactaaaggtgtgttccacaatacttggttatttaaaaaaaaagtatagagctaaggtctcactatgttgaccagggtggtctcaaactcctaggctcaagcaatcctcctgccttggcctcccaaagtattgggattatagctgtgagacactgcacctggcctcataatcttttataaagaaaattccaaagaatacacaagaaagtgactaggctaataaatgaattcatcaaagctgcatggcaaaacatcagcacacaaaagtctgttgcgtttctatacaccagcaatgaataatctgaaaagaaaattaagaaagcaattccatatataatagcatttaaaataattaaatacttaggaaaatacctagccaaagaaatgaaagactttcatgctaaaaactacaaaacactgctgaacagaatgaaaggatatctaaataaatgaaaagacatcccatgttcacagatagaaagatttaacattgttaagatgtcaatactatccaaaatgttctatagatacaacataattcctatcaaaattccaagagcctttttcacagaaatggaaaatccaatcttgaaatgtgtataaattgcaaggtgccccaaactgtcaaaattactttgaaaaagaataaagttggagaacacacatttcccaacttcaaaaaaattactagaaagttacattaattaagagtatggtactagcataagaacagacatatagactgatgaaatagaatagatagctcagaaatgaaccctcacatatatgatcaattgatttttgacaagagtaccaagaccactcaaatggggaaagaataggtttttcaataaatggtgttgggaaaactggctattcacatacagaagaatgaaattggacttttaccttgcactatatacaaaagttaactaggatcaaagacctaaactgaagagctaaaaccatacaactcttagttagaaaacactggaaaaatctttttaacactggattttataacaacttcataggtatgacatcaaaagcacaaacaacgaaagaaatgagatagataaattggaattcatcaaaattaagattttttttgcatcaaaggacattatttaaaacgtgaaaaaggctcggtgtagggctcacatctgtaactccaatactttgagaggctgaagcaggaggattgcttgatgccaggagtttgagaacagcctgggcaatgtagtgagaccctaactctacaaaaaaaattagcaaattagccaggtgtggtggagtgcactggtagtcccagctactcaggagcctgaggtaggaggattgcttgaacccagaggtttgaggctgcagtgagctatgatcacaccactgcactgcagcctgggtgacagagagagatgctatctctaaaaacaaaatgaagcaaaaaaatgacacacactgtgaaaagacaatctacagaatggaagaaaatgtttgcaaattgtatatctgagaagagattaatatccagaatacataaacaacccctacaactcaacaacaataaaaaccaacaatgcaattcaaaatgggcaaaggacacaaagagacatttctttaaagaagatggccgggcgcggtggctcaagcctgtaatcccagcactttgggaggctgagatgggcagatcacaaggccaggagatcaagaccatcctggctaacacggtgaaaccctgtctccactaaaaatacaaaaaattagctgggcgtggtggtgggcgcctgtagtcccagctactcaggaagctgaggcaggagaatggcgtgaacccgggaggcggagcttgcagtgaaccgagatggcgccactgcattctaggctgggcgacagagcgagactccatctcaaaaaaaaaaaaaaaaaaaaaaaagaagatatacaaatagccaacaggcataggaaaagtcattagggaaattcaaatcaaaaccacaatgagataccacctcatgcttactagggtggctattacttgaaggaaaaaaaaaggaaaatagcaaatgttggtgagggtgtggagaaactggaagctttgtgcagtttggtggttcctcaaaaacttagacatagaactaaatatgacccagcaatttcatgcctagatacgtactcaaaagaactgaaagcacaccagtgttcacagtaacattattcagagccaaaaggtgggatcgacctaagtgttcatcaacagatgaatggataaacaaagtataatacatccagacaatggaatattattcaactatgaaaactatgaaaatacatgaaattttgatacatgctgcaacatgaatggacctgaaaaacattatggcaacagtctttgggaggctaaggcgggtgaatcacctgaggtcaggggtttgagaccagcccggccaacaccgtaaaaccccgtttctactaaaaatacaaaaattagccaggcttggtggagcacacctgtagtcccagctactcgggaggctgaggtaggaggatcacttgaacccaggaagcagaagttgtcgtgagccgagatcacgccactgcactccagcctgggcaacagagtgagactccttcttaaaaaaaataaaaattatatatatatatatatatatatatataaagtgaaataagccaaatacagaaggacaaataccatatgactccacaaatatgaggtgcctgtgataggcaaattcataaacagaaagtagaatacaggttactagggctggaggagcgggagaggaagattattgttttatgggtacagagtttccttttgggaagatgaaaactttctgaagattgatgatggtaatgatcatacaacactgtgaatgtatttaatgacactgaattgtacactcacaaatgattaaaataataaatatgattttatgtgtattttaccacaataaaaagtagaagtaaatctgttacaggaatggattgttcccccaaaataataataataatgaaaggaggctgttggttcaagctcctccctcccgccttctgcttcaagcatgtgcctgcaacagccaaaggttataaactggtgggtttgaagcaatgtctcagcacaagacatgaaatgtaccacctgtgctggtgctctccttgtgataataatggttattagcagagaagctgggcagggttggacgcagggccatctggacccctgagctctgctgccctggctgggaaatttagggtcctcactatgtgacaaggacctcttagcaggaagcacagactaagtggaggtcattgcacctgggcttgtgggggggcctcggatgttcacagcccctacaggggagcacacagctgaagcttgacagggagccacggatggcttctctttggaaagttctgcataccagaaagttcttctcctacttccccaagtcagtctccctgcatctccctgaccccaccagctccaactgtggggcctgttctcctccatggagttgtgaagacaaaagtgaatgtcctttcatgggactcacctccagatgctcaaagacagtatgacatcccccaagaggcctcgtccccagaccatccaccccgaattcctccaaatcttcctcatagctcctgttctgctatttttatagcacatgctttattgaagggcatgactcacagacagaaaagtacacaaatcgaagtttacagcttgagacagaggttgaccagaatcctccccagaagcccagcatcctttccagtcatcgcaccctgcaagggagccaccagcctggcttctgtcgccacagatgagttttgcctgttttgaactcgacttaatgtgatcatgcagaatgtgctcttttgtgcctagcttctttcactgaacatggtatcagtgagattcatctatgacgttatgtgtaacatagtccattcatcatcattgatcagattcatcatcatatgaagataccaccatttatccattccactactgatgggctttttatgttaagaacattctcatatatgtcttttgggacacatatatgtgtgtttcttgcgtgtttaccgaggggtgaagtagctgagacatagggtaggtgaattagtctgttttcacgctgctgataaagatatacctgagactgggcaatttacaaaagaaagaggtttaatggactcacagttctacctggctggggaagcctcacaatcatggtggaagatgaaaggcacatctcacatggcagcagacaagagaagagaacttgtgtagggaaactcccctttataaaaccatcaaatctggtgagacttatttactatcatgagcatagcacaggaaagacccatccccatgattcaattacctcccattgggtccttctcacaacatgtgggaattgtgggagctacaactgaagatgagatttaggtagggacacagccaaaccacatcattaggcatgttgcagctttgtagagaccaccaaacctttctctactgtgggagcgccacttactctcgccagctgaatgtgagcattccagttgctccatattgtctccaacacttggtttagttggcctttgtcagtatagtccttctggtggaagtagcatggggtttctgaatgtccttgctatgctagccccacaacaagacccagctatctttgctcctctcagcacagagctatgggagggctctcaagtctttaacctggtgtctcatcttctgttactgtaatctcccattccacaccacctctttggcagacacatgacattgttggttcattttgagcttactgttgactgaaactctaaggtcagagccatcctctgccatgcctggcttcctcttccccactgttctcatgtggagggttcttggagtcatggcagttcaagtcccagagcctagggacctcacagccaggtagctctgcagtccccatggcctggacggcatccactctgtgtgagaagatggggctcagcgttcagcttctgctgccacagggagacctcaggcaaggccctctgccttctaggcttgggtctctgcctttccagtcaaggtgataaattcacctgcccagactgttgctgggagacttatcagggtctctggatgctggtgaaaccccagccccagccagtttccaggttattgacaccatcacaagaaagaatttagagacaagtcaggtgaagcgaaaggcaaggagcttttattgcaaatccaaagtacacactcaagagggaagcacagtgtactcatgagaagtttgagtttctaattttgtggacgtttctttaattaaagggtggaatcatcaggtgttctggaaaaagaggggatttcagggacgccccctggttactgccctctttctctctaatttgggtttgcctggaagagtcctggatatatcaccctgaccgctgtggctcaggccgttttctctcccttattttgggttttctgttatcttgtggtttcttcgcctagttcctgtttcagctttttgggtttttctatcctcctgccaacacctcctgctatctcactttctgtctcacaacaggaggtcctggaagtggacctactttatctactgcaaaaggcctcaagagtggatttttgctgtccctcttagagccctcactggcattctcttggcaggtgggaatcgggtgggattcccagtggacaggccatgcccctttggctgtgggcatgtgtgtcacctgctcctccccctcccttgtcccttcccctccagccctgcctctccgcattccgggctctgacttacttggtttttgtgtttccagtgtcatctctccttctcgcatcctgtctctgtttctgtctcactctcggtctctctctgaatctctcttttctctgacttggcaggtctgaggtgcccgctgcctgctgaggctccctcctctggatgaaggctcctaggaagttcatgttaccctgacacggagctcatccctgatcccaaccacagggcctggcacctgctccgagggccaacagcctcccaggcgcctgtgccagcagggaacacctgcagcttctgcttggcagcctccaggaaaatggggtgcaagcaaggccaggacagaggcaagacaggtcgcttcactcagtccctgccacctctgaggggactctaccctcaaaggagccacgtagagtgccaggcctggaggacacagcacctcaccttgtgtggaaatgcagcatgggaaggaccgcagtcatgaccgtgggaattgccggcattttccacgactttgctttctcctaggccctgtgctgaacacatttcacgtgtgactcaggggatcttccaggcaacactgcgagtgacttgtcacaaacaaggaaacggcggcatggggtgctgctggctcaggatggggcaggcctggaacctgagcacgctgtcgggccctggacccctcaccatcctgcagtgccaggagagggcaggggcggcccccagggagggcacccacccagcctgagaaccggtgggggtgggcaggaggagagggagttgttcccgctataacccaaaggatcacggggaagcagccacaggaagggaagggtcagggtgggggaaagaggcaaagatctggaggcgaagagggttttggctcctggggaactgaaggaagcatagtgcagtttgaggacccactaggcagggctctggggtggggtggggtgtgggcagctgcatcatgcatgctcctgtctcagagaaggcagtggcatttctggtccttttcttgctacatggggtgagctactgaccatgttacacagatctagaattttctccagtttgggggtttctctcagaatgataataaggcaaattcctcttgtactccccagatggacctgttcttcctaccatcccttctctgcctcagggagcccagtgggtacagacctccctggaactgcctccaactcacccacccatccacccgtttatccacccactcacccatccagccatcttcctacctatgatggttaactgtatgtgtcaacttgattgggccacagggtgcccagatattgggtcaaatgattctgggtgtgtctgtgagggtgtttctggatgtgattagcacaacgatgtgtagatggaataagcagtgtgcccccctacccccactcccagggatgggcctcaccccatccatccagggcctgtagagaacacaggggcccaccctcccccaggccagtggggattctcctgcctccctgagctgggccactggtcttttcctgccttcagattcaaactaaaccgtgggctcctcctgggtttagagcccaccagcctctggactggaaccacaccacaggccctcctgggcctccagcttcctgatggcagagcctggaactcaccggcctccatcactgtgtgagccagttcttcaatataaatctcctctatatacacacaccctattgattctgtttctctggaaaaccctgactaatgtccctccacattctagtgcctcctgtgtcccctccgtatgctgggtcctgtgcaccacatggggactctggtgagaacagggcgtttcctcaaacacacgcaccactcatgtggaagcacacacagatattctcacatgcccagacacaaaagcacacagactcgcccaggcacccacacccacacacagagtgtctgtgcaagtacacacgtgcacacatgtatgttcccagatatccacagagagacctgtgccctgacaggtgcctgggcatgttagctcaggtgcacaccaaactgtagctgcaggccacacgaggcacacgccctgcaaacacaggcccatgccccagtgcacacgggcaaagacgtgtgtgctcccatgtgggtgtgcatgctcatcaactcacacgggtgcccttgaccaactcacacagcacacaggctgactcacagacacgcaatacccctacacacacatgcacacatgcacacgcatgcacacgcacgtcggcccacagtcatccacgatggtgagtattttccacgttccttgttgctaaccgaggtcaccagttgggacttgctaaattgctgctgcagaaaaagagccgtcagcagtttctggctcaggctgccttgcgggggtgccctctggctcctcggctgcctggtaaccaaaacccaggcccggcctcaggaatgctggcagcaggagggagggggagagtgcatttaccccgtcatttaaacatctcagtgtggtacacagcacagctcggtgctgcccgtgcccagcctgctgtgggcacgtgaggggtggggtggctggcgtggctgctggtgcccagggatcccggagtcagcatttgccccgggcccccccacatcctgctgcccagagcccccttcctggtccccactgtggcctctgtcttgctcaccacacccaccccacaccctacgccctactgagcccccccgatgtggaccccctcgctcttcatgtcccttctctggccacccccacacaagcatgcttctgggggctctgcaggcccccggtggtcttgcacccacagctgggctgaggacagcgccccagctgctccgctctctaggcttcccagactccacagggccctcagcctcggctgtcctcagggcgctgcctccttcctcctgtcctcgtcgcttcctcctcttcctcctcccccatccctttcataatgagtttgctgtttctgtcactcgcatgtccttctaagtcaggcctagcaatggggttggtttccagatgaaaccaactggacatgctggcttcctgagagggagccctgaggagggatcctaggggggaatcctgagggagggggtcctgaggaggaatcctgaggagggatcctgaggagggaatcattaggagagattctgaggagggatcctgaagagggatcccgaggagggaatcctgaggaatcttgaagagggatcctgagtggggatcctgaggaggaatcttgaagaggggattctgaggagggatcctgaggagaaatcttgaggaggggattctgaggagggatcctgaggaggaatcttgaggaggagattctgaggagggaccttaaggagggatcctaaggagggaatcctgagaagggatcctgaggagggatcctgaggagggatcttgagagggatcttgaggagggaattctgaggagggattccaaggcaaccacatcacaatgactggggagtgagggttttacggccattcttacccccagatgacaggtcagactgtggtcagagggatgtctaagccactaaatgtgactgtatcaatttaataccctgcaagatctccccattgtctggactttaggacacagctcatcaccaatgtctacattttcctgcttggtcacactcatctctccccactaatactggtccttctggcagtttatggaatgaaccacattctttctgaccacagggcctttgcacaggcagtctgtgaattccctcctcctcctgactgggggcatggggctgtgtccatgcagacaggtgggcgctgttctagctcaggctgctgtgacaaagcaccacagacgagtgcctaaatagcaggcatttatgttctcacagtcctggaggctggaaggccatcatcaaggtttcacagggctggttcctcctgaggcctctctccgtggcttgtagacactgccttctccctgtgtcttcacatggtcatccctctgtgtgtgtctgtgtcctcatctccttttattaaaaggacacagtcatatgggattagggcccaccctaatgacttcactttaacttgattacctctttaaagaccctagctccaaatgctgagatactgggggttaagagctcaatgtgtgaatttcagagggatacaattcagcccatcacaggcagcttttaaaaattcacccaaatgttccatgtgagtgagcaagggctctagatgccacctcattcttgttccaatatcttctctgaccccagcctccttcgttcaacccctcaagcactctgtccaagctcactggtggcccaggacactctaactcagctggtagtgtttgatcccccgagagtgggagctgcaggagcaggcattgtgtctcactcatctgctgaccactgggaggaagaaggctgtgccctggccagtgctgtgctgctctgctgctctgtgctgggctgtggaggcaaccacgcttctgccctgccctcctaaggcccatggtccagccagggggatgaatggatgtcacagcatgaattgttggaccctttaacaaaggcctacagcatggggtttccagaggggttgggggatggcttcttgggggtgggattctctgggtggatccagtcctggtggctacaggaaggggtgggccacatttgtctggcatcctgcctacagtaggcaccggtttccaccacccagtgtccactgttgtctttggatcacagcacctgaatgaatccctttttggccctgaagccaccagcactaggcatggcctgggcagaggtcaccactcgtgtgcccagcttctaaaagccaagggtggtcattgccctgggcagggttctttggacataaaaacagaggtggatggcggcaaggacagaaaacagaaacggcttcagccagcccattccgtcagtgacttctggtgggacagctgtcattcacaaacctgggaggactgggtgtgcccttggaggctggtgaacagggggggcccacaaatggataaagggcctgtgctgcttgcactagggtgggtcagttggcctggaaaacagaagggcagctgcctccttctctagactggctctgtggtcatctttcacctgagggcgtctgtttaaaagaaaatcctcagaacaagatgtcgagatcagccggtagctctcttgtcctccattggcccaagctccctgggggcaggccagagtttctgggcctctgcatttctgacatttggggctgggccattcttggggtggggctgtcctcggccctgtaggatgtgtagccgcagccccggcctctgcctgcaggatgctcatagcactcctcccctctccagagttgttacagccaaaaatgtctccaggcactgccacgtggcccctgggggcaccatcaccccctgctgagaccctctaatctagcctcagtaccttgtactgttaactggacactgtgaggggccacagggccacgggtctgaggtggaggcaggcgtgtccatgtgtgtctggggtttctgcaaggggaatgctggttccagccggtttcttcaggggagttacggctgtgcctctggtcatctcttggctttcaagaatgagttttctgggcttttccttctgggcttccctggaggatagaggtgcccactcatgaagcctgtgcctcgagacttagggataagggggctctgcttggttggggaagggtggtggactgcagggcctcaagcttggaggaaggaccgggggtccctgagcaatatcacagaagctttaggagccagcaggcccagccaggggatgctggacaagtgcgggaaagctccccaggaatcctgggtcccatctgtggggtctctggctgcctccatcctgggcttcatcccaggacctggccccgatctggatggttctgtcactgagggcagggttctcatcacctggagccctgctgtctgcagcaagagggaggggcctgggaccctcttgctgtcagtggtagaggctagaagaggtagctcaaggactcccacccttctcccctgcccacacacgaactctggccgactgccctctcccgactcagccagctgccaccagccactgcattctctggttcctttactccagcccatctctgccagcagcacctcgcctttgttcctctctgtcaagaagacaaagatccaaggcaaggcgcggtggctcacgcctgtgatcccagcactttgggagaccgagaggagaggatccattgcctgagcccaggagttcaagaccagcctgagcaacacagcgagaccccacctctgcagaaaataaaaaaattagccaggcatgatggtacatgcctggggactcagctacttgggaggctgaggggtgaggatcgcttgagcctgggctcaaggctgcagtgagctgtgattgcgccactgcacaccagcctgggtgacagagcaaagcctccactcaaaataggaagaaagaaaaaagacaaagatttcttccccgtggtgtttctagtctagagggggagccaggcagccaggaaccagggcaccgacaaagcagatgtgtgatgatgaattaaaccaccgcccacgcccaccactggcttttccaggctgcccgcagaaaacatccctcttaggggtccagcgacctggacctaaatccagccctgtccctgcgtggccccgtgatcatggcaggtttctgttccttgtgtctcttacttggcagaggcccgagacccacactgctctgctcctgtccccacggcggggggacctgggagggaattagcaggattctgcttccacgccagctcccagggtccgctgctctgtggaggcgcaaagtctttatctggtgcaagaagccacaggacccaggcagagccctgggggactgtgctgtttcccacagtgttcctccccatccccgctgccctccccggccctctgggggatgggagcagaagcctctgtctttcccaggcccaaggaagggcagaggccgtgggcgggccctgcagtgtggatggcctgccagcctctccttcccgatggctggggtcagtgcgggaggatgagccgggagcagcagccctggagaatcggccaggtcacccaggttggcaaatccccgtagctcccactgccacccccaagtccagcttccttcatggtccagacgctccggccccaccagctccttcccctctttcagatcttctagtgggccatgctccgggctaccccagggcctttgcatgggtttttttggcaccaggcaggactctcatctgcctcccgcttttgcctcccatccttcccttcaggccactccctgccttggatcagaccacagcctcgcctgccggcccacccctcttcagagcaggttgtaacgttacctcctgccatcatgaagccacctccagccctcccagcagccggcttccgagggagataaggacgacagctgccccacctagcattggccccaggggtgctcagtgatgatgggggaggcacccttgaggcccactggggatcggtgcagaagatgggagtccgattctgcccttccacagagctttcccaccctgggataccttgtccttgcctgtacccctgccctcctgggagtcaccttactgcaggttagtacttggggccccaacaccagccatgactccactgtggatttgatcagcagcctggggccagctgcccaccctgctgtggacacagggtccctgtcacctccaggggtgtctggagtctggggacatattagccttgaagggattagtgtctggcgtggacgacgacgtctcccactgcactgctgcaccacaggcccttgccagggcatggtagagctgggctgtgttgggatccctactgaggggcacgtgtccatctgtctcccatagctgggtcccgacagcacggagcgggcctctggaacctactaggcacagagccagggtgaggcgctcgctgccgggacacacaggaggcccggtgacaccagaacagccatcacaaacggtggaaacaccagccaggcagtgatgggctaaccaggccagtgcttcccaggcctcatctcaccttaccatgcccagtgcaggaagagaggcacagagagggggagcaacctgcccagggctgcacagcacatgacggggactgtgctgtgtgaccctggtttctcctggtcccacgagccagtgtcacccacaccacatgctggtgttccaccggccaccttccttcctctccatgttcccaccagaatcaactgattttttaaaaaattcagtacaatgttcatatagtaaaacagccagatcttacgtgaccactcaatgacctcttccacttgtctacacctacatcacccacactcccagctcaagaaacggaactacttcatccaccctacaagttctctcagtcgccagcatactcaatacgtctcattgccatagacgagttttgcccgttttgaactttgtatgaatagactcacatggtgcgttctctgtctggcttcttttgctcagcgcagtgttttcgggactcaccaatgtcgcatctgtggtttgtcctttttccctgctgagtgatgttctgctgtgtggatctaccgctgttgcctactggtgggcgggtgggtgagtccaatttgaggaatatagacgctgtgaacccccatgtgcacggagcttccgtgtggaaggacgtctgtactcatttctcctgtgcagataccctggagtgggcttgctgggccataggattgacaaaggcttagctttataagaaactatgattcgaatgccctttaacaattactatggaaaattgcaaacatttacgaaaggaggagagtggagtgaactgtggaaaccaactccaatccctggaggcgttttgtctgcaaatttcaatacgtatggcaggactgacttccacagaatgagcctttggggacaggctgcctccaggggtggctggtggagcccctcagcccagaggagcccccaatacttcctacaccccacagacaccagccttggccactgtcttccttgagttgagggatcagtggaggtacccgtccaccctggaacatcccaagagggggccagtgttctggggggactggatatggggccagacgggctgggatgcagagctcccccccctctgcctcctcccctgtggtccaggaggcctggacctgccttgggatccctgcccggatcctgggtcctgctcctccacccttgccagttttctcacttgctggtctaggaaggccagtttccaggcaatccactggggccccgccgtgcgggggaacgtgggtgtgtgtgtccaatgcacagttgaggctggccactgtcccaagctccccaaaagactcacccccctctgccccagctggattcctccccagcctccccaccagcctgggcatatcccaaatcccagcttctactccagccctggggcttctggatacacctggctgcccatgggtgtttgcagcccttcaaaatcagtgtagtgaggaacccaggaggcgcctgcaaaggccactcccctaaggacatcgttttcactcaatctcccctccaaaggcatcggtgtgagttttgcagattaataagcagggctgctgcgctgagtgcgtggagccgccatcaccatgctttgtgggccccccgaccccggcggccgagcaggaccctggctccccaaaacaatgcccgcccggcctgggtggcactgtgcgatcccacttgaaaaggcctttcgccggggctgccttttaagagggggacaattggcaagaggcctggcgcttattcatgcagaacagcagtgaaaagtgctcgcagccagtgtcaggggtgggcagtgcccagcacaaggggcccgtggggtggcgggacgtcagtcgctaggagacgggcccgccaggcatctccccagggcccctctggctccctcagtagggctatcctagccgcgctcagtccctgtatctgtcagcccctgagccttttcctcagctcgcccgggtgtgctgggagacatgggcagccatgcaccctctctgagcctccatcatccaggggcagtttgggatattcccagcatcctttgctgttctaacctgctccatccctcatatcactctctgcctcccacatgtctggacctcgccagccccgtcaaactttgaccttgtcccccaaactcctcgttttctctgcgaacctcccctgcctccgaaacccagggcagctgccgtccaacgatcggttccctgtttgtttccatcacgcactccaccttccactcctgtctgcctttgcagcaggatacccctgaccccgaaaccctgggcagctgctgtccaacgatcagttccctgtttgtttccatcacgcactccaccttccactcctgtctgcctttgcagcaggatccccctgccgccctaacacagaaggaggtggacgggcagaaagggaaggggcaaccctggggtctggtggtgcctaggcagctctccagacaggatctgggtctttgaggtaggatcgtgctgttgagttactagaataatctctgcccacacatggccacaacccaatgcccgggccgctggctccttcttccttccccaaaggtcttcacaaatccacattccatcccctctggggatttagctctgcggtgagaacccaggaggccccctgagtcctgggccagaacacttctcagtgcaccttggatggggccaccctcccctctctgtccaaggtcttggttttgtttgcttatctgctgcaagcaccactcccctgtcgcaccccatcctacccctcctcagcaccctcccatacccgcgttccccatcccttcttacctctccctcctcctcctcctctccctcccctcctgtcactgtctgacccttcaccttcatgccagtcttcccctccaggctgctttgccctctggtccctatgtgctgagggggatgtggaggtgaaggggctcaacatgagccctcttcccagctacccctagactcagcagggaagcgtccgttgcccacactgaagaggaacagaaagaagcaaagtttcccagggcccagggctgcaggacagcccagagcggaagccaagtcacctgagtgattccatttatccgtgatggagggagatgctggtggccagggctcacaggccttgaaaccctgagcctgagaggccagccccagctctgccatggctctctgtgtggcgctggcaaatgctttccttttggcctcagtttcctcattaggaaagtgagctggcacatcccccatgccatgcactcattcgctggtggaagtcggtgggcatggcattgcctatcctctgtcccagaagactggataggagaggtagcagagcatggaatcgttgcatttaattgaataatagagacctggaggtggcaggaggcttgcaattggccactgtgggattgtttacaccatggaaattggcaaacactgattgattgttttgttgactgtctagacttcagaaagtgctggagaaaatgttattaatgttaataatgcagattaaacatgaaagtacatcattctgtagctgttacaccatgaatagcatagaaaaagagaggaaatattcttccggtattcaagaatcatggccaggcatggtggctcacacctgtaatcccagcactttgggaagccgaggcgggtggatcacctgatgtcaggagtttgagaccaccctgaccatggtgaaaccctgtctctactgaaaatacaaaaagtggccaggcatggtggtgcatgcctgtaaccccagctactcggaaggctgaggtaggagaatcattttaacccaggatgcagaggttgcagtgagccaaggtcacaccattcctctcaagcctgggcgacagtgtgagaccctgtctaaaaaaaaaaaaaaatcattacccagttcagcaaagaagtatctcccattcttgacaaatgaggtaaagttctgatattatgcctttgttattttatgtaggtgttatttgtggaatgaaaatgtcaaccaacagaaccacacttgttcataagttgatccatacgttggctacagatacagaattcagcaaaatcaacacaaacattcactgagaatcaattggcagtgtggaatttacaatagagagcattgtgtattttattattgtttataaattgggtctgggctttggggagggctccctggcagaactggttgaaaatcataatggatagccagggagaattcttaactcatgcttcaaaaaactagccagtcttaagtgcacagatcaatgaattctcaccagctaaatcacagaccaagcagcaaaacattgccactgctcagacacacccatctgcttgcttccagtccctctctctcccacagtggaagtgccttcctgactggaccccatgggaaatgtcacctgtttttgatatatagcatacattcttttgtgtcaggcttcctttgctcaatattatgtaggtaggatccattacattgctgcaggtagctgttaatcattcattctcatggctgcctggtattcaactattcaaatatttcacagcttattcactcattctattgttggtggacatttgtgttgtttccagtttgggattactatacgtcagtgttgctatgaacaatctcatgtgtctctttatgtaaacatttatgtagggcatatacataggagtggaattgttgtgtcttgggttatcatgtgttcagctttagcagactctgcaaaacagtgtccaaagtggttccacctgcaggcactgcatggctgccctgggtgccccatctcacctccaacacttgctattgtctatcttttttcttctttttaactattctggtgaccatacatggtatttcattgtggttttaatttgaatttccctgacaactgacacaagtgagcacttttttgtatgcttattggcaattagaatatcctcttttgtcaagtgtctgttcaagcttgttgcccattttgatgtcagtgcagctgtttttcaaaaattattgctgtaaatgagttctttttaaatgctacatactcagacactgtactgcagataatttcttctactctgtgggtttcattttcactttctgttgtcacttaatgaacagattttcttaataaccttagtactgtttaacttataagcatttctctttatggtgggtgcctcttgtatcctgtttaagaaatcatcatctgctcatgtgtcatgatgttcccttacgtttctcccaaaaccctcacatttcaatctgtaatccatcagctattgcattttgtgcatgctatagggcaagggttaagacacaatttttccttagggataccttgttgattcaaacccaccccctgcagggacacctctgccacaacatgtggaccctatgtctgtgggtctctgttccattgatggtttggctgcctgtcaatgcttcaccatctgatttactgttgccctgtcatcacttttgagacctgctgtcagccctctgcttttgttcttcttcatgattgcttgactattcttggccctttgcaatttcccgtgaatttttgaaatctgcttgttaatgtccaacaagagggactttgacaggaaaatatgggggtgaagcaaagcggattccaggaagaggaaattgcttcattcggtcatttttccatgcatttaacacctcctttgttctaggccctgggaaccctgagctgagtggattagcaccaggcaaccacctgagagggaggccctgcacccatccatgttctactgatgagtaatttgaggcctggaggaaaaaaaatcactgatccaagatcacagagtaagtgctgagtgaatgtgcacccaggcccatctgaggttaaagctcattcactcattcattcatcattccacaaacattaacctagcacctaccatgtgccaggcactgtgctaggtgctggggatgtagctgtcatcatccgcatccctaacctcctgcatctgcccaggctgcccacaggatagatagaagtttgaaggaaggagaaaagggggacatgccagactgaaagaatggcatgtgcaaaggcccaggggcatgaaaacacctggtgcatctggggaccacaagtgagtccttctgaccgagcagagggaggaagggacagtgggtggtggaaggtctgatccagggtgaggagctgggctctgtcccaaggatgtcaggggctaatacatgccaagggttcatggaggccctagggaggaacatgaggctggaaacaagcaggcgagctttccttgttcaggagggtaccagtcctgtcctactggcattgacggtggcctgcaacttatggcggaggaggggatgaagggaggcctggaggcatggtcagcaggacatagacagaagaggagggccagatccaggagcagggacagggatgcagggatcagagaagagctaggagtgggggcaaggaggcagaagaagatggcccagacacctgaaggccagccttagaggacatgagggtggctgggtcacagagtgagccagctgctgtggtcacctaggccatgaagcccaggcagcatggagtggcggtggggaaagcctcttagctggctacgggtttggggtcagtgatgccccagacacctcggcctgaggctctgggcctcagcataggcttttgcacacagtgtgctcaatgaatgaatgaatggatgagaccctctgtttgcaagcattgagccatgctcacttcctaaatattggctgttatttcacctgttcccctcaatagccccagggaaatggaggctcagagagagaatggagcatccatggccacatggctaggaccccctgtgccacccacatgggggagttttgagatcagatcagccatcctttgtcctccctgtgccacatgactgtagccaatggatgcctttctcattctcgctaacaaggagatgccaagccaggcctgggtgttcctgggagccaggtcccccaatttagctgccatgtccagacaagcctggagtgaggctaatgctggggtcggcaaacccggggggcagcccctgccccaccctcagccaccacgctcctattcacagccacggaacagaggccagagagaaaagggcttgcctggggtcccagttcacacagttcccaggtctctgggcaggcgacttgccagcaggaagcatcgtgtacaggtgcacaggactccgaggctcagaaggcccctggactgctctacactcttgaaattcctcctcatcttggaacaggcgctgcctttcactgtgcccgggccccacatgttacctggctggtcctgacccggccacctccctctgccagagcaacacagcgtctcctttcccttgaaggctcttgtccattccagggcacaattgctcggattacacgtcaggaagtgcatgaagaaaggacaggaaaaaaggaaacattcaaacttttcctggtgaaaacaggggctcattttagcttcaacatcagggcatctacacaccattgcaaatgcagaggaagattaaggctgggcatgtcacagtgaggggctacccctggaacccacttcccaggaacagtgcacaggggtgcttggagccaggctgctgccctccggcatggggaaggggcagctggagtgcccggttcagaacctcgagccctggcaatgctgcttctggctgggaagcactgggagaacctgagccggcttgggcctcagcttcccctctgcaagctggactctccagagagcccacctgtctgggttggtgttgtgttcatgggattgttgggaggaagtatgggaagccccttccacggtgcccagtttaggtgagtgtgccataaatgatggcttgttatctgagtgtcagcaccacagctcttcaggaaagcccccactggggtgctctgcagaaaataaacctgaagcttcaactgggctcagcataaactgtccccacagggactttcagacaccaaagtgactccctggcccaacagggaccactgttgagtggcccagatgagcaggaatctccctcacgaatccatgcaggaggaccaagggccccaggacctgtgggcaaagaacccaggctcctccagggtttcttatagcaggaggaggaggaggatgcctgttggccccattgataacagttggagaccccgtctctccatccccttcttgccatctctcagtcactccttccccacagcctggcccttaggtgggctgtgagggggccctgggcacgggattgagagcagcccaggagtagcggcccccaagttgtttttcccaatgcaacctttttccaattagaatccacaggcctctagtcacttagacctcccagagggcaggccacctagggcagcggaaggcgatagcttttcctgggtgtgctgaaagctggggccaccacaccaggctccatcccctgaacagcaaccactgtcctctttgaggaggcctgcgttttggcagaggtgctgacagctcccagctaggtcaagggctctcatctggcctctccatctcctcctcctcaacctcaaggtgagacgaccgcggatgcacaaggtgggacgaccgcggctgcgcaaggtgggacaaccgcggctgcgcaagttgggacgacagcggatgtgcaaggtgagacgaccgcagatgtgcaaggtgggacgagggacgaccacggatgcacaaggtgagacgactgcagatgcccaaggtggggtgaccacggatgccaaaggtgccctaggtggcagaggacagcatactttgtgttttctttttttaacttttgcttttactgtcattggatataggcttcccaggaaagcatggggcctcaggcaaggggaccctctgcagctgacagctgtgcgtttggcaggccagtctctagcccctccaagccagcagtgagaggcacacagtttgtgatatgtgcagcagatccccgtggtcacggcccactcccacacctccttgctgcgaagtgggtcccttagcctgacttgaggctctgcgggctcccaggctggtggatcacacactcagtaagccaaaaggatggtgccgctgggggcctgggacagaaaagacaaactctgacctgaagtttgtgtccactttagtccagatgaatctccgatctttcaagagttgaatatagccaactggccaagcagccagctggcctcaagggaggggctctacaggggacattcagcagacagtagctaggtcagccttagtaagtgagggcccatccttgccatctcggctaccctctccagtgatccatggtgccggccctggcatggccagtgagactgactgacgacagctggctggaccaccttgcctacctgattgttcagtgcctgtttggtggcagatgcttcctggaaggagcgcaaagaccttcctctttaattcccactcctgtacgcccatccatcaacctctgctccaggcctcttgtccctcatctttctccttccgggcccctgatgagctggccaagccattcactgctgcctctcagccccggtgttttgacctcaggctgctcctcttcccacacacagcggagggccaggtgcattgcctgaagctctgcccatcagaagtatttgtgtttctttcaaggtcatcactgagcgaagctgtggttcagcagctatccacctcaggttgtgctcaccatccataagccatgctccagctttttcttctctggcgtctggccctaccgagcttacatgtgtccctagatgtgagctgagggacactggagccgcaatggtgaatgaggcagggttcaaggacacctgctcatgcctgctagtcctcctggtgttccatctcaggtggccatcctctcttatgatgcagtcttgccaggcacatccaacttatgatgtggtggagctgatagaacccagctaacgatgggtggctgtggccacatgctccccagtcctaggagagggagggactgtggcaaggatttgggtggtgaatgaagcactggcccccaggaaggggagcccaagacaacctctggctctcagaacaatggtatcgtgtccaggaatgctcagtgctgagtcctcaaaacattcattcattcatttatctaacagctcccaaaaccgactttgtgacagggtctgagcagagtcctaggatgcagagaggaattcagcctagtccctgcccatgatgagagacaggcagtgagagtcacagggggacagacaccttgtggaaaggaaaatccaattcaactcacccacagtttgagttcccacccaagacttaaagcctggaagacttcctggaggagggagtggtctctgagtctcctgaaactgacaagcaatcccttccagatggattatcaatgacaaccgcatcactgagcactcactgtgctgaaccatttccgcccatttcctgctcagtcctcacagcaactcacgggcggcctttggggcgagtggacctgggcttgaatcccaaccctggctctgatagctggatgatcttgacaagctgtgtcttcataccccagcgaaggaacgcgaagttcaggggagatacagcttgtcagggtcatccagctatcagtgccagggttgcgattcaagcccaggtccacttgccccaaaggccaggcccttaaaccgtggtgctttctggtgctgttcaccgtggacgcctggctctcatctccgagcctggggcaggcgcacttccggtccctctgctggcgggagagtcatgtgactggagctggccaatgagttgcaaggggaggagtcgcgttatttcccaagcagagtatcttattgcaagatttccccgtgctcccctgccctctgcatatctgggaggcccctgcaggtgtgtggggtacacgttgtgtgtgtgaggaatcagcctttgctgtctggagctaccgaaatttggcatcctctgttcctgcagcacgacttcctctatcctgactgatgaacacggctggagtcaggcctgctgagccagcgatccgggcgtggcctgagtatctgcttgcttgaaaacagagccttggggctttgacacaggccacatacaacgcctgtgctgggtggtccttcatcctcttgcaatgtgaccacaaaccctgaccctgtgtgattcccagccacgcatctttggcgtctcctgcctgtcctcctccgtgtctgctctccatcctcctgttgtggtctcctttgcagcgtgctcaggccccagcacggcagctctcctctgagattcctgggccgtcaggcaggtgggcctgtttgaggtgcccggcaactaaggcctcgtcctgcggacagtgaccttggccctcggcaggcagcaaggagctgccctgagaacgtctcctgtgtgccctgggcacgtgggtctctgcctcccagacaggattctctggctgctgtggtcaccacaagcccagcggcctgccccgcccctccccatggactcttccttttgcgccactcacggttgtgtctgctctgtgctccccccgacccaagcccagttctggactctttggggctataggaacttggaatgaaagttccatgcctggtcctccacgctgtctgtgtaaccacccacaggggcctgcagcatttgtgtacacttcctggtacaagtgagtctggtggtggttttggatggggatcatttacagcagtcccgagccaggaatccaaagccccttttgccccctagggcagtggctctcatttgtggctgctggggccactaagtcctgaagttgtttgcgagctccagattccaagatggcagccaggtgtctgcggccctggcaccagttgatcctcgctgggtggctctccttggggtctgaagcttgatgccatcaggccagagcacactagtggccagaaccattgggcatcctgactggcccttctgcttctggcccgaccagccactggggtgagcttggctgtgcaaagcctccctgctcctcccagggggccccggtcctgctggagggagcattctggttgccctggctctgagaaggttgctttgagagccaaggaggtcacgaggctgggaagttgccccaggaatgtgcccactggctgtccagccttcctacgcctcactgccagtgagtggccactccaggccggccccagggcagggcagagaccaaaccccatggccctgtctgcagacctgagtgtggtctggcttcccagctgaccgaggttggtccccacatagtcccaagttccaagcagagccacccagggcccctttgtgggctctgaaaagacaaacaaacagctccaaccggtggaaacatctctgactctcccagttcagacagcctgggccaggacatagagagaccccaaagggagccgcttcagcagcaaacaagccacagcctgtgtgcagggagctgaccagacgccctgcagccgccgggaagctggcagagacagatggcgtctgtgctcaatggggcacacagggagcagaggcctccgctggagcccacccggccacccgcccggcagaggctcctgggccggccatgcaggcagggagaggagcgccaggaggtgggggattggcctgccatgaggcccactgcgtgcccgggccctcctggagtcgggttcctcatggtaccagcagccatggatcgttgtgacagcagaggaaaggccaaggcaccccacacaggcctccctggcacagagaaggcgacgggggccggttctagttagaatctgtcctctcggtctggacccttattagttaagtgctaatattttatcagtacctgatatgaacacctgcatgtcagccactgttctcagggctgtccctgctctatcatctcttggactcctcaacgacccacaatgcaacatccggtgatgattctcactttggggatagggaaactgagacccaggggagctccatgacagtgccagagaaattcaatctctggccccagtactccgcctctgcagtgctcttgctgagcccctccagggatagtgccagccaaggagtttcattttttctgagtcatgttttaagaggaaggaaagaccaggcgcggtggctcacgcctctgatcccagcactttgggaggccaaggtagccagatcgcctgagctcaggagttcgagaccaccctgggcaacattatgaaaccccgtctctactaaaatacaaaaaattagccgagcatggtggcatgtgcctgtagtcccagctactcaggaggctgaggcaggagaatcgcttgagccccagaggcagaggtggcggtgagccaagatcatgccactgcacttcagcctgggcagccgagtgagactccgtctcaaaaaataaaaataaaaaattaagtaaaaataagatgaaggaaagagagcttttcataaagttagaagggaacccattcatcaagcacctactggctcttgggcaaagattctcctcctcctgactcctgccacctcagcggctgtggcctcacagtccacacagtctgtacttcctggggccctactgtgtgcgggatgggagccatgtgctttctgagcctggtcctacttcatcttctcagcaatgctgtcaggcaggactttgttttttttctttttctttttctttttctttttttttaagacaaagtctgtctttgtcgcccaggctggagtgcagtggtgtgatcttggctcactgcaccctctgtctcccaggcttaggtgatcctcccgtctcatcctcctgagtagctggaactactggttaagttttgtatttttagtagagacggggttttgccatgttggccaggctggtctcgaactcctggacttaagggaatctgcccatctcggcctcccaaagtgctgggattacaggcgtgagccactgtgcccggtggagagggatttttgttcagcttttacagatgagaaaaaagaggctagaaatggttcacctcgtgtgtctgactttaaaatgttgagggaagatgaaaagggaagggcagggaggatgctgagtaagggggtggctatccgctgtctccacctctgcggggaaggagggtccttagccatgccctgtcccacagtgaccagcctcggcaggtgtggcggtactgagctttgaaacggacaggcgtgaaagccaaaccccaggggcactgtggtccttgtcacaccaggtgctgatgatcctaacctggttctgagctccacaggggtgtgcaccccgcaccctgtgtccagggctcacccggtgcctgtgtgcagagggcaggggccctgttgggatggaaggacacagaagccctgtgccaccagctcttgcagggagagcatagccctcgccaggccagtggtcctgatagctcgggtgccagcagatgcagtgtgagctctggagggctcaggggatcttcaaggcttcacgacgccccaaatctcaggcctcaggaacgggagggctcagagtagggcaatcccaattcaggctgcgtggggtcccggctcagggagagcaaacagggagagacagcagcagctccagtgttcaagagagcaggggcgtgaccatcccagcctccagaaccgcctggcccagggctctgcactcagtaggtaccaactaatgcgtgccagggaaggagctgatgaatgggggctgcctccctgtccagtccaggctgtgcctccccatgggtttccccggggcacctccgcgaagcccagtccggcttgtggtagaaatggctctttcgtggacccgtggctgctcatgtccttcgtgtgtgtccagcacgggacacccggccagccgtgtgggtgacagaaggaggtgccccaccctgaaaggacccctgagcccagacctctatgggaccttttctagagatctgccgagcgcaggtcttctccctgggagcctggaaggggagcaggagcctgtgatcgagggaagcaaaccccctggcatctccagggagaagcccatgggcagggcgtttgggagggaggcagccaccgtgacatgggacatcaggcacctgagtcagtagccccaggcaggtcccagccctgggaagtcggggtccacagtggcccctgctgggttaggtgtgaggcatgggggcggctgcgcccgttgggtgctctgtgttacaaaggggctggacggtagaagccttggccattctggagtcgcagcccccgacgctcctgcctgcctggagtctcctgaggctgctcgttatatgggaggtccccagcccctgccctgacacttgaaggccatgggagactgatcccaatgtgtctccttcgcccaactgtctctagtagggtgagcgacttgtcccggctcgcccaggactttcccagtttcagcactgaaagtctcacatcctgggaaccccctcagttcccacacatcggagcagcctcggaacagcctctgccacctaatcccacagtttgtgcgacgccgcccttggtatctgctgcagggtgcagggctcttcacccctgctccaagccccctgccccccacagcattggcgtttgagttctctctgtttttaaatcaagtagattttttcccagagaggtccattttcagctccgactgactctagatgagaagctgcatgccatgccaaacagagctgggcacgtcgccccctggggtggccatgtgcgttcacgggtgggcgtgtgcgttcctgggtgggcgtctgcgttcacgggtgggcgtgtgcattcctgggcgggcgtctgcgttcacgggtgggcgtgtgcattcacgggtgggcgtctgcattcacgggtgtgcggttgcattcctaactgggcgtgtgcgttcctggatgggcgtgtacgttcacagatgggtgtgtgcgttcctgggtgggcgtgtatgttcctgggtgggcgtatgtgttcacgggtgggtgtgtgcgttcacaggtgggcgtgggcattcctgggtgggcgactgcattcacgggtgggcgtgtgcgttcacaggtgggcatgggcattcctgggtgggcgtcggcattcctgggtgggcgtgtgcgttcccaggtgggcgtgtgcgttccccagtgggcgtgggcgttcccaggtgggtgtgtgcaggagcactcggggtgtgttcttgtgtgtgctgggtgtgttggtgtgtgcgggtgtgtgcctccaagccctgccttctcctacccagggacctgccctgccacagagccagtttctgaccctgctctcacccctctgggccaccagcccccatctcaccctctcccgcctgtcagttccccagggtgaaggcgagagggtgaaggcgagagggtgaaggcgagagggtgaaggcaagggtctgatgggttcgttactgtcttatccctcccagacaatgggaagaagggcctcctggaggcctggcaaccccatctggccccattttgggctgaaggcatgggccttggctggacccccagacccctggcacccccttcccaggaagggaagaggaaatgttcaaatgctccccacggccccgcaggcaccagcctgaggcccatttgagaccacccccaacaccaccccaagatcctcgaggccaccccagatagggcctgcagaggcttctgggctcaaagctgctcagagaaggggctgggctcagcacagagccagcaaccctggaggaagggccggagagctttcagccgagggtcattgtgaagccgagattagacccaggtgtccccgactcaccgctctgcagctgtgtgttgtgggctgaccccagtcgcctcatgtgtacgctggggtgatgataggaattaccttcctcataggcagctccaagacccattcattcattcacacattcattcattctgtagataatgatggagacgcgcccaccataagtcagatgccctgggcatggtgtgaggaccttgagctggaaaggacacgcttccgggccccaaactgacatctagtgggtggggtggggagttggctgtgaagggcagacaaacaagcgggttgttggggagccgcggatgacgcaggaactgcaggcaggcgtgggccacaggccaggagcccgcttcctgggtcctcggagcctgggccctcggtgcccatgtgtccctggcctgagaaccccttgctcttcgcctggggagggccagatgggggccctttaaagccggggcctggagagggagctgcgtgctctgggcccagctaactctctggtgctccccagcatgtctcatcttcccaaatcacccagacgtgctgacaccccactctgtgctgtccctgggaccaccacacccactcctccctgggggatcctctcctgatgtctttacccctatgtctccttcctgtgtgcagttggctgaatcatggcccccagacgtccacattctaatcacaattcacatggtgaatgtgcgaccttacctggccaaaagactctgcagacgtgactggactatccctgggtgaccgaggagccggtctgtgtggccccaggcccagggaagtagctgctgttgtgaggacaaacaggacaaggaggaggaggccacccctgagaacagctctgcacagcggggctgacctgctggccacactgcacagcccgggacacacacagaaacctggggcccacgccggccgccactctcacctatgggctgagggactcacaactttgctggcacctgtccctgctgagacagtgtgaggacagggagctttccttctcactgcaccaaggcctctccccagccctgctcagggctaaacccatcctcttctggagtaagagtctgcagggggcccctgccagcatgaagtgtggcctctccagtgccacctagggaccccagggagtcccaggcccattctccctctcagcacagttggaggaagtgggtcaagtggggtcctgtctgcccaaggtcacacttcgaaccctgacagtgacaaacagggcaccagaccccacatctgggctcagactccatatctagagtcaccctgagccatctcctctaccaagggtctctgggaaaaggccagcctggtgacccctcaggcccagggcgagccctgtcctttccatgtggcctctgtagaatgtgacctcgtccctcatgggccgctcagccccaggcagtagactgtgctgggaatgggcttcctgctcttgcagccccatgcatgggggagcaaggtgaagaggcagctacccctggggtccccccaccccagtgccatctggggaaacctggggaatgagcagggccctccctggccgcaggtctggttcatcttggccccagactccggcccacccccacatggagcagtggacggcagtggagagggtcctggctgagctgcaggatctgcaggaagcagacccatgcagaggaagtgtctggtgggataagctgccgcctggctgcgagcaagatctgccccacccaccccgggcacaacaggctcccaaggggtgggctggggaggagcctccgaggcctgaggtgccctgtcctgggcacaggaggccgctggagaggaggccacacccatcaggcctgttttcctctgcagctgtaacacgccaggtgtgggtcgcagctgagcaagtgctgacagctggtgttcccatgctcctgggggcagcatctcgcagccactccaggggccatgtgcacgctgcctgccacccggccccgcctcccccagatggaggtgagtccaggaggtcaagtcctgccccagctcagccaccaactcccaggtgcctgactgggtgccgcactctacgaagaatctgtttcttcgcccatggcggtgtgccctgctccacgcccaccatctgcctcaccctgtgctacagttcctgcaggcaccatagtgcagcaccgcaggctggggcttccagggcagacatgtgttctcccacattctacaggctggaagtccaaggttaaggtgtcgcaggcctgggtcctcctgaggcctctctctctggctcgcgggtgtcgccttccccctgtgtcctcacacggttgtccctctgtgcatgtctgtgtctcaatctcctcttcttataaggacagcagtagggcccattctaatggcctcattttaatttaactacttttttttttttttgagacggagtcttgctctgtcacccaggctggagtgcagtggcgtgatctcggctcactgcaacctctgcctcccaggttcaagagattctcctgcctcaacctctcaaatagctgggactacaggcacccaccaccatgcccagctacttttttgtatatttagtagagatggggtttcaccacattggccaggctggtcttgaactcctgacctcaggtgatccacctgccacagcttcccaaagtgctgggattacaggcgggagccaccacgcctggccttaacttaattacctttttaaagattctgttgccaaatacagtcacattctggggcacagagggttagggcttcaacttaggaattttgaggagaatgtaactcagcccataacactccccaaggaagtagaagaccaccattggttcactcatgcattcacttaccccacagatactgggtgggtgccctgcagagctgtggacagtggtggccatgagggataagatggccaggggtgaccccaacctcaaggggctcacagactgggaggcagaaaggaaagatggatgagacaggcaaacacaatcttgaggtttagagtcatgctgggccccttcttctcttgcctcctccatctgatgcaggaatctagtaagccctgcttccagaaccttctggaacctgcccgcctctacacacggccaccaccctggtccacttgcatctctatcctgccccagctgctgtccttatgctcatagcgcccagggatcctgcctagcctacgtcagactacagccctcctctactcagaacttaccgtggttgcttgttcccatcagagtaaatgcccaggtccccacaacagcctggaaggccataccgggggtggctgtgacctgctgtccacgtctcccactgcccaccctctcccctgctccagccgcccggactcctcactcctgcctcagggcctttgcatagccatagttcccactacctgggacacccacagagctcttcccctctctttctccaggtcataagtgaggccacctgacacccttctttcagtcgccctccccaccctctgatttgcttcctgctctgactctctctctaacatgtatcccctgcagcccagacaatttccttctttattttgcttgttctttctccctccaccagaatgttgtctccacgagggtagaaaattccagtttcatcatggctgtgtgcccagcacctaaaacagggcctggtgctcagtgcttgagtgcatctgacaagttattattttttgctcaagcgtcggcaaacatttctgtaagtggcagatggtcaatgtttttggtttcgcggtcctgaagtctctgccagagctccccgactctggcattggaaagcaaagcagcatagacaacatgtacaagaatgggcatggccatgttccaataaaactttattttaaaaagcaggtgggggcaagatttggcaggtgggctgtagcatgcaggctcctggttcatctaatgagtcagcgactgatccccacactccacaaacccacagaccctctctctgacagccctccctgtcctggccatgccctccaccccagatctgtaccatccataaacttccaaggccaccaggacatttgcagctcttggttctttgggcccctggagtccccaaggaggaggctgggcaggcacaattctccccattctgcaaacagcaaagatgaggctcagccaagccagcattcagggccatggctgagaggcatgtggccctctctcctcccgctctcttctctacctcacttccggggcaaactgtaccacctgacgctgccgtagccgtctgccctttcctcccggatggccttcccagccgccctctcctcagttccacccaagccctcagatacggtgtctcggggcagccatcttggtgcaccccgagccagcccttcctgcgttctgtgtcctcctggaggatttgtcaggttccccagagcttctaggagagacgccaagtcctgaacctcaaaagagatgagagaatcacagaccagcggccctcaagtcctcttggccccccacagtgctgagcacactctgcctggtgctgaggctgctgctggggctgggcactgtaacttggatgcgagttacctgctggtcccagcagcaattgcgcctgcactctgctagtgcctgcactcttctagtgctgggccttcactcatctccctatgtgcattccaagcagtacccctagacactgttaccatccccattacagctgaggaaactgaggcacggagaggtgaagtaacattcccacaaccacacaacacaacaggcattcaggcagcatctgtctgtctccagcgattacctttttggttccctctgaaagaagactttctaaaggatgattactgctgggctttgaaggatgaatagaagttcaccaaggaaaatggtgcaaagcgcaaaggcaggaactgctctggtctgggtgtgcagacagccgcaggaaactgtggaggcatagacacggaaaataatgtgagaaaccttcaaacaccagtccagtctctacccacaaaatggaataagaacgggaccagtcatggaggttgtttagggttcaggctgaaccccaccactgcttcttttcctggaggtttggggggccagaggctgatctaacattccgaggccaacctggcaaacacttgcatccagttctctactttctgcccacagctttggccgtcacctgttgtgcggtgcggacagacacagcccgtgggagcacaccccagggccccccggctcctcactcacatggaagtgagcacccacaaaccactgcggtggagacccaccggttacaagcaaagaaacccactctcactcctcaaataaaaggggaatactattacaaggatgcaaaagacgagttctcaggtattgggaatgaattgatttttcctaaaaagatacgttcatgcctgacccctagtaccgtagatgtggcctcatttagagacagggtatttatagagggaatggagttgaaatgaagtcatgagtctgggtcctaacccaagaagcctggtgtcacacaaaggggaaattcagacacagggacagacaagcatggagggaaggtggccacatgaaaaccggggcaggagtgagacctcgaccagccagggaacctcaaagacccacaggaaactgtcaggagccagggagaagtgaggaagcatgcttccccagagcgtctggggatagcattgccctgcaaacacctcgtcccagactttcagcctctagaactgggagaataagtctgtcttctcgaagccacccagtttggggtactttgctccagcagccccaggaaactcttgcaacagctcactgtggacaggagctgaaagcagctggtgctcagttcgaggctgcagtgagctatgatcatgccactgtcctccggcctgggtcacagagctagaccctttctcataaataaataaataaataaataaatagaagggatttttaaaaacttaccaattcaatttcagggcatctggaaatgccagggcttcccaggtctccttcatccctgcttctctctccacatcaccacggccaccatttctccaagactagattcttctgtttctccttgtcccacacatggcccagcatgggcaccccaccccaatgtactgcagccttcctgtgaaagcacctttcctcaatgggcaatgcctgccaggccactggtcagccacaggggttggctcagctcatgggtccttctcttgcccagtcagctttggccagggaggagacaggccattgatgtctacttccgcctcacttgaccttctcctctctgcctattctgttctgtccacctctctactctgcatgtctgtctcaaacctccctctgcccctctgttaataaggacaccatcattggatttggggcctacccagataatccaggatgatcccttcctctcaagctccttaactcaattagcaagtcctttccttaagggaaatgtcagaggcacatcttcatgtctacagtgataatgaattattagtatcacatacacacacaaacacttaaattgtgaaaaaaaatcatcctatagaaaaatggggggaaaccttaacagaagaggaaatttagagacaaagcttggatgacaaataaccattgagaaactgttcaacctaacagggaaatgcaaattcaaacaagtcatgtcatttcacatcctgctcccccaagatttacagaaatttggaagtctgacattagcaagtgctgcaggaacatagagaaatgggaactcagactttgccagagtaaattggccaagggactttggaaagcaactttgcttcctagtgaagccgactctggcccttccctgtgagcctgcaattccgctcctaaccccagccctaagcgctcataagaagatgtgcacaaggaagtccactgcagcatttttaatggcaaatttgaaaacagcctaaatgtccatcaataggagagtggatggataaattgtgctgttttcacacaataaaataccgtggaacagtgaagatgagcacacacatcagatatcactaacatgacattgagactaaggaggcatacagctacatacaacgtggtgtcctgaagtcccaggatcctggaacacaaaaaggacatgagtggaaacactggtggaatttgagccaaagtgtgacttagttgatggggatgcaccaatgtaaatgtcttagttttgatcaatggactgtggttatataagatgttaagactaggggaagctggtgaagagtgtcagggaacttggcatctgtgcaactcttctgtgaattcaacattatttcaagaggaaaagtaaaaacaaaagcaagttacaggcaagtatatacaatattagactgcttgtattcaagtgacgcttatggaaaattgtttcatatattgtttagggagatataagaagtgagcgcataaagagagctgagggccatgcttctccccactgcgagtggggtggggaagggttgtgggagactggggagggggaagagggatgcaggagggatttccactaccttgatactgttttacttcttcagctgagtaggggtgtgcctaggtgtttattctatgactcattacacttttggtatgcctgacatatgtcatgataattttttagaatcctgtaaaccttatgtagccccaactgctcaatgcacaggcaaaatcaactcaagaaatcggcgtcagagaggggctgggaacgagcctccaagttccagtttggaatctctcttcaccacatgaaatgcttcctgggcgggttttctgggtgcagacaggaggttataagtactctaacaagttcgaggggcccactccagaagggcaggttccagccaccctgacttgcccagggcagggacacagcctcactccaggcacatggctccttgcccctctctccctgactcgagaccttgcccagacctagccccatgcccagggtctcctggcccctgagttgacttttgcttctaaacaaggtgaaaaggcagttgatgtagcaagtgggggtggcagtgttccctgaggggttgagtgggtggtccgtgtatgtgggtgtgtggtcaccggggccctggcactcagagaagatgcctgctgtgcctgaagagggagtgtgaggcacactgagggggctttgcaaacactgatggtttcttctcttattaaagtcaggcatctcattagggcaaacctgagaaatgcagaaaaagcaaaaaatttaaaaataaaagagaaaaacaaccacatgcccgcttcccctgccccccataaccaccacttatgccccgagtttttcctttatttttctgaagtgcaattactaggtcaaagtgaatgaataattaaagactcaatgcaaaataccaaagatttgacctttggtatatatagagagagggaaagacagagagaggaatagaacctcccttctctagtgaggggaaggggatcatttttatagcccagttttacttcttgtaaaagtcccatgacaccaacattcaacagcattcgaactgagtcacctcaccctgaagctcatcattaatttcaacatgagatcatttcttcagccctgccagtcttcatctacaaagaggcaagttctggtttgcaagtgacagttggtagacgtccttggaagtcagctttctccccgtgccggtttgccacacagatgggttcacacagcattttcttggtaggaactatctgatgagcagcagacacctctgtggtggatggactgtgggctcgagggtccagagggggcactccctgtatttcgagggctacgaagcttagctggcccctatgtctgggcctggggttgttttcacagatgattctgcaggggtggtgtccgcacggtggtgggttgcactcagtggatcatctctgcacagaaatccccagcttagagctgcacttcgtggcactgagtgtggaaagtgaagttgttggcctggtgaggatcatcaacaggaagcaggtgttggctggactggggagagcgtgtcccaggccccccaccaccctccgccccgctctccaagcccggactgcctcatccataagcccggactgcctcatccgtaagaaaggacaaataataccaaactcatagacctgttgtgaggtaaatacctgggcaaattttcacagaggctttaaatgctttaaaccaggaatctccaaacttcttttgctgtcttccattacttaaaaaaaaaaaattttgagcttgcatccccagtaaaatatatataaattttcttttaatttgtatacatgtacatctaccataccaataagttataaaacattagaaaacacataacaatattgaaattaaaaagaatgaaatttagggctggacatggtggtacacacctgtagccacgcctactaaggaggctgaggtgggaggattgctggaacccaggagttcaaggctgcagtgagctgtgatcacaccactgtcctccggcctgcatcacagagctagaccttgtctcttaaaaaagaaataaataaataaaaataaaagggatttttaaaaatttactaattcaattagtttaaaggttaaagggctaacacagtttttaatttcttgagtctgtttcgtaagaaatgtaccaattcatttacattttcagatttattaagcatatagtttagtttagtagacactatcttttaaatattctgatttgttccctttttctctttgctctttttttgattgtcatttattcattttgtaaaatgtgctgtatattcatcagggttatacggagaaacagattgattttaagaggaatcagctcaaaaaactattacagagtatcacagtgttgcccagggtggtttcgaactcctggactcaacaatcctcctgccttggcctcccaaagtgctgggattacaggcgtcagccactgcacctggcctattccctttggcatttttctcttttctgtttttgtttctccatctctaacttaatcaatctttgcaaagctttgttgtcgaagcactagttattagctttgttgatgctgtttttttccttttttctatcttattaatgtcctctctgattgttattatttccttctttttacttttttttagtttcccctattttttatgttttttttttttttttcgggggggagttggtcacttagctttgtaaaagtttagcttttcttcttttctaatataagcattttagactttaatttttctttaaatgtcactttcactgcatcccacaaatgtcaatacatagcattttaccatcttttagttaaaaacatcgtatcatttccacaatttcttcttttctctttgaattacagttgacccttgaacaacaggggtttgaactgcatgcatccacttataggcaggttttctcccacctctgccacccctgagacagcaagctaactcctcctcgtcctcctcctcttccaccgcctcctcctcctccccactcctcaccctctaccccctcctcctcctcaacctactcctcctcctccccgcttctcctcctccacccctcctcctcagcccactcaacatgaagattgtgaggatgaagaccttaatgatgatccacttccacttaatgaatagtgaatatattttctcttccttatgcatttaagaacattttcttttctctagcatgttttattataatattataagactatagtatacaatacatataacatacaaaatatgtgtgaattgattgttatccgcaaggtttccagtcgacaggaagttattagtagttacatttttaaggaatcaaaagtatacggggattttagactacacaggggattggcaccccaaaccccacattgttcaagcgtcaaattacaagtgtgttctaaaatttttgaatatgtaggggtttttgagttattttattatggatttctaacttaatttcattgtagtcagaaaatgtgttctatattatatcacttattagaatttgttgaacttctgtggcctgacacgttgccaatttttataaatatcccatatgttcttgaatacacagaatgttattctttaattgtcaggggccggatatgcttatgtccattagctcaggatagtttattttatttaacaaacacttagagattgctaacaatggaccagactttgttccaagtggtttataaatactgagtcatttaatcttcgtagcactcctttgaggtccatacagttattaccaccattttagagataagcacgctaaggctttacaaaatttaccaactcaatttctttagaggctaaagggctaatatagttttcaatttctcgagtccattttttaagaaaggtacctcatttcatttacattttcagatttattaagcatatagtttacttaagtaggcactatcttttaaatattctgatttcttccctttttctttttgtctctttttttcttgattgttgtttattcattttgcaaatgtactatatatttgtcagggttatccagggaaacagattgattttgaggaattggcacagagaggttaaatcattttcctgagctcaaacacacagccagtaagtgagagagaactgggatttgaaccacgtagtttagccagagtttgtcttcttgaataccgttctatgctgtgatattctaaactgctctattctttttttggccgggtggtactaccaaatatcgaaatagaccattaaaatatcactctataattatgaatttatctatttctctttgtaatcatgccattaaaaaaagatacttctaaggcaatactgacaaatgcaataaattctagcgaattgttatatctccttgggaaattgtacctatcatcctctacacttttttataatcttaaaagccatttagtttgacattaatatcgctgtatcagattcttcttggttagtttctgcttaatacatacttttcatccattaacgtttctatgtctttacatcataggtgtgtctcttgtaaacagcatatagctacattttgtttgtttctagtcagttcatacaaactcttttgaattgtgtttttagttaatttacatttactgtaattaataatattataggagtaatatctactggtgtcattttggacttgccatttttgatgtatttcttatgattattattctcttgtttgtattagattaactgagtttcattcattcctgttttgccccctactcacctggaagttatataatagacttctaatcttttggggctttaatttacaatgtttaacacacatgtttgacttaagtaagtataaattaactacctccacccaattgggtgaagaatataagaacttgctgaagaatataagaacttatagtcttaagattgtcttccttttatcttgttatttttattcagtattattttcacatttttcaaagtatgattttattataataatagtattttatactgtcaatgtttgttaggatttactcacatgttcatcaaattctttccaatttctttatatatgcatttctttcagtgtagatctcgtaagtggtaaatcctattttatcttattttattgtggtaaaaacatttaccatgagttctatccccttgacagatttttaaatgcccaactcagtcttatctttagacataatgctgtatagagatctctagaacttcttcatcttgcgtaactaaaattgatactgggtgattagcacccatcttaccagccacccctagcactcaccattctagtctttgcttctgcgagtttgactactttagctacctcatgtacataacatactatatattatggtatatatagtatatttacaaaaaagactacatattatggtatatatagtatatttacataatatattacatgtaaaatatatggtgtattttatataaatatactatataataatatattgtctatactatatattataatatatagtatatacacactatatattataacatattatatatagtatatataatgtatatggtatatatataatgtatatagtatatacacactatatattataatatatagtatagatagtatataattatataattatataatttattatatattatattgtacattgtatattgtacatataaatttatattaatacatatataatagattatatattatatatttatattgtatattgcatttagaatatattatgtatttattatatattatatgtaatatagtacatatcattataatatagtatatatcatatattgtacatatataatacattatatataataaatgtcgtatatatacaccacatttttaaaaacccactcatctgtcaaagtaagtggtaaattctattaatattttgggtccaaacatgtctttatgtcacccttgctcttgaaggatagtgtatcagctatataagcaccatttgatcatcattttttctcaacctttgtatcatttctgttgttttctggtttctatttttactgtcagcctaattgggctccttggcatgtcatctgctttacttttctatcagatgaatttatgagtcctcaacactggggccaccatgctttgctcctgtgcccctccttctttctttctccagaaacttgccactaggtggaagccagagtggttgtcatacccactttgtgtgtttccctctcccgggggccccagtcctgctctacctgttggcattgtgtttaaaaaaatcgttatttcgtccattttatctcattttctagttgtttcaatgggtgaattaacccaacccttttcacgaccatggcccaaacaaagaagtctcaagacatggagctttaatttaacttttaatttttagaaattctatttggttcattttgaaacatgtctatttcatcttcatgatgacttgccatttccgtgttttcaactcctccttgtagttccttgaacattaaaaatgtattattctatcgtcttcacctgcaaacatcagtgcctttgaggttttaaacccatgcatgctgattctactcctggtgatcagttcctttgtgtttgtaatttattattgtgagctcatcttccgatggactttatttatagaaatcccagatggtcctgaagtctctctggtgaggttttgggtttgattcttctagatgccccatgggtcactggttcaggctcactctctatggtaatttcttgacttgagagttaccaggccataaggtaaatagaggcatttcaatctgaatgcagtctgaagacagaccaatgatgatgggttcctagtagagaggtttttcttcccctgtcaacttcatttcatttccctgagccagtgggcagacttacctcctttacccgtgtcctgagagggaggcactttgtgaacactggctccccatggggtgctcagctctgactctgccccacatgggacaggagcctcatccctggccccttcctggctgttgagcacggctgcagcctccggggaaccacaaccagcgatccctcccaggtcttctgcggcctcaccccacaaacttcccacccttcgctttaattctgtctttatttccacaccgcagagatttcccttgttttctcgtgccccttagctatgcactgaaaaggatgttagttaaaatgtatacaacatttctgaacgttgcatagaggaaaggcatagagctaatctgtacttccatgtcgctgaaggcagacgtctttcctgtaatattcattatgccctcattaagtaggtgctattcttgcccccatatgtatagacgaggaaactgagggacagaggggttaagtgactaggccagaagtccacagctaccagaggcaaaggccaagatttgaatccaggctgtctggtgtcaaagtccaggttttttccactgggcttgctgcttccaggggccccagtgctgccagtgagggctgccaaataaagtaaaggatgcggctgggtggggctgtgtcacccatgggagataaaggagaaaggacatgttacatcttctaggaagcttccttaaacaggcgagtagcatgcactttcttcgatcctttgtccatacagtatttaggttatactaaaacttttgttgtttatcagaaattcagatttaactgggcatcctgtatttttatttggagtgaaatctggcaccctgctgccagctgcggttaggagccgtcaggcctgccccagccaggctgatgcacatttccgggcatttgcagcacagcatctcaaggcttggtggctgtactccttgtccatctgattgaggggccagggtgatcacccacaggatgcctgccccagcccctcattcagggtggcagccactgcccctgtttagctcaaacaacagccccaggcacctgcccctgcttagctcaaacaacagccccaggcactatgggaggctcctgctccttgctgtcatctagaggggttgggacctcatgattggtgttgtccaaggcaggggcttccccaaggatcccactgggaggattgggggcacacttccccgacctctaccatggggaagggaggaaaaagtcctaaatttggagtaaatatgggagcaaacccacaatgccaagagggacccagcaggggcagctgagcctcaggtctggggacattctcagctccatcctgagcccccacagcatggtgaggaggattgcaaactgggccaacctttctgaagggcaatttctcaattcatgtccaaatgtcaaaagtgtatcctctttgactcagcatttctacttctgggaacttacgggaaggaatgttccaacccggtgcaaagatgatacatccaggggtgtcaggggctgtaataccagaaaactggcaatggtctgcatgtctgttgatactggtgaaatcatcaaacctctgcatgacggaattgcaagcagcctttaaaaatctgtgaatctttatttgtgggcgtgggaagctacctgtgatcccctttacagtgaaaaagacacatggcccacctgtagtaaagaccatctatctggactctcttgcagctaggtgtggccatgttacacatgggaaaagaagataaagaaaaggacatattgtagcttccaaaagtcttccttaaaaggcaagtgacatgcactttgttcatcccttcttttttcttgctgcctgggacttggacgtgatggctggagctctggctgctgttttggacccaaaggcaagaaccatacctccaggttaacggctcagagaatagtcaggaggtgactgtctccaaaggctttgcagagcaggaccaaccacctcctatcccatttctagactctcacttgagagagaaagcaatttctgtgttgtttagtccactgctatttggggaggtgtctattattcacactagaacctaaccctgactaatataagtagtttctttggcaggtgagatttgtagggatttaaatgttcttttagatttttttgtttcttttgcatgtatgtcttgaacatttatctgtcatttatattgtttaaaaaaacttgatttcaaagcaaataaggaaaaaataaagaaatctgacaaacacccagctcttacagtgagccagccactgttctgaggactttacatgaactctcttgagtcttcacagcagtcctgtagggtgcgttagtatccccattttacagagggagaaactgaggcacagggcagttgagttccttgtctgtggtgcctcagccagatgatgagagcatgcaggcagctccatgggagcatgcaggcaatccatgacctcgatcatgatgccaccctgccaccctggagacctccagcctcagaggctacccaggcctaggctcctaccctcttctctcccaccatttgaggctcttccccagagctgctttggaaagtaccttaagttctgggctgccttagccaggggcataggccatggagttggccaaattcattcctctcttcattcattctacaaatatttctgagtgcccaccctacatctgccactgtgctgggcacagggatgaagtggtgggcaggaaggcatgggcctcaccctcagtcagatgttagaagacagccctgtgtggcattgctgctcctatagaagaggcccctgggggacatgggggtggccttagccagggaagtcagaggcagcttccccggaagggacacgtgatctgggatccgaggcaggggtgggagttacctgtgtgacgggggacggggaagatgctagctggaggggatggcatgtgctaaggccctgtggcaggaggggttagcccacacacccatacacaccccctcattccatgcccaccacagcccaccctctgcaccctcctccaagaaggcagacaagtcacccgtccttccccaaggctggaggacaaagacctgtccaggtgcatcttgccagggagcctggagctgtgctctagcctggacctgcctgcaaagggggagggggccccagaagagcaacccacccattccccccaccacggagcccttccaacacccccagggcctctcaggctgtcactgggtggtcagcctcacaactcactgctcagtccctgaacactgtgagaagtaggcataagaaccccattttcttcaaggaaagaactgggtccttgagggaataggggctggctcacgcatggggttacaggaaaggaagccccatgtgtggcctgtcctcgaccccacagtgaggactggtgacggaagagtgagggcaccagccagatcctgcctctcaactgtggcttcattaaaatacatagacacatgcacacacacacacatgcacacacctgcacctgcacatgcacacacaggcacacacatgcacacactcgcacgtgcacacatgcaaacacatgcagacacacaccagcacctgcacatccacacactcgcacatgcacacacatgcacacacacacacacacctgcgcatgcacacacacatgcacacgcatgcaccccttatattcatgcctttatgggctcacagttggtgcgaactgtgagcagaaggtttgcagggggctagatccggctctggccctccctggctgtcacctccagcaagtgtcctccttctctgtgggacccatttccccacctgcagagtgggcaccccgacagcctctacctcctgggcttgcttctggaggatgaaagcagtcccatgccgagtccctggtgcaagggacagctcagaaggaggtcaccattgttactctgcccctctgaggctattgtggtcaccctgtcccactgccctggactggcttgggggccaggctggcatgatcatgctgctctaggctggcaggtggagcattcccagccccggttccaaggtcccccgaggcgctgacaacacttggagggagaccatgcaggctgggcttcctgaccacccagacccttcaggaccaccccccatcccaccccaccatggatgtggcaaaggccctgccttggcaagccttccccagaccctctgctctgctggagctccagagcctcccaaacggggcccccaattcctgccatgaagacctgaggttgaggcggccttgggaggccttggcatgatctggggcccctttgggcctgagtggccactaactccgtggcttcttgtgttaaatgtcattcacatttgtcaccccatcgtgcccctagttcaactcacaccaactgcaacatgtttccaatgggggtcgcactgccccaacttcctgagacacttatctgacccagtcactctccctctcaatccttcaatagctccctattgccttcagtctcaatgctgtctctgcatcccaggcagccacacagcaggggctctgtccccgtctgctgccttggagggtggggaaggggcatctgccccacatgtggccccacctgtcaggtttccccgatgctcagatgtgcaccagctcccatgggaggggaaaggagtgtgggggcgagactttcagcctgtgctcccagcagcagtgtttcaaaagagtttgttttctttcaaaacagaatatatcgagcgtccggccggccagtgggtctggggccagagaccagagaagtgctgcaggcactgggcatgctgagtgacatcaccatgggccggtgctggcaggggctgggccagaccacaggcagcgggtagtgcagagccctccccgagctgggccaggtctggcacaggggtcccaaccctagtgggttcccagataggggctgaagagtccctgagtcccctgagctcccggtggactccactgtctcagtgtgccagcccagtcttcactccacccactggggtgctcctgggcagtgggcagacctcccgctctgtcctcctggcccagcatggaggtcttcgggggcgggagaacagtgaggtagtccccctttacctgcgggtgcactgtgcctcgtcaatcagtcttccaagcagcctttgaaactgcttccctctctacagacgaggaaactgaggctcacaatgcttactgtacatgcttagagtccagtgtttcctcttccctccctcccttccttcctccctccttctttcctccctccttccctccttccttcctccctccttccctctctccttctttccttctattcttccctccctccctccatccatctttcttccctcccttccttcctccctcctttccttccctctctcttccctccctctttccctcctttctcgctccttccttccttctctcctccctccctccctctttccttcctttcttccttccatccatcctttcctccttctcctctccctccctcccttctttcctccctccttctttccctccctactcctctccctccctccttccttctcttcatcctccccctccctctttccttcctttctctcccatcccatcctattgtacaataatgtaataatgcttcgctgggcacgtggcctcccagataaacactgcatttcccagactcccttgcaacacatcccagccatgaataagttctgattgaggccactccagctgaagctccataagcccttttaagccttgcccttaatggcaagaggtgtcccctcctccctccccatcttggacccaagatggaagtgacttgctgaggatggcgagggagagagatagaaggagccaggcccctggcactgtcaggccaccaatcagccctgggctgcctatctcccttttatgtgagatcttgacgcagggattgagcccctgtgtttttaggtgtctttgttgcagcggtgtaactaactcatgcagaattgccccaagcttcgatctggggactcacatcttttaccaccatgcgcttcggcctctttatgtttcatttgggcagttggatctcaaggggtctcgctgccagcaaaatgaacaagctgcaggctaccagggcaccacggtttggttggctctgggctctcagctctccatacccaacccaggacctggcccagggcaggggacgggcagagtctgagagtcccagagcctggacctgggtgggtgctttgggaggcacagaataaggagggcggctaatgcatatccagtgcatttgggaagggtgctgggctgggcatgcctctgtgtggtctccatccatctcttgggcacctgcaaggggtttgacccaaggctaggcacttcccacatggtccagcattctttacttttctttttttcttttttgagacagagtctcgctttgtcacccaggctcgagtgcagtggcaggatctcggctcactgcaacctccacctcctgggttcaagtgattctcctgcctcaccctcccaagtagctgggattacaggtgccccccaccatgcctggctattttttattttttatgtttttagtagagacagggtttcactatgttgtacaggctggtttcgaactcctaatctcaagtgattcacccacagcttcatcgaggtggaattcacgaaccagcagtccacccatgtgaaatgtgcaattcagtggtcttcagtatattcagactcgggcatccaacaccagaatcaatgttaggatattttcattctcctggaaagaaactccacaccttccagccatgccccacaacttccccaccccccattcattccccagccccagtaaccacccttctactctatccctctacagacttgccaactctgggcatttcattaaatggaattc

SEQ ID NO: 60 - DNA, 191091 bp, Homo sapiens
gaattctctggctgctaggtgcagggcaggtggtgagagcaccagctgttgtgggctggccatgtccccttctcaccctgtgtgggtcttgacaccttaactgctcagcagagacatctcagcccagggtggggggtgggacagaagggggttctgacccctggcttcaggctgggtaccttgcccaagaggtgccccagccctgacactgccctgctttgctgcagcccttcttcaccgatgagtgcacgttcaaggagattctccttcccaacaactacaacgcctacgagtcctacaagtaccccggcatgttcatcgccctgagcaagaatgggaagaccaagaaggggaaccgagtgtcgcccaccatgaaggtcacccacttcctccccaggctgtgaccctccagaggacccttgcctcagcctcgggaagcccctgggagggcagtgccgagggtcaccttggtgcactttcttcggatgaagagtttaatgcaagagtaggtgtaagatatttaaattaattatttaaatgtgtatatattgccaccaaattatttatagttctgcgggtgtgttttttaattttctggggggaaaaaaagacaaaacaaaaaaccaactctgacttttctggtgcaacagtggagaatcttaccattggatttctttaacttgtcaaaagttgtcacgagtgtgctgctattctgtgttttaaaaaaaggtgacattggattccgatgtcatcccctgtagtatggcgtggagcatctctgtctggaaaggcccgcctgaggcttgggcagccagttcagggagctcccaggcttggctctcggctagcatcctcagaggcccactccctttgtgccctgttgctattaatcgggacatatcggtttacttcgggtacagaaagtgcggtgttgaagtcctcgctgccactctgtttttagatctgccaagactgacctttgaactttcctgtagtcaatcttcctcgatctaccagatgggagagacccttggacaactttataaactcctgtttgccttttttggatcagcgacagcccccatcgctgtgactattggggaaaagacgaagctctttcataaattccatggagaggaatcaatatcccactggaaggctagaaatggacaagatagtgtatttgcaatcacaaacaaaaccctagtgatgaaaaataatttgtgatggcagatgcttctgatggtgtgatagaatatgtttttgaaaacaaaccatcgaaccccccgccccacccccaaaacgggcttccctgtgtttagggagctttgggctagaactagctacgatttttaggtgaaatgtccttgtaattgtacaaagcacttggtgcagtgtttgcgtggagcagcctgctgctttctgatgcattccctgtttaagtgcgtttaacatctacctcacaagccctgaaaccccaggcaaaacccacagaaagctcatacccggtgcaggagtttgccatcccaagtggctttttttccatatgtagccaaaaaggattgcagatagcgtcggtgcgtcccattcgaaccttgtcacgtttgagctatctttaccctgtgatttacttttagtaagggtgatcatggtgaaaatatttgcagacagctgttacagtacactatatggtcaccaagtaaccttatatttttctttatatattttacaaatgtaacccctgtcattgaagcaaccgtggaagaggcagggtcggtgatgtttaaaaaaagttccgaggtgatggcaaacatttaattttaatgaatgactttttagagtttatacaaaatgaccttagcttgctaccagaaatgctccgaatgtttcgtcaagactttaatactctcctaggatgtttctgaactgtctcccgaattaactttatgggagtctacagacagcaagactggaaaatctgattggagtttttgtctttcacattccttttgaaaactctttgttcgaatgcaaatcatcgacttaaaatactattcttaaccaaggcctggaagaaagaagacacttgcaaagccgctaagacaggaccacacatcttaaactgctgttcctaccatgcactaaactgtttttaagttttaaaccacaccctaggctccaggagtgttcaggaaagatggtgtttgtaggtctccatgctgtttggcgttggggggtgtggagggatcatccgtcgactttctgaattttaatgtattcacttagtaacaaaccatgattgtcttaaatgccttaaattattatgagatttcttgtctcagagcccaatcagattgtcaggaattaacatgtgttaggtttgatcacccttgaccacttcttatagatatttcttcaacaaatcatgtgtgatgcctgtaggaacacaactgtacctttaaaatattgttttcatattgctgtgatggggattcgaggttcctgtatgtgccactgttttcagaatctgtagttttatacaggtgccgaccctcgttgtgatgtatgtgctgtgcacattgacatgctgaccgacaatgataagcgtttatcgtgtataaaaagacaccactggactggatgtacacaactgggaaaggaattaaaagctattaaaattgtgccttgaaatgccaagacctggttccctccccctgtcttccaggggtctttctatttgaggcctgagcctcacatggctgggggttggggtgggggcaggagagacgaattttagccagctgtgtccacacaaatgtagccttgaaaacaggagcctggggggtgtgagtgtcacaaagttttgccatgacagagtcttgcagtttattctcattctcctgatggggctaattcacgccattcccgcactgtaactggccctaaactctgtgcccctcccattggcctcctgttctctaaagcaatttgcacttccctagggggagccgtgaagctccagagctggtcattaggaggcagactcgagaatatttttcaaaatctgagtagacaccatccatgggtattgaactcaatataatgaactgcagctagtcttttatttttaattaactaatttttttatattttttgagatggagtctcactcttgtcgcccaggctggagtgcaatggcacaatctcagctcactgcaacctctgcttcccgggttcaagcgattctcctgcctcagcctctcaagtagctggaattacaggcatccgccaccatgcccagctaatttttgtatttttagtagagacggggtttttctatattggccaggctggtctcaaacctcaggtgatctgtcctcctcggcctcccaaagtgctgggattataggcgtgagccaccatgcctggccagcagttactgttttataaggaggaaatggaactaaatcttatagaattaaaatcatctgagtgtatcaatcacagtaagggtgcaaactgttttgtgaaaatttgggttcaattatatacaattatagtatttataactagtctttcctaggaagtactcatgagtgcagtggattgcttttaagaaagctaaatgctggcctaatgtacctagaatctggggttcccctctccctgtaagacatatccagttgctttgcaaaaaggcaatcagggttggaaaatccttaattgtacgtaatttgctttccaaggcattatgttcttctacccttaaaaaaaaatcattatagagatgggttttcactttattgctcaggctggtcttgaacttctgagctcaagtgatcctcctacctcggcctcccaaagtgttgagattacaggcgtaggccaccaagcccagcccttttctgtccttatttcttgacagccatgatctaggtacgacaaagaaatacgtaggtgatgttagagggtgaattatgtccaaaagatctcttccaaaagatatgttgaagtcctaacccctaggacctcagtatgtgagtttgtttggaaatagggtctttataggggtaaaatgagactactgggggtgggccctaatccactatgactggtgccctcctacaaaggaggccatgtaaagagacacagggagaaggcggcgtgaagatggaggcagatgggtgatgcttccacaagccaagggctgctgaggggtgccagcaaatgcccaacagctaggtgagaggcctgggacaggggctccctcccagcctcagaaggaaccaattgtgcggacaccttgacctcggacttgtagcctccagggctgtgagataatcaattactgttgtttaagcccacagtgtgtggtactttgctgccaccggcggcctttcacactggggtggggaggggactgcaacccggacgatccagccatctggatctgcaacccctcatgcatgcagaccctgtaggtctctgtccacatctgtcctggccaaacaaggaatggctcatccagcttctggggtggaaatgtacccatcgttggcaaaatcgatcagctgaactgagctttcgtcttggctttccagctcctagcatagggggacaatggggagtcaaggacaggtcccaagagagattaaaaagtcactcattcacttaacatacttgttgagtgcctcctttgtgccaggcacaattagcgaaggaaacaaggatccctgctcacctagagcctcatcgtaatgagggagatgacagtgaatgaggaacacgggccacctgggaaggtggatggtgccaagacagagagagagcaggatggggaggtgtgggggtgggggtgggggtgggttgctatgaaggtgatgacgtctaagcaaagacttcaaggtgctgagggaggaagccgtgcgaggaacagtgtccaggcagagggaacagcccatgagaaggtgtggggctggcagcaggcctgggatgtttaaggcactgtgggatgggcagggaggaggcagagtcagagaggccagctcctggagccttggaggccatggtgtggactgggcttttccttacagtgagtttgtgccatctcatagccctgggatggagcagaggaaggttgagatgagatggtcggaagctgaggagtcccaggaggaagcgattatggggattcaggttgggtataaggttgcttaaggctggtgtggtggggagtgaaaagtcaaattaacaaaagaggagatggggtttctcagaatcagcctgctgcctaggggaccaacatcttcgtggatgagtgcagggtttggggccagccccacagcttcgtaggtgggtgacccacagcttccttgctgaatgaccgtgggtgagccaggggaccccgcctcacctctcctcatgattcccaccacctgtgtctggagtgaggctggagaagacgatgcatgtaaagtgcctgtcacagtaagcagtgactgtcgtctgttagattacaccctacttatccaaagtttcactttccatagttcggttacctgtagtcaccctcggtctcaaaatattaaattccaggggatacacagtttgtacgttttttgttttttgtttttcggtttttttttgagatggagtcatgctctgttgccaggctggagtgcagtggtgtgatcttggctcactgcaacctcagcctcctggattcaagctatgattctcctgcctcagcctctcgagtagctgggactacaggcgcatgccaccacacccagctaatttttgtatttttagtagagacggggtttcaccatgttggcctggctggtctagaattctagacctcaagtgattctcccgctttggcctcccaaagtgctgggattacaggtgtgagccaccacacccagccccctaatgggctgtcttcagaaacacagtgagtggccctgtgctggttccaccagactcagcctctcaagggaagaccctggccacaccctaaggaagggccttttctcggcatgacggtggcccctagcactgggctagaaaatcatcccattaacgggaagatagaaaagactgggacattaagaccataattaaatcttttaagggaatgacagtaatacagtagtccctccttatccacaggggacaggttccaaaaccccactggatgcctgaaactgcagatagtactgaaccctatacaggcatcccttggtatctgaggggactggttccaggacctcccctggataccaaaatctgggaatgctcaagtgcccgatatgaaatggcatggtatttgcaaataacctacgcacgtcctcccatgtcctctaaatcatctctagattacttacaatacctaatacaatgtaaatgctatgtaaatagttgtcatactgtgctgtttagggaataattacaaggaaaaataatctgtacatgttcaatacagacccagcttttttcccaaacgttttcttttttttttttttttttttttttttttgagacggagtcttgctctgttgcccaggctggagtgcagtggcacgaactcggctcactgaaagctcctcctcccgggttcacgccattctcctgcctcagcctcccgagcagctgggactacaggtgcccaccaccatgcctgactaacttttttgtatttttagtagagacagggtttcactgtgctagccaggatggttttgatctcctgaccttgtgatccacgccttggcctcccaaagtgctgggattacaggcataagccccaatgcccggcctcttttcttttttctttcttttactttctttctttctttctttcttttttttttttgaggcggagtcttgcgctgtcacccaggctggagtgcagtggcgcgatctcggctcactgcaagctccgcctcccgggttcacgccattctcctgcctcagcctcacgagtagctgggactacaggcgcccaccaccgcgcccggctaattttttgtatttttagtaaagactagggtttcaccgtgttagccaggatggtctcgatctcctgacctcgtgatccgcctgcctcagcctcccaaagtgctgggattacaggtgtgagccactgcgcccagcctctctctctctttccttctttctttctttctctttctttctttctttctttctttctttctttctttctttctttctttcttttctttctttttctttctttctttctttctttctctttctccttccttccttctttccttacttttttcttttttttttttcttttttttttttgtcagagtctcgctgttgcctggcacaacagcacctctgcctcactgcaacctctgcctcccaggttcaagagattctcctgcctcagcctcctgagtagctgggactacaggcgcccaccaccaggcccagctgatttttgtattttcagtagagatggggtttctccatgttgtccagggtggtctcgaacccctgacctctggtgatccacccacctcagcctcccaaagtgctggaattacaggcatgatccactgcacctggccctccaaatgttttcaatctgagggatgcaaaacccacagatatgagcgccggctgtatacactcttttttttttcctatacatacctataatgaagtttaatttctaaattaggcacagtaagagattaacagtaactatcaaattcaattataacaatatgtcagcatcactactcctattttgggatcattatcaagtaaaatccgggtgacttgaactactgactcataagcaggaccgtctacagtgtggagacgctggacacaggcacgattccgtcccgggtgggacagagcctgggcggcacaggattccatcactccactcagaatagtgcatgatttaaaacatacaaacgtacatacaaactggccgggcatgacagagcaagactcagtctcaaaaaaaaagacagccctttaggaagactgctcctctcaaatgcagcctgcactggcttactctggtctacattaaaataagatcaagggctcatgagctcagagtgtttcttcaatgtgaataattttaagtgtcctcaattcatcattcaagttctttctttctttctttctttctctttttttttttttcttttttgagacggagtttcactcttgttgcccaggctggagtgcaatggcgccatctctgctcaccgcaacctcgcctcccgggttcaagcgattctcctgcctcagtctcctgagtagctgggactacaggcgcccaccaccaggcccagctaattttgtagttttagtagagacagggtttctccatgttggtttggctggtcgcaaactcccgacctcaggtgatccacccacccgcctcagcctcccaaagtgctaggattacaggcgtgagccaccgcgcccagcccatcattcaaattctatatgcttcttatgaaaggaaggagggaggctggacacagtggctcaggcctgtaattacaacactttgggaggacaaggtgggaggatcacttgagcccaggagttcaaggctaggctgggcagcatagtgagaccccatctctacaaaaaaatttaaaaattagctgggtgtggtggtgcatacctgtagtcctagctacttgggaggctgaggtgagaggatcctttaagcctgggagttcaaggctgcagtgagctgtgattgaggaaagtgacatccgtgctggtccatgtcctgtggtggggaagggggacagcaacccagcacagacccaccctcccccaggaccccatgtaggaggggtcctggatcgagctagaagaactggggcccctgtaatgaatcaaactgcccaggagacccagggactggaacacccttgctaggcaacacaacatcattttcacgcccacccctgcccccagcaagactcctctgctgggtctcagatcttccccactgggaggctgccagggttcctcagcctccgtgggtccacacccaatcacagccatccccagcctgtcctttcttccgtccaggaggacaaggcaagcccttccccccacccacccctcccccagcagcctctcactccatctagttggtttcacctcatcgactctgcagtctaaagacctctccatctgcacaggacctctgtgcaggccgcctctccctggacctgggtggctgcagcagccccttgactggcccccccaacttcttcctctaccctgacaggcccttctctaggggccttctcaccgtgcaagctccatcctgctccctgggctgggatgctttccacagccctgcgacgctcttagactgagatcacagccgtcagccaggccgttctgatcactcactactgcctaatgagctgccccaaacagtgacaaaaccgccaccatcttataactcccagtgtggcaggtcagggatgtggacagggtctggctgggtgatttttctgctttttatggctttgaagatcttggcattggatgggctcatctgggggtctgaggccggcaccctgatgggcaaggctggagggctgggctcagctgggcatcggccagagcacccacacagggtctctccagcatgggagcctctcctggggctggaggccttacgaggcggctcagagggctccaggacgcccaaggcttcttagggccaggcccagaaagttccagaacctcattcctgccattggtcatgaaatcagaccagctctgattcaaggggagaaaacaggcctctgctcacagtgggaggactagcacggaatgtgtggtcatctttcatccgctgcagaggctccatttgcccttcccggtgcccatcctgccagctccctccccacatccctgtgctcggccggctcccggcacattgacgttctctcagagcacacaggtaccatccgcttggccacagggcctttgcacacaccaacctcctgcctggaaggatcttccccacccctgcacttcacccagctggttttcccagggcagctgtgacaaatgaccacaaaccaggcagccttaaacaacagaaatgtattgtcttgcagttctggagggcagaaggcagaaatcaaggtgtcagcagggccctgctccctcagaaggctctggggggtggtccttccttgcctcttctggctgctgctggctgccagcattccttggcttgcagctgcatcactcgattctgcctccatcaccacatggccttctcctctgtgtgtctgtgtgtccagatttccctcttcttatgaggacaccagtcactggatttagcctcgtcccagaattccagcaggacctcatcttagctttcattgcctctgccaagcccctatttccaaatgaggttccattcacgggctctagggagacaggacattgggaagacacccatcagcccacacaccagttactcagattcattattaaagtcatgattcaaaggtcctttactctaaggatgaaagaagtgaggcatttggaagataaagggcctggcatacagtaggtgcttattccagccagctagtgctgtcatgtccccagagccttctctggccactcccagcccacactgggccatgcgttgtcttatcacatactctctggcatcctaggttaggttccccagcaacaaaacccaagactgggatccctgagcaaagagtttgtcaagggaggagctcccaggaagaactggcaaggaaaggagagcagcaggacaggccaaagaagcggcaatcacaactcagcctggtctggcctgattcctcactccccggggtgctctggggtaccaacagcatcctagagctgtcccaccttggggcaaggggctgagcatctgtacccccttgtcaatcagtccctggctgcaggctgccctggggatcggggagagtggaccctccaggcctttccaggcaatgtggtccctttcaggagcagggaagctccaagccatcagcagctggggggtgaagacaccatcctgggaaacaaaccacaccccgcagcccttcctaacccctacacagagtaattgacttgtgagttacgcacctgttggggcttgctttccctccctccccaggactggaatctttgcaggcaggggctgggcccatttggttcaccacctatatagatatagatccccagtgtgctgctgggcacctgggagctgctccgtgcctttcctgatgtcctcaggtgtgcacgcccactggtgagcatctgatccatgctctggccccagccaaagaggagaccccaagccagttccagccatccagtcagtgacccagcacacgtagcagccacatccggttggccgatgggaagcagaacaacaccggctcaggaggttggtgcctttttgttttttttttgagacggagtcttactctatcaccctccaacagtcgggattacaattggacatgagattcgggtggggacacagatccaaaccctattagccttcttccagactgcagattgccagcttctccctgtgtccccaaatgacaaaggggcaagggggctctctggggtcctttttttttttaagatggaatctcgctcaattgcccaggctggagtgcagtggcatgatctcagttcaatgcaatctccacctcccaggttcaagatattctctgcctcagcctcctgagtatctgggattacaggtgcccaccaccatgcctggctagttttttgtttgtttgtttgagatggagtctcactctattgaccaggctggagtgcaatggtgtgatctcggctcactgcaacctctgcctcctgggttcaagcgattctcctgcctcagcctcctgagtagctgggattacaggtgcctgccaccaccactggctaatttttgtatttttagtagagacagagttttatcatgttggccaggctgatctcgaactcctgacctcgtgatccgcccgcctcttcctcccaatgtgctgcaacctctgcctcctgggttcaagcgattctcctgcccagcctgttttgttttgtttgtatttttagtagagatggggatttcaccatcttggcgaggctggtcttgaactcctgatctcgtgatccacccgccttagcctcccaaagtgctgggattacaggcatgagccactgtgcctggccatggggtcccttttttaaaggcactaattctcacttatgaaggctccatctaatgacctaatcgcctcccaaagtccccacctcctaacacccatcacattaaggattggggctcaacatatgaatttgggggggacacagacatcagaccatagcaggtgggacaggatgtcagggcgtccattggaatcaggagggaaggaggcagcaccaccccttcctggtctcacccaccatcggggtcacccccagtggctcttgagcagaggcctagatgccttggggactcctttcctgaagtcacatccaaagtcaggtgacacacttcgcttcttcaggcaactcttactccactctgcccagcttcgcacaccagtccatggtgtgtgtactgggggaacagggggctctggctggagcagttccctgggccccaggccttgggaggcctcatgcactgagctgccgtccacatttctggtgcctgggactggctggagctagcaggttccatcctgtgggatgtcctaaccctggacttggggcctatgtgagcttcagtcctcatttcttcccttgggggatactctgcgatctctacccaccaccctccccctgacacactcacagggtggacctgatgactagaagagcttcaggacttactcctgtgggtcatcgtgggaccaagtggcttagtgacccctggttaccactcagtgctggtttctttggaccccaagccccagtgcccacatctttgcctctggactggcctcggtcagttgccctctctggaacttccccatgtttggtcctgaaatgtccctctgtgtggagagcccctgactctccagctcagagtggacctcgatcctgggagtggagctgggcagcaagcccagtggggacagcctgggttcagggggcaggacctctggcactgcctgcatttgctgtgagctttgagcaaggagactgaacgcctctgagtcctgttccttcaaccacgggatggaaataacaataacaaacccttctcacagtcattatgagggaaccaaggcagagcttctaaaaactcagacatccaagtgtctccagggctgccttggttccactgggccctggttcccacacctgcctaccatgtgtacttttgtctacctgaatttttgttttgatctattcgtttgttacttaaataattttcttttaaaattttacaggacaagcttcagtggaaaaacattgtcccttgtcatacacagaaggtagcccatgataagaaacacaaaatgatgttgagaatttcttgcaagatgcaggtgtctgccaaaagctctgagcctcgggcttgctgtctctttttctccccccacaagagagatttgcaagtgttagaggggtgttaaggacttactgtcaccaaacagagacattctcctgggagtgagaatggctgaaagggaatagctttctcactgggcgatccaatgtgacttaatgtaaccaacccatgttccacctagaaatgcctctcctgctacaggccagtgtggcacctggggcagcaccctgttaatccatagaaagggttcagcacaaccccaggccggcgagtgctcacaagggtgagctgtgatttcagtgactcctatggctcgttggacgccactgtggacacagtgaggcagcggaggctatcttcccagacaaagcagtggcaggtccctgcaggacctcccaaggcatctgacccaggagataaattgcatttggcaagagacctcatatcttcaaagggctccctgtcaccagggccactcacagcacctcagtcgaccagagaccctgcagccctgggccgtcccagagcaccccacttaggacttgcttgcacgtggctctctgcaaatgtcagactcctgacaaaatgatagacaaagctaagtggtggtgacgtctttgactgtcctctcactgagaggtgggtgcctatgtcccttcctcttcagtctgagtgggcttctaactgcttccaccagtagcattggcagaagtgccacagtgtgatttctgaggctgggtcaccacaggtgatgcttggagccctgagccactgtgtcaggttcatacctgaggaggccatactgggaggaagcccaagccacacagagatcagaagtccaaccacctgaagacgccatactgggaggaagcccaagctgcacagagaggccaagtgtaggtgttccggccagtcctagctagatctggacttcaaattgtcccgacccagacatcatacatgtgaagaggcctccaggatggtcccagttcccatccatttgagtcttcccagctgaaattccagatgtcatggaagagacaagccatcctgctgtgtcctgtccaagctccttgtaacagaaccagcgagctcaataaaatggtggttgccacgtgccactgaggtttgcatcggtttgttactcagtaagagatgacgggacaggtgctaatggagaggtggggaagagagtggtgaggcacgcaccccattctctctgcagcccgcttcctctccggggccgtgggacatccaaggcaagatggttgcttgggtatctggcttctttgggctggaaggagagctgggacccgtggtggcgaacaaagcttgcctgtctttgtggctcctggcagaagccaggattttcatgtcctgaagggactccagtatcaagggccagtgcaaaccctcgttggtgtccccagatggctaatagtgcctgctgagccctgaggacctggaggggtcccttagagcaggatgaattgttcccagcccctagaattggcagagggccttcatctatacctggggccccaagcactgaaagcttctcacccaagagccagcagagaggggatggctgatcccttccctctaccttcctgagcttcccagactcagggcagaggctgctggaccatccactgtctgtctccctcgaccttcagccagaacggatggggcctgggagaagacaaagtcatgatagatcaaagacaacaacaacttatccaaggaccctcagctgcctggggaaggaaggcccaggccaaagtgtgatggagactcagctgagaattctagccaataagggaaaggaagggcatttcaagaagagatggaattagaaacgacagagcaattaaacttctaaaataaagtgtagatgtttacaataacttttaaatgttcaatagatgggtttaaaaaagaaaaaggatgatggctgagtctgagaactacgagatcatccggcaaagatatctcccaaccccccacccagtttccctctgtctgcgcccagcctcacacgccttctttctgtcctgcccccgggcctttgcacacagcccctgctagaccttccatgcctggtggcttcttttcatcacgcggcactcagctccggctcaggggcacttctgaggacctcgtaagatgtcctctctcccccgtcactccccccttgtggcacttagaattattcatatgatcatattcatttattacacatttttaagttctgcccccttagcaggggttgttttatgccaagtgttggccttgccatccttggtcattgctgtaccccagcaggggagccgtgctcacggtggcccaacagtgtgagcttgttgagtaaatgagcaaatgggatctgaacatcttgtgataactggactagaatttgtcatatgtggttaaggacagatctttggttttttgtttgtttgtttgttgttttgagatggagtctcgctttgtcacccaggctggagtgcaatggtgcaatcttggctcactggaacctccacctcccaggttcaagcaattctcctgactcagcctcccaagtagctgcagctacaggtgcacaccaccacacctggctaattttgtatttttagtagagatggggtgccaccatgttggccaggctggtcttgaactcctgatctcagatgatccgcccacctcagcctcccatagttctgggagtgtctcccagggcgggcacatacttctggtggctgaggaaatggctatggatggctggcagacacagcacagtcttgttaaactatggagtggcatgatggttcccttttccttctccttcatccttctgattgggaatggaaaactctcaactcatgccagtgtccccctcacaacctgctagtacttgctgattctcacattttaacactgagagtgcaaagacacaggctggtgctcttggaaggaccagtattcatttggaataccaccatgaaagtgcccagagagatgagccaagccagcccacggcggaagaactacctagccaacttgtggacactgagttaaagaaatagctgggctttaggcagggcgtagtggctgaggcctgcaatcccagcactttgggaggctgaggcgggcggatcacaaggtaggagactgagagcagcctggccaacacggtgaaacccgtctctactaaaaatacaaaaaattagctgggcgtggtggcatgcacctatagtcccagctacttgggaggctgaggcaggagaattgcctgaacccaggaggcagaggttgcagtgagctgaaattgcaccactgcactccagcctgggtgacagagccagactccgtctaaaatatccagaaagctagaaagagaacacttcataacaaaacgtaggtatgcagcaatagctgtaattaggggggattttcgcagcccaggatggttttgttataagagcctaaagataaaatctatcaaatattcaaggtaagaaagaagaagaggaaagtaaactaaaagaaattagaatgaggggatttgatagcattaaagctgaaattagttaagtcgaaaataaaaaacagcagaaagcatgaagaaaatcagaagttggttcattgaaaaggccagtacaacgggaaaagaacaattcctggcaatcccagttaagaaaagaaaaaagagaaagagaatgaaagttacaaatgtaggaatgaggaagaggttacagcccccaataaagaaggaatccattgattatgagagaagaaagcatagacaccctaccactgcagccacacaggtgaaaatacaagggaactgggcaataccttggtgaaattcaaacactagaattgatccctgaagagacagaaaccctaagcacaccatgaaaccaccggagaaagggaaaacgggttgagagatctactattttgaaaagtcaggcctggcgcggtggctcacgcctgtaatcccagcactttgggaggcgaaggcgagtggatcacgaggtcaggagatcaagaccaacctggctaacagggtaaaaacccgtctctactaaaaatacaaaaaattagcagggaatggtggtgggtgcctgtagtaccagctactcgggaggctgagccaggagaatggcgtgaacccaggaggtggagcttacagtgagccgagatcaccccactgcactccagcctgggcagcagagtgagactccatctcaaaaaaaaaaagaaaagaaaagaaaagtcagccaggcgcggtggctcacatctgtaatcccagcactttgggaggccaaggtgggcggatcacgaggtcaggagatcgagaccatcctggccaacccggtgaaaacccgtctcacctaaaaatacaaaaaagtagctgggcgtggtggtgggcacctgtagtcccagctactcgggaggctgagacaggagaatggcatgaacccgggaggcggagcttgcagtgagccaagatcgcgccactgctcttctggtgacagagctagactccatcccaaaaaaaaaaaaaaaaaaaaaaaagtcaacagcctcagtggatttatagctggctcctaattatctctaaagtccagagcacttcccagccacttattgataagaaggagacaagtatagacttgaagggttagatgtgcgtttactgcactgaccagagcctgagtcagaaaacagaggtcagagtgatgtgcacacactgatgccatgtttataaaaaccagaagccggccgggcacggtggccccactcgactttgggaggtcaaggcaggtggatcacttgaggtcaggagttcgagaccagcttggccaacatggtgaaaccctgtctctaccaaaaatataaaaaattagctggatgtggtggcacacgcctgtaatcccagctactctggaggctgaggcaggagaatctcttgaactcaggaggcagaggttgcagtgagccgaaattgcggcagtgcactccagtctgggttacagagcgagactccatctcaaaaaaataaataaaataggccagacacggtggctcatgcctgtaatcccaggactttgggaggccaaggtgggcggatcacctgaggtcgggagttcgagaccagcctgaccaacatggagaaaccccatctctactaaaaatacaaaattagctggacgtggtggtgcatgcctgaaatcccagctactcaggaaggctgaggtgggagaatcgcttgaacctgggaggtggaggttgcggtgagctgagatcacgccattgccctccagcctgggcaacaagagtgaaactctgtctcaaaaataaataaataaataaaaacataaatacatagaacaaataaatataaaaaccaggagccacaaaaactcgacacatgagcatgtgtgcatctgaatgaacatggagtggagggtagtgtgtgtccccaggcagcccacatggggtccctctggggatggcagtggcataaggggataacatcattcccttttggcatagttgcatatttgtttcttgcaaaggtgtatagtgttcaactcatgacaaaattagaagggacgcatatctctgcttacacatctaagctgccaccaaaagaaacgaactgcgagcgccttgtcatgttcacaccttccgagaaaggtgaatcttctacataaaaaggaaagaagggctgggagaggagtcccatatgtgttccttctggccgccatgacaaagcaccacagacgggcaacagccgattatcctctcactgccctggaggctaagatcaaggtgtggcaggactggctcctccggggcctctccccttggcctgcagatgccaccttctccctgtgtcctcctgtggtcatccctctgtgggtgtctgtgtcttcatcccttcttgggtgttttgttttgttttgtttttgagacagggtctcactttgttgcccaggctggagtgcaggggcgagatcatggctcactgctgccttgacctcccaggctcaggtgatcctcctgcctcagcctcccaagtagctgggaccaaaggcatgcaccaccacacccggctgatgtttgtatttttagtagagggggagtttcaccatgttgcccaggctggtctcgaactcctaagctcaattgatccacctgtctcgacctcccaaagtgctgggattacaggcgtcagccactgcgcccagccctcatgtcttcttacagggacatgagtgaggtggaatgagggtccacccatataatctcattttaccttaattgcctctgtgaagaccccatttccagatgcagattctgggggcactgggattagcctttaacctatgaaactgagggcacgattcagccatgagataccctttgagcatcagcgtggaagtggggtgtcgagcacagtcactgctcatgacattatgcattatcccctccctgttctcctccagggtggggcacctcacagacgatgtgcagtgacttgtccaaggtcacactgctgtgagcagcagagccaccgtaggatccaccacagggtgagtttccaatgtggggtatccttgacccaccgtgaacacatctgcatgtcccagggtgagaaacgcagtgtgcacaaccgtacctcgggcaaaccccccgatccaggtgcagagaccgcctaagcccctctcaggctctgtggccaggaaggggcacccagacatgccctgggcaggtgggcagtctctgtcctggtccgggtttgcccctcagacacactcacacttcccagggaggcccctgggctcttctcagttccttgacaccagcccaggagattgtggatttcaagagaggagcaaacagaggctggggaaagccccagaacccgtgagccccctgatctttgaaagcagctccagggccaggtcctgatttgtacttcagagctaatgtgattagggctaggattgtcgccagagtatgttaatggacttcaatagcccccaattacctggggagggggactgcctggggtggctggagcctagccaggggtctgggcagagaatgggctgggaccggggctccatctgtgctgaaattcttcctttggggccttctggagaggccctgaagaccccatgagtggccacctcatttcacaggtgaggaaagccaggttagaggcagcttaagttacctgcccaagttcttcctacaggtaatgcagggccacattcagccccaaatctctctctcttttttttttttttttgagatgaagtctagctctgtcacccaggctagagtgcagtggcacgatctccactaactgcaacctccacctcccaggttcaagcgattcccctgcctcagcctcccgagtagctgggattacaggtgcacaccatagcacccagctaatttttgtattttttgtagagacagggtttcaccatattgggcaggctggtctcaaactcctgacctcaagtgatctgcccgcctcagcctcccaaagtgctgggattataggcatcagccactgcgcccagcctcccaaatctctttaaccctaaaccctcctcaggctccttctctccagtgacaggctcaagagacagcccaggctggaaaggtaagtgggtccagaggtgcttgggcctcattgccattgaccaagtcacagaggagtcaaagggcagcgcaggggtttcccaggactgccttaacaaacgtcacaagcttggtggcttaaaacataaaaaatccggcagggcgaagtggctcttgcctgcaatcccagcactttgggatgccgaggtgggcagatcatgaggtcaggagttcaaggccagcctgaccgacatggagaaactccgtctctactaaaaatacaaaaaattagccaggcgtggtggtgggtgcctataatcccagctacttgggaggctgaggcaagagaatcgcttgaacctgggaggcggaggttgcagtaagccaagattgcgccactgcactccagctcaggtgacagtgtgagactctgtctcaaaaaaacaaacaaaaaaacatcaaaaatctgttctggaaactagaagtccaaaatcaaggcctgggcagggctgtgcaccctccgaaggctctgggggaggatcctcctgcctcttccagctcctggggtctcctggcgctccggactagggctgcattgttcccgtgcctcccaccgtcttcacgtgggcttctctgcttctgtttctctcctctgctctgagaagagtgcctacattcaatttacgtcccacttgaaactcaagaggacctcatctccagatcctaagcttaattccatctgctaagacccgatttcccagtgagatctcactcacaggccacaggggttaggaagtggacatatcttttttttgtggagggggacaccattctacctcctgtagctgaggaggaacgagcccatccccacatcacccagccttgctgggtggggcccccccttctgggctctggagacaagaggcagaggctggcctggctgacccctccaagatcagggcccaagtcccgtgaggacagaggagccagcccggcctgggctgtgggtgattagagaagtgacataacccagaggaaggcaggtccttaaaagccagtcctgagagggtgggagcaagacctgccatcctcctcaccagcccacaggctggtgccacctcccactctctccccagtcctggtggtacgagctgccttcttcctgcaacccgtccagccccagggcctttgcacctgcacatccacctggagggtttgtgcccagatcttcacaggtgggctctcccacactgggaaggcatcctccctaaccccagctacagctacagcctcccagacactccctctcacaaccctggcctctgcccctccctagcctgcgtgaacagcccagaccatcgagttcccgtctactgagtgtctcctcctggactccgagccccatgacagcaagcccttgcctgtctcacttgtccctatcacggctgcatcccgtgtctgtaagagcacccagcatgcagcagggcctggatgaatgcttgttgagtgaatgagtgagcactcacagagaggtggttggtttctaggttcacccccagccctgaagatctctgccaggcagctggagtctggggaggtggttccaaactccacgcctcctcctgtctgcggagagggccatgggtttgtttggcaacctcagggtgctggctcctcacagacacctgggtggcttcctccagctggctgggatccaggcagcccctgggagggtccagccaccttcacacctggggcacggtcagcctggctctttgctggagtctgtggtgcccagatttggagccttttggtgagaaatgtgcattttcatggcaagatggtctcaggaaatctccacctattcatgtgcaaaacacaggggcgtctggggtccccaggggctggagctttgacaaacaaggatcagagggagtggcagaggggcctgaagtccaaaatcaaggtgtgggcagggctgtgtgcctgtcctgtgcggggccaggagccaaggccagaagaggtgcagggctgggaggctggccagagcatcccggtctaattctgctgggcctgaggctgaggatgacgggcctctcgtccaggtcacactagtgctggggccacacttgctccaggcagttggtcatgtgcaagacagcaggggtcaggatgcctggattcagccccagcgtagctgctgactccaagaggggctttcagcaagtcagcccaccgccccgggcctcagtttccttctctgtgaaatgaaacttggtcacttctactgttcatttctggctctgaaaatcttaggattccagaaactccatcttctgcccagcgcaggaatccttctcgtctttccttgaatactctcagtgaggaggcgctcactctcaggaccaaaggggctggacgcaggagacagagcacggctggattctctgctggacactctgattgtggccagtcctctctggggactcacacggggatccctagaggctcaagcgtcgtctcccccaggctgtcagataagatctgggatgcccagctaagtttgaatttgagataaatgacaattccttagtgtaagtataacccaacaactgcaggggatatacttatactaacaacttattcagtgtttatctgaagttcacgttgaactgggtgttctgttttgcttgctaagtctggcaaccccaacatgtagctcttctttctggagccctggggactcttccacacccctttttccagggtaggtttgacagagggactatgacccttttttgtgtgggggggatggagttttacttttgttgcccaggctggagtgcaatggcaccctctcggctcactgcaatctccacctcccaggctcaagtgattctcctgcctcagcctccccagtagctgggattacaggcatgcaccaccacgccctgctaatttttgtatttttaattttatttatttatttattttttggagatggagtttcactcttgttgcccaggctggagtgcaatggcgtgatctcagttcactgcaacttcctcctcctgggctcaagcgattctcctgcctcagccccctgaatagctgggattgcagatgtgcaccaccacacccagctaattttttgtatttttagtagaaacgggatttcaccatgttagccaggctggtcttgaactcctgacctcaggtgatcctcccgcctcagcctcccaaagtgctgggattacaggcatcagccaccacacccagctaatttttgtagttttagtagagacggggtttcaccatgttggtcaggctggtctcaaactcctgacctcaagtgatccacctgcctcagcctcccaaagtgctaggattacaggcacctggccaggactgtgactcttaagacgagggcaggaaggatcgaggcctggccctggctttaggttgagctattgggatcccgcttctgcatggtcctgacccggggccatgcataagtgggagaaatgcgtgcttctgaggggggtgtgctgcgggccccctaggatcacaggcgcccatgctggggtgcagctgacggtgccccaagcagtgcccctctggcgcgcctccctctcacctccaagacctccagggacagccgcaggagacctttgcttgaaagctctgctaactgtctgttgtcttccctcttgccttcttctgcagtctaatacactatctggctgaaccaccaccctccaaaccccagtgggaggtgaacaggccagccagtcacccccttgccctgaggagttcgggctctgcccctgaccctcccctttcatccctggagacctacctctccaatttaggattctcagcgaacggtcccaaagccaactctggaaatttaacacactgaggacctcccaggcctcccggtgcccacagcttattgctgtggtagtgaatgaacaaacatcctactccaacggcacttatgctgaggtgggggagagaagacaagtaaaacaagtaagaaaatgacacagtgtctcaggaggtggggagaggcagaatggagaagaaagaaagggagggctgcagggaaggccagggagggggcgggatgggaggggctgccactttaattccagtgttcgggagaagctgtgctgaagaaaaagtgtcccttgggcatcgatgagagggcagcctgcaagtggatccagggagggtgcctcaggcagaggactcagtggggacaaaggccaggagactggactggaagagagaggaggtcagggcagctgcagcagcgggtgggtggagagcagagagggagctgcagaagcaaagggcctagggggccatggcaaggctcgagctttgcttggagtgaagtgggagccactgggccttttttttttttttttttttttgagacggaggcccgctctgtcgcccaggctggagtgcagtggcatgatctcggctcactgcaacttccgcctccctggttcaagcgattctcctgcctcaggctcccgagtagctgggattacaggtgcccgccaccatgcctggctaatttttgtattttgagtagagacgcagtttcaccacgttggtcaggctggtctcgaactcctgacctcgtgatctgcccaccttggcctcccaaagtgctgagattacaggcgtgagccaccacgcctggccgccattgggggaatttaagctgagcaggagcctgatgagacttgagctgtaaaagggtcttctgactgtgggactgagaacagatcactgtggaacaaggaggagagaccacctgaaggctcctgtcatcacgaggggagcgaggtgggtgcctggaatgccaggggaactggggttggagagaagaggtggcgggtgagccaggactctgcacacgtcatgctgtctcagctcacagggacagccaggctgcctccctgcccttgaccttgatgacccctgacactttgggttggaaatgcatttgtctccatttcaatgaatgatttattttccggtttataaaatgcacccaccatacttgctcatgagctcacagacccaaagaaagaacgtcaggaatttcccagcaggacaggggccgggctcgccccgccccacacgcaggcatctctgctcagccccctcacccctgccagcccagcacccagaggctgaagccagcagcagccccgtgaggccccacaggccctgtgggagcagattccaggcccagcgatcaaccctcgcctacggccaccccttcctgaaaggtcccctcctcggccgtcgaaatcagagaccgccttgaccggcttgctcgtgggctggcagctggcaagcaaggggacgcatggatttccaggggcagaaggccgtcagctgagagctcgggggctcccaaaggacaagacccagcaagcagagagggaaggtggagggcacagcccaacgcagccctgagcctcaggggacggcaggggaatccactcagctttgctgtgcaatcctggacaaatcacttaatccctctgttctgcatgcatccagctcaaaacggtgcttaggaggctggggtgctgggacccttcattaagccatgtttgcaaagccctccaaaggctgcagatgaaagtgcctattgaagtacaaagcgtgtctccagtaaccctctccgtcccaggcgggactggagacccataaaagagaaggaaagaggcggccaagggcatttggccccaagcacagaggccaccaagactagaccctggcaatgtcggcccctgagaggcacctctcagcagcaggctcctcaccaccggctcctgtccctccttgtccctcactaggcagcaccccagcactctggccttcctcagcaagcccatctgcatgggggacagagatggatcagaaccctctgcaacagctgccagtggaagccttagaccagcgttcaaggctccaaagcatggccccagccagcctggccctcactgtcctcacacaggccacctctgcgcctcctcctgatctcctccagcctagacgtcctctcctctgctcgtctgtgcctggaggtccagccctggggaggctccctgcctccatagccatggttcgtgggtgctcaggatcccggcatgggagtctgggtgtgcatatcccctcacccctggggtcctcagatgtcacatccgtggagcccaccgacctcaggcactggggctcttccctgacccctgacttcccctgccatctttctacacagaaacaaccccatgccctctgtctggaatattccgaactgccctccttcatctctttgcccctgcacttggggaatgtctgctaaaatgactctcacatgtcactctgcagtggcaaaaaatcagctccagtccctcagccaccacccagagggcctgcggaccctccctccttcattccccattccacgtcccagcccttcctagccctccacatcagtgattcacaaaggacacagttctagcatgaccagggcttgctcgggaagaggctgtgtggcagagggcccttcctggccctggcttccctggtgggggccctacaggccagccttccctcccccacagtgcacaggccagtgccgcctgctggggtcctgaccccacaaggacaagttttccctgagctgcccccccaactctaggggcaacctccagatgtgccagggacagccagggcccccagagactgaaacgaggtcccagggagggaaggatgtgtcagtggtccccccggggtggtccatgacacctcaaggtgccaatcacccacatgaggcccagcaggcactgaagcaagcccgcacctgggtgggcacgggacaggctttctggagagcaatttggcagtgcaaggcagtgcaaagcaaagcaagcaaagcacggatcccacccctatctgtcactcgccctccaggcctggagcctgagagagtgaccacgggcatgcagtgcgtgctcacatgggggctggagaggttgtggaacggaggttcctcaaaaactcaaactagggctgggcgtggtggctcaaacctgtaatcccagcactttgggaggctgaggcaggtggatcacctgaggttaggagttcgagaccagcctgaccaacatggagaaaccctgtctctactaaaattgcaaaattagctcagcgtggtggcgcatgcctgtaatctcagctactcgggaggctgaggcaggataattgcttgaagccgggaggcagaggttgcagtgagcggagatggtgccaccgcactccagcctgggcaacaagagcaaaactccataaaaaaaaaaacaaaaaaaaaacaaaaaaaaacctcaaacggaatggctcataccatccctcagtcctactgctgaataacactccaaagaactcaaaacacacgtctacacaaaaacctatacacaagtgttcacagcagcaaattcacaagaaccaaatgtcaactcgaatacccgtcagtggacgcaaagatcaacaaaatgccatcttcccatacaatgggatgtcgttcagcacgaacgggaatgaagccgggacacaggccacagtgtgggggaccttaacagcatgatggccagggaaagaagctgggtcaggggccacacgttgagtgactcagctctatgaaatgcccagaacaggcaggaaaccagaggctgggggagggggaattaggagtgactgctaaggggtgatggaaacattccagaagtagatggtggtggtggttgcaaaacattgggaatgttctcaatgccactgaactgtaaactttaaaagggataaaacgggaagtcttatgtggcatgtattttctacaatgagaaaaactgttatccttggctgggcacggtagctcacacctgtaattccagcactttgggaggccaaggcgggtggatcacttgaggtcaggagttcgagatcagcctgggtaacatggtgaaaccctgtctctactaaaaatacaaaaattagccaggtgtggtggtgggtgcctgtaatcccagctactcgggaggctgaggcaggagaatcgcttgaacctgggaggtggaggttacagtgagccaagatcatgccactgcactccagcctgggtgacagcgagacttagtatcaaaaaaaaaaaaaaaaaaaagagagagagagagagaaacaactttagtgtcaatctaaaggggacaggtgaagtaacactggaatttatattctgcagcattaaaaaggatgcaaaacactattcagtgatgcagaaagatgttcccaagctattcagtcaaagaagcaggtttttgggaggctgaggtgggcggatcacgaggccaggagatcaatatcatcctggccaacatggagaaaccctgtctctactaaaaatacaagaattagccgggcgtggtggcgggtgcctgtagtcccagctactcgggaggctgaagcaggagaatcacttgaacccaggaggcagaggttgcagtgagccaagatcgcaccattgtactccagcctggtgacagagcaagactctgtctaaaaaataaaaataaataaataaatctttaaaagagcaggttagaatggtttactagaaaggtatttgaaaaagatacacatacatgactgtgcttggaagttctggaaggacaaacaccacaatgttcatgctggtcatctctgggtaatgggacacagagcatttttgtgtgtgcatctctgtgcctgcacatttgttctcagctgtttctaaaatttccacagcaaacttttgtaaccagaaaaagtttcagagcaggaaaaaaaaaaaaagcaataagtatcaggatttttctaaaagtccagccccccaacccccgcatcccagcatatggaggtgtggagtgaaagccatcgtgggcggcccctctccagtccctgtgggcagtggacaaggatgaacaggcagggcagggcccccgccccccgcccatatggtctgtatatctcctggccatcattccttccagccaggacaccacaggacaccagctgaggaggaacttacaaagagcaggggaaggtcttccagacccaggggacgccagcacctttccttcctggaccagtaggacagcatcactcattcatttcttcattcattcacacctttgtcagacctaacacctggcgagtgcccactcaggccccatgtgagggcctgggaagctcaggagactggctaaggcaggaagaggagggttcagccctttgcagcggctcgcattccctctgcaagccctggtctctgtggtggtaagagctggtcttcccttctgggctggagggatactggcagcatcaagcttcctcccagagagcagtctagtcttctccaagccagccacatcctcttctgcaatcagccttggaggacactcaaggctcattggtaactttttcctcattgctgaccctgatcctgcaggccatcttatgctgaagccatcctatgtgccgggccccaacctgtgcgctggggcttcagataggagtcagacagaagctccctgtgtgatggtgtgctccgggaaagccatctgaaaaaccagatgttcccaggtaagatgcttaaaaccgagtcattcccctgcccacatcgccagtgctacccccacatagaacaagagccacgtgttctgcagggtgaggcctcggccatgtcctctcctcccctgacccagccacacactgacccctgtcatgcccaccaccctgcagcccctccacccttccaggctggtgctccaatgccttaaacgcttcctgcctcagggcctttgcagtctcgggtgctcttctccaggtctctgcggggctgagtccccattgcatggcgatctcagcttaaatactggcttctctcacctctgtagctaaagtgattccccctaaacacaccaccattatcatctgcttttttgattttcctttttttttttttttgttttttttttgatatgatgtctcattctgtcgcccaggctggagtgcagtggcacgatctctgctcactgcaacctccatctcccaggttcaagtgattctccctcagcctcctgagtagctgggattataggcacctgccaccatgcccagctaaaattttttttgtatttttagtagagacagggtttcaccatattggccaggctggtttcgaactcctgacctcaaatgatccgcccgccttgggctcccaaagtgctggggttacaggtgtgagccacccatacctggccgcttatttgattttcttccaagcatttattaccatccaaaaccatcttgtgcattggttctcttgctgattattatttctcccctagatgctgtggccctgaagcagggaccatgtgctttgtggctgccgtgtccccatcccccggcacatggcaggtgcttgataagcactgtgctgagtgcatggggcaaccagaaacaggggagcttgctggtccccagcactcctgcaacagggctctgatcagggtggctctctgatgtcaactgcacattttttttaaactgttgtgagaatctgcagtaatcacttggttcggcactaatcctgagttaatgaggccacactggttctttggtgttaatattctctgaagttcagctctgaggaaaatgaaaagaaagaccgccccaccacttacccatcaccaaagaaagacacaagtgagcatcctagaatttgggacgcatcaaaatcaaagaaaaaagcagaacctgccccgatgtttggcgcaagcagcctctgagggccagccgtgctccgagcgtttgttgtgcaggggcacagccctccagatgttccctggaaggactgccacttcaaacaccagggctcaagcccattacctgtgcagcctttgtgtatttcaaaggggaagccagttgaactttccctgtaatcattgggccccaacttgcctttaatggaccatcagggaacacagcaaggagaagtccccaatcattaccaggttctgatggcctcagagcccacctggagaggcccccggggcagccacctgtgggtcttgccacgcctgctccagggaaggctaggactccatccaaccgagcgctggaccgggagtcagaagccacgactttgagggcctaggctgcctggccccccttccccactccctgtatgtgaaccccacctctgccgcttgcttgctgtgagaccttgggcaggtaccctcaccttgctgagtccccgttttgcaattggctgtggaggataaaaacagaacctacctctcgggtttgctccgaagcataggcattttgtaataaatgacaatactctgaagaaatatgtactgagttgaattgtgtccccacaaaatgtatgtctgcctggaacctcacaaggtgaacttatttgggagaaggatctctacagatgtaattaaggtaagaatcaagatgagatcatcctggactaggatgggccctaaatccagtgattggtattcttatgagagatggccgggtgcagtggctcacgcctgtaatcccagcactttgggaggccacggcgggtggatcctctgaggtcaggagtttgagactagcctggctaatatgatgaaaccccatctctactaaaaagacaaaaaaattagcggggtgtggtggcatgcacctgtaatcccagctactcaggaagctgaggcaggagaatcacttgaacccgggaggcagaggttgcagtgagctgagatcaagccattacactccagtctgggcaacaagagtgaaactctgtctcagaaaaaaaaaaaaaaagaaagagagagagagacagacagacaaggggaagatgtagatattcaggaggccctgtgaagctggaggctgaggctggagtgatgcagccataagccaaggaatgtctggagacaccagaaggtggaaagggcagcaagtgtccttccctggagccttcagaaggagcagggccatgctgactccctgattttgaaatttctggcctccggaactgtgagacaatacatttctgatctttcaagctatcaagtttgccgttgtttattatagcagccttgggaaattaataccaaatacaagtcattgttcttgtagttgttactctaaagaattccctgtggccgggtgcgatgcctcacgcctgtaatcccagcactttgggaggccgaggtgggcagatcacctgaggtcaggagttcaagaccagcctggccaacatggtgaaacccagtctctaccaaaaatgacaaaaattatctgggtatggtgacgtacacctgtaatcccagctactcaggaggctgaggcaggaggatggcttgaacccaggaggcggaggttgcagtgagccaagatagcaccactgcactccagcctgggcgacaagagcaaaactccatctcaaaaaaaaaaaagaattctctgagccactgaaatgtctcaccagacacttaggcccacagtgacctctgtagatgagcagctccctctgtctccaaagcaattgaaaaaggaagaagcgatgcataagggaaagacagaccttggtttggaatgtggctctgagctccttcctagctgtaggactttgacaagtcactgatcctccatgaacctctgtctctttatgaaatggggaccattatatccacctccatgaattctgtgatgatgagactaggtcaggatgtaaagcattcacacataagtgttcagtaaatgggaagggtgtctatattagtttatttgtttatttatttatttatttatttttgagacgaagtctcactctgtggcccagtctggagtgcaatggtgcgatctcagcacactgcaatctctgcctcccaagttcaagtgattctcctgcctcagcctcctgagtagctgagactacaggcatgtgccaccatgcctggctaatttttgtatttttagtagagacggggttttgccatattggccaggttggtctcgaactcctgacctcaggtgatccatctgccttggcctcccaaagtgctgggattacaggcgtgagccaccacgcctggcctatattagttatctactgttacacagtacatttccccaacatttggaggctgaaaacaacaatggacctttattatctcacatagtattatagctctgtatcagatatgtgggagcagcttaactggatgtttttggctcaagacctctcatgttgaaatcaagatgtcagctagggctgtagtctcatctgatggcttgactggggctggagcatccactttcaaggtgcctcactcacatgtctatgggcaggaggcctcagttcctcaccactcagactttccatagggctcccaacatggcagctggcttcccccagagcatgtgatccaagaaagagccaggtgcaagtggtaatgtcttgggtgtcatactctgccacttcaccacattctactggtcctagagagcaaccctgaaacaatgagggagggaactctacacgggcactgataccagagagtagcccattggaagccattggggtgctggctaccactgtgtgtcagagggcaaggtgttcttgaggatgctgccaggcaaaagcctacctaacaggtggctttgctgtccggacttgcctctggggccagctgcctgggagctgggagcctgatctggccacatgcccagcagctcccctgtaatttcatttgtctaaggcctctccatgtctcaccggggctccttcatgcaggcactaagggccaacattgagccacaaaggcttccaacccagagcccatgtcagcagcccacccagagcctcgcatcttctcctgggagaccagcctaaagattagagccccagagacacctcaggggccaatggacaggcctgagttctggagggggcagtgtcccagacacccaccagggccctacagcagatccctgagtgtgttgtatgagtgctcacgtgtgggtgcatcatgagcaaacctgtatgtgaaggtgtgtgcaggcagatgtgtgcatcagcacaaccggaatctgttcatgggtgacagaatctgacatttccacacatacaaaacattgcaagcacagcagtgctggagctgacaggagatccaggccaccaccccacctcccctgcatcctgtcaccggctgcctctgttctcagacatattccaacaattgcttaaaacatggtggattactatgatgttctaggcatgcagagatgcgcctcacccaaggatagtaaaaaggcgtatcggaaactggcactgaagtgacacctagataaaaatcctgagaacaaagaagaagcagagagaaaattcaaacaagtagtggaggcgtatgaggtgctgtcagatgctaagaaacaggacaactatgacaaataaggcaaagaaggatgaattggtggaggaagaggtggaaatcattttgagagtccgtttgagtttggcttcacattttgtgacccagatgatgtcttcagggaattttttggtggaaggcacccattctcatttgacttctttgaaaacctttttgaggacatttttgggaatcaaaggggttcccgaggaagcagaagctgagggacggggtcgttcttctccacgttcagtggatttccatcttttggaagtggattttcttcttttgatgcagtatttacttcatttaggtccctggctcatgggggcctcacttcattctcttccacatcatttggtggtagtgggatgggcaacttcgaatcaatatcaacttctgctaaaatggttaatggcagaaaaatgactacaaagagaactgttgagaatggtcaagaaagagtagaagttgaagaagacagccggttaaagtccttaacaatccatggtaaggagcagctgctgtgtttggataacgagtaattcaacgcacgcttttaacagaaatgttaaactaaaacaagtgccactggaggattaacgggaacttttttttgaagatttcaaatgaactcgactttcagtataattgtacctaatgtaaagtatttataaacagctcactggagcctctatttgtcatagacttttgagttgattgttggggccacataataggaccattgttttcttgtggtttttttgtttgtttttggttttgtttgtctttttttttttttttttaagatggagtctcactctgtcacccaggctggagtgcaatggcacgatcctggctcactgcaacctccacctcccaggttcaagcgattctcctgcctcagcctctggagtagatgggattacaggcgtgtgccaccacacccggctaattgttgtacttttagtagagacagggtttcgcaatgttggccaggttggtcttgaactcctgacttcaggtgatccacttgcctcggccttccaaagtgctgggattacaggcgtgagccaccatgcccagcccatatattttttttaattggtgtaaatctctgcatgcactttgcttttttatcaaacgtactgcaaggtgagccttgattctttagtgtaggacaattaacactaacactaacaccagcatggatctgcttttccacggcgtctgaaatgtgagtcacatagtgtcggcctgctgtgaagttaacactgccaggacgaatcttctacagaaataatttcgatttttttttagtatttagtagtgaaagatattaatgcattaatggtaatacatttctggtttaatataaattaaggatgttttctagttgtgcatgaatgctggcaacttaaacaattgtttaagtgtttaaatatgtaatattaagcttaggtttaaaaaagtaaagctggtggctttacaggcacagtggctcacgcttgtaatcccaacactttgggaggccaaggtgggtgtatcacaaggtcaggagatcaagaccatcctggctaacacggtgaaaccccgtctctactaaaagtacaaaaaattagcagggtgtggtgacaggcgcctgtagtcccagctactcgggaggctgaggcaggagaatggcatgaacccgggaggcggagcttgcagtgagccgagattgcgccactgcactcccgcttgggtgacagagtgagactctgtctcaaaaaaaaaaaaaaaaagtaaagctggtaaactgggtctttgtcatttgcttaaaaaaaaaaaaaagaaagaaaaagaaaagaaatgcaaatgtgtttggtgtattctttcctgagtggtatctgttaaaaaaaaattgtgcatgtcacgcctgcaaaatgtgtaaaaaacaccaacaaagcaaacacacataaacccaccaccaagcttcatgaatacaatatcacctatcaccaacagtttggtgcccaacgtgccctctctccccagaggtaaccatttttctgcatttggaggcttccctttttttttgagacagagtctcgctctgtggctccagctggagtgcagtggcgcgatctcggctcactgcaagctccacatgccgggtttacgccattctcctgcctcagcctcccaagtagctgggactacaggcgcccaccaccacgcccggctaattttttgtatttttagtagagacggggtttcaccatgttagccaggatggtctcgatctcctgacctcatgatccacccgcctcagcctcccaaagtgctaggattacaggtgtgagccactgcacccagcctggagacttccttttttcacttcctatcttgtgtgggagatttatctctaccaatggctaaaaattcttttttctttttcttttctttttttttttttttttgagaagaagtcttgctctgttgtccaggctggagtgcagtggtgtgatctctgctcactgcaacctgcacctactcgggttcaagcgattctcctgcctcagcctcctgagtagttgggactacaggtgcgcaccaccacacccggcttatttttgtgctttttagtagagacggggcttcaccatgttgcccagtctggtctcaaactcctgacttcaagtgatccacctgccttggcctcctgaggtgctgggattacaggcatgagccaccacgcccagcctagaaattcatttttcaccactgcctagcaatccaccacatgactatagcacaaaccatgtgaccattctcctgttggggatgttcagatcttttcttgttattgttgttgctgctgccattcccaacaacactggctccagcacacacatttttctagggtgtatatacctaggagttgtttctggggaggagggtgcagcttcacctgtgccagcttctgctatctctctcttgcagacccaagccatcaggtaaaaaggtccagctaccgtgctgaaaagactatgtagcaaaagaccatgcaggagaacagagagagagagagagagagagagagagaatgaatgaatgaatgaatgaataagaatgagaatgcccagccagcccccagcctgtccagccagcccagccaaggcacctggcatgtggatgaagccatcttggaactttcaatcaaccacgctcccagctgaatgtacccatgggagtgacccagcccaccacatggatccaagatgagccatccctgctgagccctgcccaaactgcagaattatgagaaaaataaaatggtggatgttttaagcccctaagttttgaagtggcttaccatgtaataagagatcatggagaacattagccatcctataaataccccaaaagtttggtcataaaatcaaagcaaaccatgaatctcatactgccccagatacgatcactaactatatgtagcctctccccagcccatggccaacttgcttatgctccatctacaccccccacccccataatgaactctccttttggtgggaagaggtgggtgggcagcagagctaggtctggacctgccaggaggaaatccacagcctgggcaggacactgttgctggatgctggcacatttcatcttcaaggaagacctgagagggtccctggcacaaaccccagccaaggggtcccccgacaggtttttcctcccagatattccaactggggcgaaaggaagtggttcacagggaatccctgggaaagccacaggaaaagccagcagagccttgggcgggctgagaaaggagaattttttctgtaaaaggtcatcctgtctcctgcattccttcactgcatttccagccaccagagcatctatgaaagtccttattcttcctctcttggctccaaccaaacattcactgctgtagtggaagatggactctggctgcagggggtggggagaaagaagcctctctctctttctttctttctttctttctttctttctttctttccttctttctttctttctttctttctttctttctttccttctttctttccttctttctttctttttcttttctttctttctttccttctttctttttctttcttttctttctttctttctctttctttctttctttctctctttctctcttctctctttccttcctttttttcctccttccttccttcttttttctatcttttctttatttcctttctctcttctttcttttctttctctcctttctctcttctttcttttctttccctctttccctctcctttctttccttctctctttttctctccttttcttcccttcttccttttctttcctaggatttgtaatgtttatatggttcactggcccccaggtcaaggctttaggcacccacggaatgtttccagagatccactgactcccttgggaagagctgggagaaaacacagagggtgtcaccaggcttatgaccctgcacccgcaggggatgggacccagttggcaaagttggacaccagctgtttgccagtgaagtctcagctattcctcgcactcagatgcctgccgtggccctgcccacgtgtgtgggatcacagcacagccctcaggatcctgcccctcctgaaatatctgcttaaaggaggcccaactgcttgacagactcgtctcctgttctggcttcggatgccccacggagcccagtcatttgtgcaaggtactggggctgttagacctggccagtgagtcatggggctgattcctcttgggaggtgctcacaagcccaacctcagaaccaaacactctgaggctgaagagattgggcacgtgcctaacaactgtcacatctagggggtctctgggtggagtgggtggtacttgggcctacctctctatcctgtaatcttccaccttctctctgagtggcctgggcaggtcccctcacctctctgagcctcagtttccttacccgtaaaatgggcacaaatcacccctgcctcttgggttgttgacaagatttgggaaagagtttccaagggcctgcccattttgggagcctcatataggaaagcgtagatggaccttgtctgttactccagggctgactcagggtgtccctgccgggggctgcagaaaccccacagagacccggttttcaatgagtaggcatctcaccctcataagccacagtggccctggccccagctccccatcacctgcgtctgacacttcagccatcatttaacatcagaaagtttattgctggcccgcaggggctcagccctgccttaatgggccaacctcaggggtcctgccctttgaagagggtctttatggtaattgatggtaatagcgggcagcctggggccccaggtaggaagcccccctggggataatcaaattagcctggaaaacaaattactttcagccaaaacaaatcactttcaatcacagagcaacatataagacccccaaaccacaaagccgctcacagttcaaggaacagacaaggggatgagggacccaagagagtgggctgaccacagcgcagagatggggtcaagccaggcctccttctccctattcagtggccaggactgggggcccctcttgagctgggtttacctgtgactaaagtgtgtgtatgttttgtttttggggggaggtggtgatgttccctggttaagctgtcatctaagtattaggtgagaggtcctgtctgttgtatacagatgcattgagggtcttcctctcaatgtagagatagacgtttcccaagggaatcataagcacagtcctgagaggcaggtgcactgatagagaggatcccacccaggctcactggtcatgtcacaaataaggtgaccagtcccagctactcaggaggctgagacaggaggatcacatgaggccaggaggttgaggctgcaacgggatgtgattgtgccactgcactacagcctgggtgacagagccagaccctgtctcaaaacaaacaaaaacaaaacaaaacaacaacaatagcaacaacaaaaacccacaaaaaacaaagccccagaacctctgtgcaggtggtacagaagggacccacttggtccatatctataggatgtgagtggtataagtagcctcacctggtggaccccccaaaaccttccacccctaagctggggtctgccccatccctccaggcctggctgatgctggggaacaccaacaccagagctatttgccccatctctgcctccgtggatggcgaggatgtcggaggtcctgccaggagcaaggagacctagccccaggttgacaaacggaagcgggcagggctgacctcccacccagacacgctctgccttctccacatgggagatgcactgcggctctcacctgcccagcaagcacttagtgaagcgcctctgagggccaggccagcacccagcccaggtggggggcagtcatcgaggtccccatggcctcgtgaggagacaagggtgtaaccagaggccaactggccacagtggacgtgtggcccaaggacggaggggcacccttgaggcagcagcccctcggttcagggggtccctgacaggacccaggttagggccagtgacccagggaaggggcctccggggcagagaccagcaatgccaggcatagtcacaggtggccagatccagggccccccacagccattcctagctggaggtcgccagttcctgccacaggtttgccatgggtctgtgctcagcaggatctctgtggtggtcaggacaggtggaggtgaggcgggcctggaggccagagcacagagagaaggaggcagccgccatgcctccacaggcttcactctgcagccctcagggtaagcccaggttttctagcccctggccttgaggcatgaggtccaatccacacagagcccctttcttgcgatatgaccttggacaagtggcttaacctctggtctgtagaaccttctagaagtttctttcccattgtgcctcctctcctccaaagagagcctgtatgcacggcccctcctcaccccttgactcctgcccctgggcccagacgcttggccccctctctgtcctggctcctgcctgtgcccggccccagaacacgcctccacacttgcccctctctcctgcagcattaggcgttgtcctctgcactctccttccccagccctgtggaacccacccagccaggccagcccctccctgggatcctcgacctgctcttggcacatctagcagctgctcctccacctgcaggacctctgatcacccctcgccccccaatgtgctccacgccatgtgggtgcctctcagccccagtcacctcctcctctgttccgcatgctgctctctgcatttactgacctcctaaggccacagagctgtggctccgtctgacccctctcccccatgcttaccaggcaggcaagctccctgatgtggtttggctgtgtccccacccaaatctcatcttgaattgtagctcccataattcccatgtgttgtgggagggacccagtgggagatgattgaatcatggaggtgatttcccccatactgttctcatggtagtgaacaagtctcacaagatctgatggttttataaggggcttccacttttgcttggctcttgttctctctcctgccgccctgtgaagacgtgccttttaccttccgccatgattgtaagtttcctgaggcctccctagcaatgtggaactgtgagtcaattaacctttttcttttataaattacccagtctcgggtatgtctttattagcagtgtgagaatgaactaatacacttcccaatgccctcgagttgaaattcattgactctggtgacccagaacgtctgtctccctggactccagactctcgcctccagctgccccagagactgctgcatggatgtctcacaggacctccaactccacaagtccaaactgtgccaggacctcccactcaaacctgctcttttcacccacctcccagctggggactcagccacttcaccctcctgctcccaggccagaagccccatctagcagcaggccctgtccccttaccctgcaggatggaggcagaatctgaccacccctggtcccagccaccatcggagtctacctgcgccccttcccgctcagtgcagctgcctttgtgcttttgtactctgggaccctcttgctcagagcaaaagccagtgttcttacaaggcctccaggaccccacagatctgtgagccggagcccaatctcaagcagccctgctttggagagagacatgtgtgcaagagccctggggtccctggtggaggagggcagccacctcggacctccgacccagcccggcctcctgaggatggaagtctcagagggagaccagcgggcaggtagagcggtcgcaagctgaccttgctgagtccccagttcctgcacacagagttgtgagcaatactagggttttgtgtgaagccactaagcttgggaagccggcagcacctgatgtattgcacacttagctgcttagttatttttcagtccccaccctgtcctctagaattacagctcctcaagggcagggacttgacttcgctccctgatgagtccccagcacctagactggtgtttgaccagtgactgaggcacttggtagatatttagcttatttgagtattaactgaagaaatggcaatggggcatgttgccaggcacttggctgctggcagacctcaggaaatgttgccatcaggtctctcgggggtgctgacaacaaggcccagccccgccaatgccaggggaggaggcagccaccctccctcccaggcctgggctggccggcagaacccatgcctagctccgatggcagaggcatcagctgcctctcatctgtctcctcagttcaccttctgcttctctgactctctaatagtcccttaattgaccatttggcccctaaattaggggcgattaggatcaacccccaagcatcatttcagaaggcagccaggggcctgaagcccctctttggggtcctgggggtccctcgacttggtcaaataaaggtcagccctctggcttggcatgggtaccttggtaacctctgaccctcagctcttaaacctgacccctggtgattcagacccgaggtactcactgcaaatggccaactaggaaacacccgaggatgcagtatggagacagctcctcatgtgcccgcaacctgcagagcatccccctgcagccagcgttctgctggtcactctttctttatgcacataagctcccaaggtacagaaaggcatgcagataccacagccagcacaggaggacctcaaaaccccatctcatggatttgaggctcatcttgcagcagtcgctattgttgccgttccaacctcctacctgctgcctggacctaggcaactctgcaaacatctgcaagcctcagtctcctcttctgcaaaacacggacagtcatagcacctgcagttttgtagtgttgttctgagggtcatatggcacaaggggcatgtcattctttctacacatgagaaagagtgaatccaagctcctgggctctagagccattgtctctcccagttcccaagccggccccaccaatcaggctggagaaacctcggtgagcttaactggcccagggaacgtccagggtcccactgttctggcagtctttctcctgggcttgtgtgcaagacagtgcgcataagtgtgtgcacacgtgggggcatttctctgggcagcccgcatccatatgcacacacacacacacacacacacacacacatgcccaggcaggccagcctggtacagctgtgcaggttacaccctgtgccagggcccctcctggatgatgcccatcttcccacagcctgccaagctgcatgtccagagcaaggggcatctttttctctgttgcagatactgcaagtgcagagcacctgccagccttcccctcctggtgatgcccatctctctcaaagtcttgactctggcttcctcgactcccagtcccacacctcacacttgtgtttccagctgtaggatgctccctggctcctgttccatgacttctccctctcatcagctgccctcagttcagggccctcagccctagggtgtgccacccccatcatggctctgaccgcccagtacctgccctgcttatctgcggtgccctccatgggcaggcagggccagtgcagtgcagcagttggacaggtgaaactcttgccctggtctccacgtccctgggcctggcctggacagacaggctgggccaccccctgggagcaggaggggcatgtgttctgcatccaggctggctctgtccaggagatgcctccgagccaggcccaccactagcacccatccggcgccttggagagcagcccgtcaatcaatggaggatgcagttgtgtggtctttgagctggcccaggacaaacgcctgacgcaaggctaaatggggaccatcatagcacctgcaattttgtcgtgttgttctgagagtcatatggcacgatgggcatatcattctgcccatatcattccacctctgaaacatttctgtgaggcagggagagccacacgccctgtccccgggagctcctgggcagcaccccctcagaagccaaaaatcccagagaagatggatgcccgcagtggggcagcaggatggcacgagctggaggccttgggtcccagctctgcttggcctcggagagtcaggcttgctctctgggcctcagttttccctcagaaacacagggttccttccccctctgatggtggatgtggccgggacattgcagacagtaagtaggtgcaccccaagcatgaaatggaggcctcagctccccacgggaaggggatggggatggatatgtctgtatattccaggtagtgagtgcaggtgttagccagtgcttatcgggttacctcggaatctaaaccgttcccagggcccacgcccagcgccagcgctccccataggtttattcacacctggaagctgcaggcgcttgatgtggtccctctgatgtgcgtgcgctctgaaacctaaaccccctttgctgcaggcctacggagactccgcaggtgcccagggagaggccccggcaggggaggcaccctgtccaccctgactcacaatgtcctggggtgcctgctgtccggcccgttccactggggtcttgtctgcgtccacttttcctccaggttcctctccctctcctggggcccgagggccatcaccccgtggaatgccgcaccttgggaaaggagcagcctccaatgacctggcttgtgcttttcccgagcctcccagctgcctcccacctctgagcaatttatggggtcacgaaccacctcaagggtgcaattccttgtcctggtgccaattggcctccaaagtgctttacaacctgcttgtagcaccgagaaagggaaccagccccctggatggccccgaaaccatggtggccccgccatttggcacccagggccatggaggcctggaatctgccctaagcccagccactgtgacagccgcttcctcctttctgactgcattccagtcatatatggtcattctttacagaaaagcatcgaagggcgtagctcttcagagggacaggagcgtgaatcccactgtctcttccttcaggtttgcaggtgtgaaaaggggacaacaaaagctattcttcaaaattgtcacgaggttgaaattagatgacagctgtcaagcaatggcccgtcgcaaacacttcataaatggtgatggttttattaacatcaaagtggaaatggccaggaatctcaccttccagagataggcatggctacctttttatggtctctccttgcatactttttccttcttctgtcctggaaaatctcaggcatactgaaaagtgcaaaaaaagcacacagcagttttttgttttttgtttgtttgtttgttttgagatggagtcctgctctgttgcccaggctggagtgcagtgacacgatcacagctcactgcaacctccgcctcctggattgaagtgattctcctgcctcagcctcctgagcagctgggattacaggtacatgccaccgcatccagctaatttttatatttttagtaaagacagggtttcaccatgttggccaggctggtctcgaactcctgacctcaggtgatctgaccaccttggcctcccaaagtgctgggattatagacatgagccaccacacctggcccacacggtggttttgtgaataattttaaagtgaaaattcacagaaccaatggccctgcaagagacagaccccaaccagcatacagaagcctctcccatcccttctgagcccagccgatccttctctcctcaagggaaccaccgttctgacttagctctgctttctttatagctttacagcctagatactcctctctaaaaaatgtccttttttacttttccccgtgtgtaggtcttgccttttccctcttcattatatttgtgagatttattcatgtgaatgagtgaacttgtacttgttttctttttccttgctgtatcacattccacagtgtgaatgtgctattaggttggtgcaaaagtaattgcagtttttgccattactttcaatggcaaaacccacaattacttttgcatcaacctgatacaattaattcagccatctccccatagagagacaggtgggctgtcctaatctggagctgttggaacctggctgctcagaacaccttggtcctgaggggaattcacccagcagtcataccgcactcagaccttcaactttatcaaatgatgccagcctggctaggcgtggtggcatgcacctgtagtcccagctacttgggaggctgaggcagggggatcacttgagcctgaaaggtcgaggctacagtaagctgagatgataccactgcactctgatttttaagcagacaattttgctctgcagatatgtatagatctttgaaaaggaaagttagatacaaaaattagccagacatggtggtgggagcctgtaatcccggctacacagaaggctgaggcaggagaatcgcttgaacctgggaggcggaggttgcagtgagctgagatcgcaccactgcactccagcctgggcaacaagagtgaaattccatctcaaaaaaaaagaaaaaagaaaagaaaagttggggttagtatgtggctacacagatgtcaaacaaaaaggttttcctataaatgctgtgtgtgcagagaacactctttttttttttttttttttttttgagatggagtctcgccctgtcacccagactggggtgcaattgcaatggcatgatctcggctcactgcaacctccgcctcccaggttcaaaggattctcctgcctcagcctctggagtagctgggattgcaagcgcccgccaccatgcccagctaatttttgtatttttagtggagacggggtttcaccatgttggccagtctggtctcaaactcctgacctcaggtggtctgcccacctcggcctcccaaagtgctgggattacaggcatgagccacggcgactggcccacatagaacattcttaggcacatacaacaaaaatctgttaacagcagggatactgagagcggtgggggagctgctttcatatttcattttataccctcttcatggtttaacataaatatggctcacactgagcatgtttgttttgggctcatatggcaggtgatgttctgaagcctggttttatggaatgccagggacatctgtctatgtcagcaagcacaccttgctactgactggcacagccactcatggtttgggtaccaaagtgtccccagagactggacattgaggttggttccaatgtttcactatgataaacaagagtgtaatctatttatccagacagacattttcacccactcaggtgacctcccccacccaacttccaggtgttttttttttttctctctctctcctggggcagagtctctcgctctgtcacccaggctggagtgcagtggcgcaatcttggctcgctgcaacctccgcctcccaggttcaagcgattctcctgcctcagtctcccaagtagctgggataataggtgcgcaccactatgcccgactaatttttgtatttttagtagagacggggtttcaccatgttgcccaggctggtctcgaactcctgacctcaagtgatctgcccacctcggcctcccagtgtgctgggatcacaggcgtgagccaccatgccctgctgtatttttcaaacattataaaagttctgcacagtctttagagaaaatttgaaaattaggaaaaaactaaagagaagagcccaccaggagctccccaccaatgacccgatgtgctgggcttgtgttttttcctgaattgggagccacttctgcactgaggtctgcattctaggtcacagtcttcctcactgctcagaacccaggcagagtggccctggaaaaccccaccatgatcttctcacccggggttaaaggtagtctgggcttcatcatctctggtgacaagcccaagcctgcacccagtgcagttcaccctgagcccctctccctggcgtgctgggctagccaggagctcagaaagtttctctttctcctactccatctcccccgaacccgacttcactcatgccacagataaccatcgatcacctccagtgctccaagcgctgaactaatgctggagaaacagcagtactcaggaggacaaggggcctgcctgcccctgtgaggtcacactcctgcttctccagcaggagaagcacagagtcactaaatgcacaaataaagaagtcaggcccccagcactttgggaagccgaggcaggcggactgcatgaggtcaggagtttgagaccagcgtgaccaacatgatgaaaccccgtctctactaacaatacaaaaattagccaggtgtggtggcgggcatctgtaatcccagctacttgggaggctgaggcaggagaatcgcttgaacctgggaggcggaggttgcagtgagctgagattgcaccattgcactccagcctgggcgacaagagcgaaactttgtctcaaaaaaagaaaagaagaagaagaaagaaggagaagcagaagaagtggaggaggaggaggaggagaaggagaaggagaagtcagggcaggcgcaatggctcatgccagaactttgggagaccaaggcaggaggattgcttgaggccaggagtttgagaccagcctgggcaacatggtgaaaccctacctctaccaaaaatacaaaaattagctaggcatggtggcatgcaaccatagtctcagctattcaggaggctgaggcggaggatcacctgagcctgaaaggttgaggctatagtgagcggagatcacaccactgcactccagcctgggtgggtgacagagcgagaccctgtctcaaagaagtcaggtcatgtagcattggagccagaagtcaggcactctggagtctgttctttccctacctctaccctttggttgagccccccaggccgccatgtcacaccatcttccatctgtccaccaactgtgtagttgtgcagtgcgaagcctgtgccactgtgcacagcagccttgtacaagggcccttgtcctccctggacccttcatctcgcagagaccaggaatctgataaacaaaggttcctaaggcctggtgtctgccagtccacccttcctggaagtttctataatacagaaaaagcccgctggaagggtaccactctgccctctgatggcctgtctgggttatggggaggtgcagcgagagaaaaacagcacctgccgcgtgccaggtccagggctgggtgtttccgggctgctttcatttactcttcagcgtggctctgctttatgggtgaggaaactgaggctcagagaggacaaacagcatcgcaaacctggtcagtggcagacccaggagcacagcagctttggcagccggtctgtggcctgtaaagggggtgccctccccctttggctgaagcacaggtggcgatccccaatttgttccctgcccattaacagcccgacctctgaaccatattgggcattaaggaattagagctgagattgccaccttttgggagctgacacccctattcttatgtaaccccgccccgcctcctccgtccctccaagtgtcggctggcaaacatctgtcctgtaaatcaaagcacttgcggactcgccaggtttgacaggtctccgagaatttcatggagccctttggagaagacaccatcatgggctgcgaacgcatttgaaaaagttaaaagcctccttcgcaagcacaaagtgtcccagagagcctggctccaagaggtcacagccctgggcagccaagccagtgagccagggagcggtggattccatcccagggggcagctcctctgaccctctaaggaaaacatcggggaggttccggctggaggatcttgagtagaaagccattgtgcaggagccccggggatttgtttgggaggaaggtgacattcggggacgggtaagacagcgctgtctgcacacctttgaccactgaagctgcacgatgtccctgcatgtggtcgctcgctgctgactgatgggagtcactcaaccacaccacaggcctcctttgtcctggccccaagttaacattttaaaaatatctcttcctggtttaatagcttctgtgctgtgatgataaaagtgatccattttcagtgtaggaaatgcaggaaaaaagagacagataaaaataaggacagaatgggtgtattctcttacttttaaaaaaatggaccagaatgtgtgtttttttcttttcttttttttttttttttttttttttgcttttacagaaccaattttactgtagagctgggtgtcctgctgtttgtaccttgcctcacatggtgacaatttttatcgggggcctaatagtttgaatgaactcttcttcatgtaacccattgttcaatgggttaaatgggccatcctggccaggctggtatcgaactcctgacctcaagtgatctgcccgcctcagcctcccaaagtgctgggattacaggagtgagccaccatacctggccccaagtttcagtttttagaaataaagttttattggcacacagacatgcacattcgtgaatgcattgcctgtagccactttcatgccccaacagcagcgttgaggagttgtgagaaaggcctacggccctcaaagctgaaatttactatctggccccttacagaaaaaagttgcacaaaactggacaaaactgggccctaatgagcatctttgcatatttctttaaggaatttctttttttttttagacagagtcttgctctgttgcccagtctggagtgcagtggtgtgatctcagctcactgcaacctctacctcctgggttcaagctattctcctgcctcagcctcctgagtagctgggattacaggcatgtgccaccacacccagctaattcgtttgtatttttagtagaaacggggtttcaccatattggccgggctggtctcgaactcctgacctcatgatccgcccgcctcagcctcccaaagtgctggggttacaggcgtgagccaccgcgcccggcctaaggactttctttatgttaaactcctagaagtagaattgtgtggttaaagaggatgaacagtttgaagcgtattcgttcattgaatcagctcactttgtgctgatcctgtgccagggtgggagctgcggcggaccccatgaagccaggccctgctctcctcagcttgtctcattccgagaaagccaggcaacagttggcaaagtctatgggcattgggcagagtctcctgggacctggcaggtactctggactcatcgtgatcacagtgtggcttcccacaggagtggactgggatggatgctgcaggggttctgccaggctggagaccctcgccgattcactcctccacccactggcctcaggagaggctgctcccccgacacctaggaacctctacctagcaggacttctcagataagcctctgtcagtttgctaagtaagaggaaggcttctccctccagtttgaacattcttatcctcgttggctatgtgtatttcttcttttgcaaacagttcctcacgactttccaggtgaacttgggaagttgttggatgattttgcagaaaataggggtgggtggaaaggaagccaaacctccatcctcacccctgctcgattcttcatggagtttgtttctggatgcaccgtcctcaggagggagagttagcaaactgcaccaccgtctccacttccaagggaagtcaagggtcaggtcccaaacgggggtggtctcatccgatgggaacaaccaggctgcagttgctagggacctggggagcagctttgcaagcctgccaggccaagaggggatggtgtcaatgagcccatcggctcccggggtgcctggagctgggcccctcagtgaaccaacatcaagaaatgtccctggccctctgctgggaggacccctccgagtccatcctcaggggcatctggacctgccatctccctccaagctgcctctgtccaaggtcccccaggcccgctcaaccggtgtgctccctgcagatgtgctccccacagtgtgtgctcggtggtgtagtttgctaactctcccttctgaggacggtgcatccagagacaaactccatgaagaatcaagcaggggtgaggatggaggtttggcttcctttccgcccacccctattttctgcaaaatcattcaacaacttcccaagttcacctcggggacactgtggggacccactgcccactccccctctctggggagcagaggagctcctggggttggggcccgtgtgctgagaaggttgagcattgactcacggagtcagctgagtgatgccccccaagatgtgtgtccctccagaacctgtgggagtcacctaacttggaaaagggtctttgtgcatgacattaagtgaaggatctcaagaagagatgatcccggattggacagggggcactgagttagacgatgagagtcctgaaaaaagaagatgtccacagaagagaaagacggagcaagagtttagacacagaaagcagggaaggaggaggccgacacctggggccggagagcaggaggcatcctcccttgggccccaggagccctgaccccgccaacatcttgatttctgacttgcagcttccagctcggtgagagcagaaatctcttgcttaagccgccatctgtgatcattgtcgcaggagccccaggggactcatcagagtcccgcggtcggctgtgagtccccaccctgcagctgaagagctgtgtggcctcaggcaggaaaacctgccccctcgtgggctggtgtgagactggcagtcattcgcttgctcattaaagcctgaggggccaaggtgcccggtgggcggcccctgctgttctcacgacctgaccgggaaagccaaagcatgctgctactgctcagaagagccctgagcacttgatgcctggcaggtggggtgctcccttggggtcttcaggggtactggaggcgccccagctgccactacaccccacaagaccccagctcagctcagcagagcccagagctcagctgagtctcataaggatgtcacataaagattcagggtcattggtgccaagttcaagaggagcagagactgtgactccaactgtcttgtgtggaagcttctagaagaaacccttaaaacaaacagagccatgggaatcagatgctggagatggaagaggaagcactgcccacacaagccaggttttccacactggcggggtcaccccatcctggcttgactctccttgccagcctctccacgagggacaccccataacccacccactaactgacctctgggaatcaggctgggcacaggctgactgcaccaccataaatgaggtttaaatggaaatccacgtgtttcccactctggccatgggacctgtgggaataagcccctagctgcaaccaggaccatggacttaatcccagcaaaagaccccaagccccagtagtgacggcaatgagcagtgtacagggagaggcaggaaggaggaggagggaggcgggaggaggaggaggggagggtgagagtcagagaggggaggagggaggaggaggagaggagggaagaggaggggagggaggagaggaggatggaggaggaggaaaagaggaggggaggagggaggaggtgagaaggggaggggagagaaggaaggagactggaggcagtgaggagcaaggaaggaggagctctttttcactctccactggccaaggctgacagccccttcacctcagtgctctcatctgtagaatggggctgtgctagatcctgcacacacacagcctggaccaggcacttgcatctgttccctgtcccatagagggcctgaaacaagaagcatgatggtggaggagggatggcaagggttcagggcaggcaccatcctggagcagagggttgaggagctgacgggagttccttgcaaggaggcaaagcatggcaagtcttggggggactggaagccctggctggggctttgggaagaggcccctcctagtccagccccccacatcccagccgcttggcctggctccctctggccaccctctgcaagcccgtgtccatcctgtttcctaggtggggaaactgagccaaggacttgtcccaaggcacacagtgggagcctgtggcaggaatcctccagcccccttgatctgtggtgcatgcagccagaaaccctagccagagctgagcccagagcatctgtttaaatgccttaaagcaggaacatccctggcctgctggaaaggcaaagctagaaggaggctgaagccccctctttctctgcccttctctttccctccctcccacccttctcccctctactgaaggagattcatcacacctatgccctgccagggctatgctgggcccaggggaggcaggagtgaccaagacacacacacgtgtgtgagaccatggagcttacagacactaggcagaggcagaccatgggcagataattccatagatgattattttaaggcaattatagcaagtgctgcaaaggagacaagggctcttcctgagcctttctgagcttctatctgctcttctgcaacatggagaatgagccatcagagccgctgctgcaagaactacgcagcacacgcatacacacatgagcacacatttgtgtatactcatgcacacacatgtgcacatatgagcacatgcactcacacaaatgtacacaatggcacatacgtacacatactcaaatgtgcacacacacatgagcacgcgtttgtgtatactcacgcacacacatgtgcacacatgagcacatgcactcacacaaatgtacacaatggcacatgcgtacatataaccaaatgtgcacacacacacacaagcatgcacacacacacacacacacacacagagtctggcctcaagagggccttcagctatacggtgcctctcattagtaagaaaacagttgcagaaagctctggatcaccggatgcgggagctggccttctcaagatctctagtcctaaaggggctattctctgtggcctgggcgtggattggcctctcagcttcgtacttgagagtgacttcagatgggacgctgactcctccatgctgaagaagacccaacaaccaagtttgtaaaaaacttttctgttaaaaaaacaaaacaaaacacaaagcataacttctgacccgaaaggaagctggcgattgagaaaagactgagcccccgcatccttgatcagggcaggatgaggacagagtgatgagcttgggtcactccccagggaccggctgcctcggaaaatatgccctccgcctgtcacattgggcatgcaatatgaatcccctgacatgccccacggggacccagaatagctcgacttttctcctctgcaccgtctttggtgctgggcctcgccgcgtgggtcggcgtgtagcctcttgagcctcggtttcctgctctgggagctggggccagtgacggtcacccgagtgccgagtgcctgcgcagagtgttgcaggcttccacaggagcatgtctggaaaccagtgtgtgagctgcacacgcctgcccatcgcagctgagggctctggcgaataagacacaggcaggtaccaggcaggtgggttgggtttcttcccctccatttttttattattttgaaaaatttcaaacccacagaggagtctcgagaatagtctgacaaaacctgtacagcctccacctccactcccctgcaccccaccccttctgcgttcactctcatcacacacacctatgcacacatatggattttcctgggccatttggaagttagttgtggcattttctctccaaatacttctccccttccttccttcctccctccctccttccttctccttccttcctctttctttcctcccttccttccttcctttccttccttcctccctccctccctctctctttctttctttctttcctcccttcctttctttctttctttctttctctctctctctctctctttctttctttctttctttctttcattctccctctctctctctctctctttctttctttctagatggagtctcactctgtcacccaggctggagtgcggtggcacaatctcagctcactgcaatctctgcctgccgggttcaagcaattctctgtctcagcctcctgagtaactaggattataggcacccaccaccacacccagctaatttttgtatttttagtagagacagggtttcaccatcttggccaggctggtctcaaattcctgacctgaggtgatccacctgcctcggcctcccaaggtgtttttttttttttttttttcttgagacggcgtctctctttgtcacccaggctggagtgcagtggcccgatctcgactcactgcaagctccacctcccgggttcacgccattctcctgcctcagcctcccgagtagctgggactacaggcgcccgccaccacgccgggctaattttttgcatttttagtagagacggggtttcaccacattagctcggatggtctcgatctactgacctcgtgatctgcccacctcagcctcccaaagtgctgggattacaggcatgagccaccgcgcctggcctgcacttgtttcttacaaggacattcactatgccatcctgatacatacgagcagcaagcctgcaagttcaaccattatgagggctgctaccaactcccactccataaccaagcccccctgagggtctcagtgtcttagtgaggtcctagctgtttcctttctttttcttttttctttttattttattttcttttttcttttcttttcttttttttttttttgaggtggggtctcactctgttgcccaggctggagtgcagcgacacgacctgggctcactgcaacctccgcctcccaggctcaagcgattctcctgcctcagcctccccagtagccaccgtgcccagctaatttttatatttttagtagagacaggatttcaccatgttggccaggctggtctcgtgctcctgacctcaggtgatccacccgccttggattcccaaagtgctgggattacaggcgtgagccactgtgcccggctgcttcctttctttttatatgatttctttttattgaggtgaaattcacataacgtaaaattaaccattttaaagtgtacaattcaccatggcatttagtaccttcccccaaactccctttatcaagtttctagacttcttcatcaccccaaaagaaagcccctgactcatgaaacagtcacccctgttctcctttcccaacctctggcaacctccaatctgcttaggcagggatttttcataagatctcttctaagtgtggggttttattatttaaaaatagtttactacaaattggccgggtgcggtggctcacgcctgtaatcccagcactttgggaggctgaggcgggcggatcacgaggtcaggagatggagaccatcctggctaacacggtgaaaccccgtctctattaaaaatacaaacaaattagctgggcgcagtggcaggcgcctgtagtcccagctactgtggaggctgaggcaggagaatggcatgaacccgggaggcagagcttgcagtgagccaagatagcgccactgcagtccggcctgggtgagagagcaagactccttctcaaaaaaaaaaaaaaaaagactttattacaaattaaatgtggaactccgccatgtgtgtgcttattttaggggagggaagggatgctgtttttaagtacttccagcctcttcgctgcagccgggtggctggacgtcttcgggcaaaccctttctttgcttattttgcttaggtgacgataaagggcttggaggaaatctttgttttgttttgtttttgagacagggtctcatcccatcacccaggcaggagtgcagaggtacgatcatgactcactgcagcttcgacctcccagcctcgagccatcctcccacctcagcctcctgagcagctggcattacaggtgcacaccgctacacctggctaattttttaaaaaattttgtagtgatgggatctccctatgcccaggctggtctcaaactcctagactcaagtgatcctcctgcctcggcctggcgaactgctgggattacaggagtgagccgccacacctggctgaggaaatcctcttgaaggtcctttccaaccctggaattctgagctcatctattgcaaatgagctggagtgacaccctccagactcatacaagcttagcctccgggaatatctgtccggcctgctgatctctggccaggcctgggggcagctggacagggagggaaaccctgtccatgaggcttctgctcgctgagtgaccgcaggccatgcacttggcctctcggagtctgctcatggtccccttacccactggtggatcctacagccaggcaggcttcgtgggcctctcacctgtaaaacggaacaacacctggctctccgccttgctgcagggataactgcaggccactccccggggtgaggccttgatacctccaagttgaggcgaacagactgaatgtgactcaactggaagtctctgtcttgactccccgccaccagatactggcgggtgacttcctcccctatgagccgcgggatactggcgggtgacttcctctcctatgagccgccactggatactggcgggtgacttcctctcctatgagccgccgctggatactggcaggtgacttcctctcctatgagctgccaccggatactggcgggtgacttcctctcctatgagctgccaccggatactggcaggtgacttcctctcctatcagtgttcttgatacggataggagagaaatactggcatttacaaagtcacagtgatcatgcaagtgggggactcagcatctggaagcggcccctgaaatgaaaccgcatgcaggggtcagttcccggagtgtgttctgctgtggaccttgaagaaagttgttgtttatggaagccccattagcccaaaacagccctcagcagaaacaggaacatcagcccatatgggacctccctgcctgcgtcccctgctgccccaaacacaccccttctgcccagctagaagccctgttgctaagataccacagggctggaagagattcgaattccttttctttttcttttcttttttttgagacagagtctcactctgtcactcaggctgaagtgcagtgtcatgatctcggctcactgcagcctctgtctcccagatttaagcgattctcctgcctcagcctcccgtgtagctgggaccacaggtgcctgacacaatgcccagctaagttttttttttttttctggagacagagtcttgctctatcagccaggctgaagtgcagtggtgtgatcttgactcattacaacctccgcctcccgggcttaagcgattctcctgcctcagtctcccaagtagctgggactacaggcacgcgccaccacgcccagctaatttttgtattttttgtagagacgaggtttcaccatgttggccaggatggtctcaatctcttgacctcgtgatccgcctacctcgacctctcgaagtgctgagattacaggtatgagccaccgtacccggccattttttttttttttttagtaaagacggggtttcaccatgttggccaggctggtctcaaactcctgacctcaggtgatctgtccaccttggcctcccaaagtgctgggattacaggtatgagccactgtacctggcctaattttctcgacatgatgtgtgacccatcagaagtgtctggaatgagtttgcaggtgggacgaatgatcagtttggcaatggaagtcaagggagggcaggaggaaggagagacgggatgaacaaggaaaggatgggcaaggaggccagtgagtgcacagcaatgtcaacaccttccagttctttttttttttttttcttttgagacggagtctggctctgtcacccaggctgcagtgcaatggctcaatctcggctcaccgcaacctctgccttccgggttcaagtgattctcctgcctcagcctcccaagtagctgggattacaggtgcccaccaccacgcccggctaatttttgtatttttagtagagacggggtttcgccatgttggccagactggtctcaaactcctgacctcaagtgatccacccgcctcggcctcccagagtgctgggattacaggtgtgagccgccgtgcccggcccttccagttcttttaaatgattcatccaatatttcttggcagcgtcaagtgccaggctggctccgtgcaggacaccagggtcatgcccgcaaactgcgcacttgtatcctcacttccacagagctttgtctgaagaggagacatgtagggtcaatttccaccccaagacatgacgtccaggtaccacacagcagagcaggcggagctgagggctgcactcagaagtgggggctctctggctatcttgctagagtcagcccagggtctccagtgaccactctgggaagcacatgggcaggtcatggggccaaggaatcgaagagtagggccaagcccctagctgaggctccgaatttggtcagggctcttaactttttgaaagagcagctgtttgggttttccttttttttttttttttttttttcagtggtggatcacagctcactgcaacctctgcctcccaggctcaagtgatccttccacctcagcatcacaagtagctgggactacagactcacgccaccacgcccgactaatttttgtattttctgtagaaatggagtttcgccatgtcccccgggctggtcttgaactcctgggctcaagtgatccacctgccttggcctcccaaaatgttgggattacagatgtgagccactgtacctggcctggttttgcttcttttttaaaaaaataaaaagagagtaatgattaaatagctttgtgactcaaattcagctagaactgcattcaaatcccaactctgctgtttattggctttatttgtgactctgggcaaggagcagtttctgagcctcactttgcccctctttagaatgggagctatgagacccaaataccgtgaggcatgtaaactgcccaggacagttctgggcacttggtgtcagccatcactaccaccaccaccatggccagaggatttcaagcactcagcaaatggtgctggccaggcctgtcctgggatttcctaaccatctcggacagaagaaagaaaaaagacattgtggaaaggtggctgagcttttggagagaaaagaccctccctttgggcatgaagtttgaagagccatccacttgtggagtctgggactcatccttctccacgaaaggtttatgaagcagacagaggccagggcttctgagaatttccaacctcgatattttcactttatggtttttcacgaagtcagcatgaacacggttaatgttttctcattaagctactttttgttttctttcagtagctgacattcaaagcctgggcgcattctttcacgacgttgctactctgacagctcaacacattcgcgatgggaactcatatctgttttgatgagggagaccagagggaaaagagcattcacgtacagaaataccctttgtggctacttctgtcagctcctgtcctcacaggtgagaaaagtaaggctcacagcacaagcaggccctcccagctaggggagctcacgtcctgggccttctgaaccggcagtaaagggagggctccgactccagctttgctatgcctcatggtgcctgctggtggtggtgcttacacaccaggagcccctgtcccgggataagacacagcacagcctggatttacaagccccactgtttgggttcaaattccaacttcaccactaacagggtgtgcgaccttgggtcactcggccacttttctggggcccccatttccctcctgctccatggggaagggggaatagaataccatgggggctcttgcggagatttgagctgagaacatccatgtgtgctcaggctcaccgcagatgtctggaggaagctgtgctgccctttgtgtgaacagaagcagggcagcttcctgaattccaccctttacacagggccagggcctacctgggggagagacgacagggctcagtaattccaagagcggacatgcgcgagatgcgtctccaagaatgttctcccctgcatggtctggcaggggacgttggaaacaacctaaacgtccagcaataggggacaacagattgtatcactcagatgtgctggtgtcaaaggctgtgctaggatatttaatcccaaggaaagtgtttacaactgagttggtggaaaggaggttacaattcaaatgatttttttttaagatacatacatactttttttattattatttatttttcagtatcactctgttgcccaggttggagtgcagcggtgtgatcttggctcactgcaacctccgctccctgggttcaagcgatccttccacctcagcctccacagcagctgggactgcaagcatgcgccaccacacccagctaatttttgtatttttagtagagatggggtttcaccatgttggccaggctggtcttgaactcctgacctcaggtgatccacccaccttggcctcccaaagtgctgggattacaggagtgagccaccgcacccagctgaatctcatttttcaagatgaaaagagttctggagatggatggtggcggtgatccacacagctttatgaatgtattaattcctctgaactgtacatttagaaatggttaggatggtaaattttatgttgtttatgtttcaacacaataaaacaactggaaaaaaagtatctattaatgcttatttaaaattcagacacaatttactttagaatttaatagaaattgctctgaaaaaaatgcaccttaattttaagggaacagctctattagttttgataaatgtcattgcctgtgtattcactaccacaataaagatagagaacattttcatcttccatttatccttctctgctttttttttttttttttttttttttttttttttgagacagagtctctctctgttgcccaggctggagtacagtggtgcgatctcggctcactgcaacctctgcctcctgggttcaagcaatgctcctgcgttggcctcccaaagtgctgggattacaggcatgagccaccacgcccagccttctatttacccttttctagtggatctccatccagctttttgtcactatatatctttttctagagttgccattaaattttaaaataagtaataaatgtagcaaagatcgccagagagcagcatttacaacagtaacaatagctacccttctgttatgtgctttacatgtgccaggctgtctctatcttacaaatattggtcacttgatagatggggatgtcttttctaatgctcgtattaaccctgtaaattagcgttccttttgctgttttacaaatgaggaaatggaatctcaaagaggtcttccttctactctgtcacagtctctgccaatttctgggctagctgggtggcctcatttcagaataacgatgcgtatgggggaagaaatggctgttggtgaatcagaaagtcttgggggaaataatgcatgttctagcaggttgtagcaaaaatactgggctgagattcaggagtccctgggtctcagcctccagttggccaggaaccagctgtggggcgtggcctcgatcacctcagtgttcacagctctctcggtcccacgctaccctgcagttcttattttctgataaagacttttaccacacccagaagtttctccaattacaaaataattttcaatcacaaggtgggagcagggggtttgggaggggctctagggagtgcttatgtagaagaatgcacatttgacagcaaaacatacatttctaactgtaaaatgaaaggaaaactatgattttcataatgtaaaaattggaggtgaagccgaataagatgttcttagacactgggacacgggtttagaaatggtggaaatcactcatttgccataatcaggaagaaggaacctctacaccctcagatggaagaaggaagactccagaaaaaggatttacggttctacagggcaattaaataaaaaaataaaaaatgaattaaaaaaaaaaagctaacatcaaatccagaacaaagccaagccaagcccttctggacacctgggctggagacccccatacccctgcatgggtgagcgggacatccaggtgccttggaccctacctgctacccattgcccatgccattcaatgaatgaaaccccacctgggcgattcagccggcttagccacccaggggcaaatcaaacacaacctgaaaagcaaagtcagcccaatgcagcacacaggtggcttcagaggtcccggtgtgcacagaacagagtgggaggaggacctcagcccttgccacacctctgctctcgccaggagagccccttgctggccagcactgccttgtcctctgcaggcttggctccctctaaccacacacaccagggagcccagcaaacacccaagatcgtgtgcctggcccacctggggcaaaccctcgaggcccggcagtccatctctgtaaccgtcagctacctcacatgagcaggatccatcccctaagctctcagagcattgctgtgcctgtgagatggccggcacacagctgacctcaaggcctgccatcaacaccttcatgagtgctacatcccaggccctctctgtcccctcttccttgtcaccctcaggacaagcctgagagcaagctgagagggcaatgggtcagcggtccacgacctacccagggagtggccgggtgtgatccatgctacagtgggtctgaccccggagcccctgtcccgggataagacgcagcacagcctggatttacgagccccactgtttgggttcaaattccaacttcaccactaacagagtgtgcgaccttgggttactcggccacttttctggggccatttccctcctgctccatgggggagggaggaatagaatactgtgggggctcttgtggagatttgagctgagaacctccatgaagcgctcagaacaggggctgggggacagcagccgccttcctcatttccccacctccctgatcgcatcagccactctcttccccatgtccctggaaggggctgcagaggggtaggggtggaaccagaggctgccatcgcccccacccggtttgggtcgtgtcccccagtgcagcctctgccatcgccctcaagagcatttatcacgcatttaccacggatctttaaaacgaaagctgcaggggagggtaattaagtttaataggagccgccgtcgatttaaagccacaggggggaagtaattagatttaacagaagccacggctttctgaaccaagacacacagcgtgggggtccctggtctagaaagccttcgggatgatgtctttttgtaaagactttcctggtgacatttgctgcgccctcagtcattaacgccagtcactgactggggaatgaatgtggcctctgctcattgaaattcattaggcctggcatttctctcgctgtctctcctgtttgccctccccatcgcctttgcgctgggccaggagggctctgcccccaaaaccagcctcctggggccccacatccaggagctgggggtttggaagaataacaagaaataattagagttaaaccaaagccccgtaggaggacccctttattccccgcctgggtattctctggatgtcgttttctttattggcaggaaccgcttcatggagcggcccccatttctttcctcacctggcacctgcccggacgccaggggcgcccatcaccgttcctgggccccttcccgacccctccccaccaggtaaggcgctctcgacctccccgaccgtgctgttcctcctgaccccgtgcgcagggactcggggactcaaaaaccagacccccgacacaagacagctcaaaaaacgggaaacggaggcccaggcctccctccctgcgcccctgcctccaccaccctccagccgagaagctggggttcaccaatcccgcagctggcccgcccaccctgcccgagagcctccttcccagtgccccctttcaggttgcatctcgcgcacagccgcggggccggggcgagcgcggagcaggcaggggcgcggggccaggagcgcaaagcccaggcggacgccgaggctgcggcgccacctacagtccgcgcggcttccattgtttccccgccggccgagagcgcgcccggccccccgtcggggggcaatttacccggataaaaggggcggggcaggaattgcaagaagatgaagctgaaagaacctgagactgtcggaactgccggggaaaattctacgggacggctttgacgtcagatgtgcggggctgcgaaagtcgggggagggagtgcgagtgggcttttaaggggaagggcactaaggccgaggtgaggcttttcccgacagagggtgaagggggcaaaactcggtgccccccaacctctggccccggggttcctgaccccgcccccgctagtgccccacgccgagtgcatccactgggagcctgaggcctgggggaagggccccagttgtcgattgctttacaaagtcaaactctcccagccaagaacctcggggccgctgcgcggtggggaggagttccccgaaacccggccgctaagcgaggcctcctcctcccgcagatccgaacggcctgggcggggtcaccccggctgggacaagaagccgccgcctgcctgcccgggcccggggagggggctggggctggggccggaggcggggtgtgagtgggtgtgtgcggggggcggaggcttgatgcaatcccgataagaaatgctcgggtgtcttgggcacctacccgtggggcccgtaaggcgctactatataaggctgccggcccggagccgccgcgccgtcagagcaggagcgctgcgtccaggatctagggccacgaccatcccaacccggcactcacagccccgcagcgcatcccggtcgccgcccagcctcccgcacccccatcgccggagctgcgccgagagccccagggaggtgccatgcggagcgggtgtgtggtggtccacgtatggatcctggccggcctctggctggccgtggccgggcgccccctcgccttctcggacgcggggccccacgtgcactacggctggggcgaccccatccgcctgcggcacctgtacacctccggcccccacgggctctccagctgcttcctgcgcatccgtgccgacggcgtcgtggactgcgcgcggggccagagcgcgcacagtgagtgcccgccagcacccccgcccgccccgccgcgcgcaccccaccccgctgcgcgcgccccaccccagcgcccttccttcctttgccacccttaggctcctgcggacccctcaactcctgggaaccccaggttttggcacctggacgttaggatccctccgttagtccccaaacagcgcgggacgctagggagaagcacaggcttgtggaccgaccgcacccacgtggtgcgggcccagcggtccttgctgcagcttctcgcttcccctgcgcctaggtttgctggagatcaaggcagtcgctctgcggaccgtggccatcaagggcgtgcacagcgtgcggtacctctgcatgggcgccgacggcaagatgcaggggctggtaagtgtccccacggggcggatgcgccggggcgggggaccggcgcctgtccccgggcggaggcctgaaggagagaaaggcgctggttcgaatccagggtttcctcgcctcctccgcccagacccgcgtgcaacttcgagggaaagattgcaaagaccgattaagtgcatgtccgacgatttcctacggaaatttagggtctcagccagcagccagagaataggcaaaagctgcctttgcatttccaattgagtcaaaggccggcctagccggaccgaggaaacccattattcggcctcctttgatattaaacaggaaaacccacctcgggccttttcagcctctgcctgcgcgtgtgtggtcctcgcctccgtttccctccctccagtataaaagaagaaaaaaagaatgggaaagaaaaaagaggatctacccataactttcctttaaaaacaaatcaattgtcaagcaaggcagaaaacagtgcatttgggataggagagattttttttttagaattaatttttaatctaccaggagcacggtgtggcttagacgcagatgcgctggagtcatgttgcgccaggggagtgcttttcctcctgcgggcctcacctgtcctgtaaacgctttctggtgggggcagggggtgggggctggcagggaaggcccaggtaaccgcagaggtcccggggccggaagtgtacgagcgctggggctctggtggccgggaacaaaggctgggagttcaaaggaacgaacccgcgcccctcccgcggccccgcgcgcagaggaggctgtgtgaggtctcggcccgcgcaggcctcacacgcagccccggactccctggcggagcaggggccagggcgggggtggccgcgcctgcccggggcccccaccccagaaaggatgcagaggcggggccgcctccggcccaaccagctcctttgtgaacagcgggacaaagcattttagagtctcaaaattgctcggtgcctctgccgtgctccgtgtactcggagcgcctgtttcaggttttatggcggagtcctgcgtgagaggactgcagagaaagggggtggtcggcacgctggacgctgactcccacccagagccgctccaaacccacccttgcaactttaattttgacatttactatggcagggggtgtgggggttcctaatgatgggaggccagcaggggacgtcaacctaacccgccattctgcccaaattgggggttgggtcacctgaaatccctctgtgccttttttttttttttttttttttttttttggcagagtcttgctctgtcgcccaggctggaatgcagtggccagatctcggctcactgcaacctgtgcctcccaggttcaagcgtttctgctacctcagcctcccatggagctgggattacaggtacccaccaccaagcccagctaccttttgtattttgggtagagatggggtttcaccatgttggtggccaggctggtcttgaactcccgacctcaagtgatccggccgtctcggcctcccaaagtgctttgggattagaggtgtgagccaccgcgcccagccccctttgtgcctcttgatcccctgtgcatggtctaacagaaattgaggatctttttttttttttttttttttttgagacggagtctcgcttgctctgtcgcccaggctggagtacagtggtatgatcttggctcactgcaacctccacctgcggggttcaagcaattctcctgcctcagcctcccaagtagctgggattacgggcaccgtgccaccatgaccggctagtttttttgtatttttagtagagatgaggtttcaccatcctggccaggctggtctcgaactcctgacatcacgatctgcctgcctcagccgcccaaagtgctgggattacaggcatgagccacctcgcctggcctctttcttaaataaaaatgccacattcttctagaaacttgaagtcatttcgttttctgtatggagaaagtgatactaatttctcccaaaggacaagccaagtaaatagaagaaggtcctccaatcattcggttttgtgttccttgtttattgatcatttggcatttttgggagtttgggagaaatcacgcttgctgtccgatgctttgtcccagccatccgtgggctcggcaggagcctgggttgctgcaatgagcctcttatcaggagcttattagcacaggtacctcgtcacccacctgcagttcagtgacctttgcagacttaggcaggaacctgactgaggccgtcctgcagtgtgtttactgcccagcccttccggctcccgcctgcgcctgtcctgggtcgccaaggggtaatgacaccggtgtgggatggcacttgcccactggcacctctcaaccccgtggactatgaatgttctaagacaaggcttccctcagcacacatttccggccaccagctgggcgccggcctggcctggcctggcctgggggaggggctgctgagatctgcctcctggcagcctgcctggaaggcccttggtgactgaatggaggagacagcggggctgatggttctcagaactgctgcagaccagaaggccttagaatgataaaggcacacagtgatttctgagataggtggggaacagatgctttcatctgggacccagatcggatcacacgcaatttatttaaaagacctatcctaagatgacaacccagtttatcagtgtttcccaaagtgccaatgaaatacccaggaactttttaaatgccaggagttatgtctgtaatgtaaagggtgagggaaacacagacggcattcctgtgggttgatggatattattgcttaggacaaggctctcgaaaaagtgaggtaatttagtggaaattatttgggtctatatagagtgtatatgtagtattaagtatatacataaaatatacatatatgaaataataaacctcagttttgtctgtgtgcatgtatatctatataaagattataatttataaaggtatataaatgtatatttaatttattaatgggttatatattaacataatgtacatattatatatgcttacacttacagtacatttatatatgtgtgtgtgttctctgtgtatatatatagttgtgggttttttgttttgtttttttttgagacagggtcttgctctatcacccagactagagtgcagtggcatgatcattgctcagtgcagccttgactacccagcctcaacccatcctcccacctctcagcctcccgaatagctgggcctacaggcgcccacctccatgacctgctaatgtttgtactttttgtcaagatggaattttaccatgttgcccaggctggtctcaaactcctggattcaggtgatccatctgctctgggcctcccaaagtgctgggactacaggtgtgacctactgtgcctggccttaaagtacattatatattatatatacttacatatataaaggtatattttatatatacttacacgtacagtgtgtacatcaggaagtatgtataaaacatgcaagtgatgcttatgtggaaggtcactgctggtggccaccagggacagtctgtagcacaaacgtccatgtggacccgtgttccctgtccactgtggattgctcagagctgcctgttttctctgcagcttcagtactcggaggaagactgtgctttcgaggaggagatccgcccagatggctacaatgtgtaccgatccgagaagcaccgcctcccggtctccctgagcagtgccaaacagcggcagctgtacaagaacagaggctttcttccactctctcatttcctgcccatgctgcccatggtcccagaggagcctgaggacctcaggggccacttggaatctgacatgttctcttcgcccctggagaccgacagcatggacccatttgggcttgtcaccggactggaggccgtgaggagtcccagctttgagaagtaactgagaccatgcccgggcctcttcactgctgccaggggctgtggtacctgcagcgtgggggacgtgcttctacaagaacagtcctgagtccacgttctgtttagctttaggaagaaacatctagaagttgtacatattcagagttttccattggcagtgccagtttctagccaatagacttgtctgatcataacattgtaagcctgtagcttgcccagctgctgcctgggcccccattctgctccctcgaggttgctggacaagctgctgcactgtctcagttctgcttgaatacctccatcgatggggaactcacttcctttggaaaaattcttatgtcaagctgaaattctctaattttttctcatcacttccccaggagcagccagaagacaggcagtagttttaatttcaggaacaggtgatccactctgtaaaacagcaggtaaatttcactcaaccccatgtgggaattgatctatatctctacttccagggaccatttgcccttcccaaatccctccaggccagaactgactggagcaggcatggcccaccaggcttcaggagtaggggaagcctggagccccactccagccctgggacaacttgagaattccccctgaggccagttctgtcatggatgctgtcctgagaataacttgctgtcccggtgtcacctgcttccatctcccagcccaccagccctctgcccacctcacatgcctccccatggattggggcctcccaggccccccaccttatgtcaacctgcacttcttgttcaaaaatcaggaaaagaaaagatttgaagaccccaagtcttgtcaataacttgctgtgtggaagcagcgggggaagacctagaaccctttccccagcacttggttttccaacatgatatttatgagtaatttattttgatatgtacatctcttattttcttacattatttatgcccccaaattatatttatgtatgtaagtgaggtttgttttgtatattaaaatggagtttgtttgtatcaaaaggtgcattctattatccgcctagaatgttagggagggtggggaaggggctggtggggggcagcaccgtccacgggaggaaaccctcggtgtgtctgccctggacaccaaaagctcgggtgggaagttagcgggtttgggccagccagctctagtggtggaggctggtttgggccctgctgtcctgccctttcctcatgcctaggggcttggcttcctcagtccaccttctctctagcagtctcagtggttagggcggcctctctgccaggagtgtttttggctgcaggaaacaaacaccaaggaacagcggcctaagtgagggcctctcgccctcagcactcttccctggggaaagacgttcctgcatttaacagtgccccccccaccccccaccattagatgcctgtagaaaccctcaagttgtgacaaccaaaatacctccagaagttgttgcatgttcttaggaggcaagatcacccttaacggaggaccactgaccggagcaaataggatttctttttgtccagccacaaatccagagggacccagtgacccagcgatgcctgggctgtgccctgtgtgattcccttggtgtccctgtcctgctggggcctcgtctcgccagggctgctgtggcttcagctgagcgccctgtactcagggagagggaatcatttcgggctgggcctctctcatcaagaaagccaaaacttccttagaacctttcagcaaattccggctacatcctaagaaccaggtttgcgtcacaggaccaggccagccccagctgcacggcaggctgggaaggcaagaattagcggtcagggtgaccagatgtgggccacatcctgagtgcaaggaggagcaggtgcaaccggacaccaacgtgtgcatgaaacatgattccaaatgagcatttgccagggattagggatggtggagggagtcggggaggagggttgggtcactcagggcagtagttcccaggtgcttacgttggcagcgaggggggtaatgtcgttgttcaagtctacgaaggctatttcaggtgaagcctccctgctctccagtaaaagggacctccacttgtcattctcactgatgacatgcccaggacatctagagttaacccttggggcgttccctgtctccatctgccaatcaagatgcccctctcactctttggtgtccttgtcatgtaaccatgctgattagagagctgacaggcagggctggatgatgcttgtggacacagccttctctacccgtggcaggcgccagacaggaaaggcactctcctggagccacacagcctggaggcagctcaggggctgtgggcagggccctttgattgctgtgtgaccttgagtaagtcacatcacccctctgagcctgcatccttctgcggacatgaggttaacagggtctgcatggtagggctatacagaaatccagtgaaatgatgtctgcgggattcctggcacagagccggctgcctatccacagcaaacctcaccaaggatagaaccatgtgtcctgagctattatgtccactggatctcaaatttggctgcacattgaaaaaaagatgatagctggaaaccactcatggagattctgagttttttgtctttctttctttctttctttctttctttctttctttctttctttctttctttctttctttctttctttttctttttttttagacagtctcactctgtcatccaggctggagtacagtgcacaatcactgatcactgcagtcttgacctcctgggctcaagggatcctgctgcctcagcctctcaagtagctgggaccacagacccatgcccagctcatttttttttttttaatttgtagcaatggggtcttgctatgttgcacaggctggtctcgatctcttgggctccagaggtcctcctgccttaacctcccaaagtgctgagattataggtatgagccaccgtgcccagctgagattgtgatttaatgggaatgggtgtggtctggacactgggattttttaaaagctcccctgtgggccgggtgcggtggctcacacctataatcccagcactttgggaggccgaggtgggtgaatcatgaggtcaggagattgagaacatcctggctaacacagtgaaaccccatctctactaaaaatacaaaaaattagccaggcatggtggcaggcgcctgtggtcccagctacttgggaggctgaggcaggagaatggcatgaacccgggaggcagagcttgcagtgagccgagattgcaccactgccctccagccggggcggcagagcaagactccttctcaaaaaaaaaaaaaaatctcccctgtggttctagtgtgcagggaaccagttcaaattccatcctttgtgctctgaagaccagcacttcagggagaaaatgaagaaagaggcttatcagcacctccctctctggagtcttctcccttctgcacagctgaggataacaagtgaatgtacgtaaactaattcacactagactgttgatggttaatatgtttgctctccaggccacatttttactgacctggcagctgcaaaaccctgatgacagaccgtgggtgatgcgggcattctggcaggagatggggaagattatttttctgaggctgcatcttagcatccaccctaccccgactcttcccctactcctcataaagaggtagccttgccctcttcctgcatcccctctccctgctttagatagcgttgccaaatacataaaaatacagcatctgagctacatttgaatttcaggtgagcaatgcatttcttcagtaggaatgtgtcccatgcaatatttggaacatatgtatactaaaaagttattcattgctgatttcaaattcaaatcaaatcgggtgtcctgtgttttgtctggcaagccgagctttaggcccacaccacggacatggagttaaaaatgagagaagactggagcaaaaaactgtttccgttgaacaagactctctgctggtgagactccaaaatggaattcaaaagatcccagggacagggaggccttgagtgaatcccactctttcttcgggcctgtttctccatctgtaaagcgagaaccttttcgtcgcctcaaggcctgttgactcctggggattctggcaaagtgcccaggggctgggaaaggcctcttaaccaaggagggggctggaacccgccaccccggcattaggactcttgtggtcgcaggtgacagaaaacacaactcaaactgacttgaggtaggaaaaacaagggaacttattggctcacctttactgagaaggccaggaggtgccgggctttaggcatgcgggacctgggaaccggcaccacaccaggcatcatctgtctgtctgtccattttcaagcatcttttccctttgtagtgacaagatggccccagcagcctcagccgagatgatggacaattctcttctcttaccaacaactccagcaagagccccagactgggtctcagggatccttcctgtgtcccttgttcgtcccaactgggcacaggaggctctgaccagctgggctgtgtccccttctgtagcccggggaaaaatcagccctcgtgggatgctaggactaagaaggggagagacatttccccagaggaaaacccacggcacaggtattcccccaggttcctacagttcactatccactgggcgaccttccctctttggattgggaaatgacagccaaaaatgttctacaagaccaaagaggagagggagtgggtggggcagggccacccagatgcagaaattgtccattcagttatggaggacatgagacagcatcctgcctgccttagtctcatactccctcccccactgtcaaggtgaccaaaaaggaacctcaattaggggagcgaggagagaaggtgtaccttttgccactagaggcaaagaaagagagacagacagacagacactgagttttacaatacagccatgcgccccataatgatgtttcagttaacggtggaccacatatacaatggtggtcccataacattaaaactccatatttttactatgccttttctatgtttttagatatgtttagatacacaaatacttaccattgtgcaacctttgcctgcagtgttcagagcagtaccgtgctgtgcaggtgtatagcctaggagcaatcagctgtaccacatagcccaggtgtgcagcaggcgacaccatctagggttgtgcgagcacactctataatgttcgcacaatggtgaaatcacccagcgatgcatttctgaggacgtaccccattgttagcattgcatggttgtgtacatacatgactgcctgcataaggcaccacggtctgaggctatcaacagctcaacattttgagtgaaatgcaagagcgttacctttacttaggtctctttctctctccacttttaaattatcattaagtctttcctctgcctatattgggcaccacatcagatgccatgatttttggtgtcaggcatcaaagatgattgttaaaatgcgtaagaaggacaatcttgtatttttacccctatttttaatcagtccgatattcttctttcctttctgaacttcaaagcctatttagagaacttcctttgaacattttcttttcttttcttttcttttttttttttttttttttaagatggagtctcactgtgtcacccaggctggagtgcagtggcacaatctcagctcactacagtctctgcattcctgggctcaagagatcctcccaccttatcctccagagtagctggggccacaggcacatactaccatgcctggctaattttgttcagagatgaggtttccctatgtttcccaagctggtcttgaactcctggaatcaagcgatccttccaccttgacctcctaaactactgggattgcaggcatgagccactgcacccaacccttcaggctggagtgcgatggcgtgatctcagttcactgcaacctccgctccctgggttcaagcgattctcctgcctcagcctcctgagtagctgggattacaagtgcctgccactgagcttggctaatttttgtattttttttgtacagatgaggtttcactatcttggccaggctggtcttgaactcctgacctcgtgatccacctccctcggcctcccagagtgctgggattacaggcgtgagccaccatgcccagcccccttcaaccattttttaaacaataagtttgctagcaacaacttctcttagttttccttcatctgagaatatctgaattttctcttcaaccctgaaggatattttcagaaagttcttcccccttccctgctttctacgtatttgaaagatgtgccacttcctctagcttccatgatttccaatgagaaatccactgttgttccaactggtgttccctatgagtaaagggtcatttctctctgagcatttttgagagtttgtcttaagttttcataagtttaactatgatgtgtcttgccatgtatttctttgttttgttcctatttggggttggttcagcttcttgaatttgtaggtttatgtctttcaccaaattggggaagttttcagcctctatttttctggctactttttcagccccactcttctatcttctccttctgagactcccatgataggaattttcactgttttgctgttgttccataggccctgggactgctcattttctttctggtctgctttctccctgtggttcattaccacaacttctgcactgctgcattttttttgatcactctgttctcaagttcactgacttcatccccctcatctctacttgactgttgagcccatccagaaaggttttgttgttgttattgttattgggtttttgtgtgtgtgtgtgattgttgttgtttttgagacggagtcttgctttgtcaccaggctggagtgcagtgccacgatctcggctcactgcaacctccacctcccagattcaagtgattcttctgcctcagcatcccgagtagctgggactacaggtgtgcaccaccatgcccggctaattgttgtatttttagtagagacagggtttcaccatgttggccagggtggtcttgatctcctgacctcatgatccacccacctcagcctcccaaagtgctgggattacaagcatgggccaccatgcctggctgtatttttcaatcctaaattctccatttggttcttttccataacttccatttctttgctgtgtcaaaatccagtaaaacatagagaaaaatctctgaaattaaaacattttatttaggaagaaagaattgcaatttggggcacacatacagactagggagtcttcaatatgtccagaaaacaaagggaaggttaaaggttttgtaaaaaggagaaatattacctattgctcttcaagaaagttcattggcatgaaggaggttttggggagctggcaagctctgattggtgagcaagggcggtgagtaaacctagtcttagggttgcagcaggttgcatcagcagctattgggtaaaactgatttcaggttatagcaggcagtttcagcaaccaggcttgcagagaattacatttttgaaatactgttatgtatcaggagtgcttttccccccgggcttctggactttgtttagttgggtatgacaagaataatccagtttgtaagatcagttttcacagctaagattttttttttttttttgagatagggcctagctctgtcacccaggctggagtgcagtggctgatcacagctcactgcaacctctgcctcctgggctcaaggtatcctcccacctcagcctctctagtacgagtagctggaactacaggcacatgccactatgcctggctaatttttgtattttttgtagagacagggtctcactattctgcccaggctgatctcgaactcctgagctcaagtgatccacctgcctcagcctcacaaagtgctgggattacaggtgtgagccaccgtgcctggccgacagctgagatttttaatgcgttcgtttgtttcaagggaattcataattgcagttgaagcatttttatgatggctgctttaaaacccttatccaacaatttattaatcattctgtcatctcattaatctccgcatttgtcgatgattgtttattcacactgaagttgaaattttccttgttcttgataatgatgtgtgaaagttgataccttccttctaccccatcctacccactgtccctcccaccttcccttcctccctggcccttcctttctttcttccatcttctttttcacttccccgctaacgtcaagactgcctgcttgatctcccttgccttcatttatggcttaaggcaaagcgtcacccactttcattcttccctgtaaacctctcacagttcaggtttccccttcgtgtcctctctgagccactctcctcctgtgcattctcatcactgaagtcgaaaataaagagacccaggagacagagccagcaactcaacacatgggccttgtttggttttcagctcaacaaaataggtgcaaaaccttctctcttagttgtaacccttttcttcagtatgaatttcttttttcaaaaaccatatgtgtgtgtgtgtgtgtgtataggtgtgtatacacacacataagtgactgaattgtggccccaaaactcatatgttaaaaacttagccaggcactgtggctcatgtctgtaatcccagcactttgggaggccaaggcgggtggatcacctaaggtcaggagttcgagaccaccctgactaacatggtaaaagcccgtctctactaaatacaaaaaaattaacccagcataatggcgcatgcctgtaatcccagctgcttgggaggctgaggcaggagaaccacttgaacccaggaggcagaagttgcagtgagctaaaatcccgccattgcactccagcctgggcaacaagagtaaaactccgtctcaaaaaaaaaaaaaacctccagtgcacctcaaagtatgactgtacttggagatatgacctttgaagagttgattaaggttaaatgaggtcatatgggtgaggctgttaaaaaaaactttaaaaagacagtttttaactattgaaataaacggaaatggtctgggtactgaattatatcgttaatttgctagggggatcatgtattatggttacgtaaaaaatctgtatctgttagatatgcactgaagtatctgcaggtgaaatgattcagcaagaaaaggtgggggtggggaatgaggtcattgttggaacaagaacagtgaaatattgatccttgctgaggctgggtattggtatatgggggtctgtttacactacctacacttgggtatgtttgaaatgtctataatagaaactgaaaagaaaaccaaaagccaaatgtggattcttcacactccctctttctctaccaagccatgtggaagaggttgcagtgactgtgtcacaacctggtgaaccttctaggcttgggtccctgcatgaccacatggagcagaacctccagtgacctgtgctggacttggaggagaacagtggattaacaaacctttgttatattgagtcttggcaatttcacagttggtttgttattgaaggtatattgtggagtagaagaagtaaattcaggacaccaactataatgtaatataatttgtcatttaaaagggtgtgtaccattttgggaagctgagatgggaggatcacttgaggccaggagttcgagaccagcctgggcaatatagcgagatgtcatctctacaaaaaatgtaaatatcagccaggtgtggtggcgcatgcctgtagttctagcttcttgggaagtgaagtgggaggattccttgagtccaggagttcaaggctgcagtgagctatgacagtgccactgcattccagtctgggtgacagagtgaggccccatctcaaaaaaaaaaagaaaaaaaaggcatatacatatgtatgcttatatatgcagataacctctctggaagcaagtatagaaaacgataaaactgtgggtgcttctggggacaggaattagaggactggagacagggtaggaaggagaacttttactataacctttttcttcagtttgagtttgttttttccaaaaccgtgtgtgtgtgtgtgtgtgtgtgtgtgtatacacacacgactgaattgtgtacccaaaaatcacatgttaaaaacttgacctctagtacacctcagagtatgactgtgcttgaagatattacctttgaaaggtgattaaagttaaatgaagtcttatgagtgaggctgtttaaaaaaaaacactttaaaaagacagtttttaactgttgaaacaaatggaaatggtctggaaactgaattatattgttaattggctaggtgggatcatgtattatggttatgtaaaaaaactctgtatctgttagatatgcactgaagtatgtacaggtgaaatgactcagcaaaaatggtgggcgtggggaatgaggtcattgttggaacaagaacagtgaaatattgatccttgctgaggctgggtattggtatatgggggtctgtttacactatctacacttgggtatgtttgaaatgtctatgtaaaaagggaaccaaaaaccagttgtgaattcttcacactctctgtttctctaccaagccacgtggaagaggttgcaatgactgtgtcacaacctggtgaaccttctaggcctgggtccctgcgtgaccacgtggagcagaacccccagtgacctgtgctggacttggaggagaacagtggataaataaacctttgttatattgagtcttggcaatttcacagttggtttgttattgaaggtatattgtggagtagaagaagtaaattcaggacacagtctatagtataatataatttgtcatttaaaagagcatgtaccactttgggaggccgaggtgggaggatcacttgaggccaggagtttgagaccagcctgggcaatacagcaagatgtcatctctacaaaaaaatgtaaacatcagccaggtgtggtgactcatgcctgtagttctagcttcttgggaagtgaagtgggaggattccttgagtccaggagttcaaggctgcagtgagctatgacagtgccactgcattccagtctgggtgacagagtgaggccccatctcaaaataataatttaaaaaagatatatatatatatgcatgcttatatatgcagagaacctctctggaaagaagtatagaaaacaataaaactgtgggtagttctggggacaggaattagaggactggggacggggtaggaaggagaacttctactataaccttttcttcagtttgagtttctttttttcaaaaaccgtgtatgtgtatatatatgtgtgtgtgtgtataggtgtctgtatacacagtcatatgtgcctgaattgtgtccctaaaatttatatgttaaaaacttaacctccagtgtacctcaaagtataactgtacttaaagatatgacctttgaagaggtgattaaggttaaaagaagtcatatgggtgaggctgtttaaaaaaatttttttaagccttgttttttttttttgagatggagtctcactgtgtagcccaggctggagggcaatggtgcagtcttggctcactgcaacctctgccccctgggttcaagtgattctgctgcctcagcctcccaagtagctgggattaaaggcatccaccaccacaccctgctaatttttgtatttttgctagagacggggtttcactatgttgaccaggcagtggaaagacgtaagtgaagtgcaggcacctctaaaatctccccagagcctgccaaattacactctctattttttcccagggaaattttaatgcatacctgggcatggacctgactcatcggcaccacgtatactcaccttactttggggaagaccgagaatgatggtatcggtgccaggccttgagttttccctgccaccgacacctgccggggctgggagccccacctgtctcagagtcctgccttccccagacactggggttggtggggtccccaccaggcatgggaggctcaaggcaggttcggggtgaagtgggggcccccttccttgtcagctgtcctgccctgtggttcctggggtcccaagtggagtgactgttgcctgagtggctggtggggagtctagacctggctgaagcctgggccccaatgccagcccagatgaggagcctgagactcgggggacagcccaggcccaagcaggctgacaaacagaagcacccagaacaggcagggctccaagacctcgcttttcccatcagagccgggtaacctgtcactgggcccatgtctccttctccccatgagttgtgtggggcctctgagcagggacccgggcagtgggccagggcccctctgatcagcctcagcctaatggggtggaggaggcaggggcgggtctggtggggactaaggtgggaggggcacctgcccctaggagctgtgtctcccagagcgcagtgtcttccccagtgaggcccgcgatgtccatctccaaagcagactgctaggatcttcaagtgaggatctaagaaaacagtccgggccgggcacggtggctcatccctgtaatcccagcactttgggaggccgagaagggcggatcacctgaggtcaggagttcgagaccagctggccaacatcatgaaaccccctatctctactaaaaatacaaaaattagccaggagttgtggtatgcacctgtaattccagctactcgggagactgaggcaggagaatcgcttgaacccgggaggtggaggttgcagtgagccaagatcacgccactgcactccagcctgggcaataagagcaaaactcggtctcaaaaaaaaaagaaaagaaaagaaaaagaaaaagtaaacggtccgatctcccgtaggtctgattatcaggatgacatctggctggggcagtggagattcagaagagaattctagcggccgcagggacaccgtcccagagcggcgaagagagggcccgggagggaggcggctctgcggctccccggaggagcggggccgtccgcggcgcaatggcggcccccggtggcggtgactggaatgggccccgcgcaaggccgagggtcagggagtgcagggcgcggtctgcaaggtgccttcggtgcccctttacccgcgcggggccggggactcggaagccgcgaggttgccctgagagcacccagcagctgctcgctcacgctcgcccctcccgcagtctgatctgatggttgactagctgccctccaccctgccccctgcaacttttgcagacaagcccccaggaagcaaaagaacatcggctacacacaaacatcaacaaagcccctactgtgtgtgcctggacctcagcaaagggcaagggagaggcaggctccatcacctccacaacttcctgttcctgtattcgaatttatgttcactatatttatctatcaatacatttcttctgtttcctatatgcaagtattcatcctcatgtcgatcctgaaaacggggtaccaacatcactcccattttacagatgagcaaactgaggtgcaggaacgtgaatttcactaacgctgtcaagaaacgtttggaatttggcagggcacagtggctcacgcctgtagccctagcactttgggaggccaaggtgggtggatcacttgagcccaggaattcgaaaccccatctttaccaaaaaatataaaaattatccaggtgtggtggcatgcacctgtagtcccagatacttgggaggctgaggtgggaggatcgcttgagcctaggaggcagaggttgcagtaagccgtgatcgtgccactgccttccagcctgggcgacagaacgcgactctgtcttaaaacaaaccaaaaaccaaaaaaaacatgtggagtggtggagactgcatctcagaagccaaaaatccctggcttcctggaccagcacagcccactgaccagaggtggacatgggaaggcgggtaaggagaactgctcaccctttattgcaccggacttcatgccagagaccccatactgggcatagctgggggcaccaaggtttagaaggagccaccgtcctgcctctgggatgctgctgtccagttgggaagggggaacggtcagtgcagaagaaagaagatggaaacagcaaggccactcctcacagctctcccggtgcgggggaaggagcccagcaagaatttctgctccaccaagggcggaaaggaggaagctcccccaggctgcggggatgagcctcgggaggtggagggcagaggagaggaaaagccagggaggagcttgaggccggatgaaggggaggccggatgaaggccacagcccttcgaagacggacactggagccccagggctagggctttctttcttcttcttcttgctagggccttctttcttcttcttcttcttcttctttttttttttttttttttttttttttaagactctcgctctgttgcccaggctggagtgcaatggcacaatcttggctcactgcaacctccgcctcctgggttcaactgatcctcctgcctcaacctcctgagtagctgggactacaagcacccgccaccacacccagctaatttttgtatttttagtagagacggagtttcaccatgttggccccaggcaggtcttgaactcctgacctcaggtgatccacccgcctcggcctcccaaagtgctgggattacaggtgtgagccatcacgcccagccgcgctagggccttctaagaaataaggggtgtaggtcaaatgggggactctcttggagcctcccgggggggtgcatgagtcctacacgctcccacctagagggacaatgcctcaggccatggcagggctgggtccccggtagccactatgcgtcctcggctgcctcacttccctctccagggtttcgccatgctggccaggctggtctcaaactcttgacctcaggtgatccacctgcctcggcctcccaaggtgctgggattacaggcatgagccactgcatccagcaggtggcagcccaagcccaggttggatccctcattccccctttcctcgacacaaacagggaaatacagctagccctaaggggctgggcccagttttggtaaacggtctttgagctctggaaagaaaactgtttatccaggcaccctctctactgagatgacccaaaagccatgggcaaacaccacagcaaacatggcctgtccccctcccatggctcagaggggccttctcctcccactgccacactacattctcacttattcactcagcaaccatttactgagcacctgttatgtgctacaccctgtgcaaagtaagatctacactttcggtatctgctaagattcaaactttcatcatttattttaaatctttatttacttcaggaaccacaattttggagaaattattatttccagtaaaatgtggatatgacatatctctttgacagcatctattgtgttttgcattttgttcaactgggtgaggagaggtgactgatatattccacctgttacatacatagaatatataacataatatataatatacacattagataacaactctcccttctttctttttacattggagaagccacatatttacagggttcaaaataaaatcctaacagcattaaagcattgtggcagagacagagttgaccaaacgtccgtgggctcatctccatttcccaggctcccctacagtttggttagggccttgggactggttctggtcaatggaatggaaataaagtgttctcctgggacaaggcagctaggagctagcctgcttcctctgtctcttcccctgctggggcaatgagggggccttggttcctgcaaggtggaggagagctgccccacccatagtggacttcgtggaagtgggaaatagcccttcctggttaagccactgagatgtcagggcttatttcttattgcagcacagcctggcctaacctgactaatgcaagttagacagtgaaaagtaggcctcctctcagactttcagtccgctcccaatacaggtactgttgccacatctttgtgtcactttcccaaaatgttatctcttctctagaagcctgaagaagactcccctgggagccttagggatgggcagaggctgagccctgctggccagagcccttccgcaggcaggtgggtgcccagaggagccctgttctcagttactgctcacagcaccagacctccaccccaacccaggtctcctgcgctagggccaccagggaagcaggtagaaaatggcatttgacaggctcccaaacccaagcacacctattagagaaggagcagagaggaggcgcagctggaaagatcgagtgtaactcaagcctcgcattctcctcctcctgcctaccccatggggtcaaacttggatttgaggcctgcctgcaacttgcctccttttccgaatgtgttatttatttatgatgaatagagcatgagatgaaactttagttccttgaagtgaactgtcatttaatgacttccttttcagaatttaaaactgcttctttttcttctggactgtgaaagccgcacttgcttcatgctttttttttgaaacagggtcttgctctgtcacccaggctggagtgcagtgacatgatcgtgactcactgcagcctggacctcctgggcacaagtgatcctcccaagtcagtctcctgagtagctgggactacaggcgcatgccacaacgcctggctaagttttgtattttttgtagagacaaaaacatgggtttcaccatgttggccaggctggtctcaaactcttgacctcaggtgatccactcgcctcggcctcctcccaaggtgctgggattacaggcatgagccaccacatccagcagcttcatgctgtaaaaaaaataaacccaaatcacaaaatacagaaacatacaaaggaaaataattaagatgacacataatccatcacccaaacgtgaccactgcaacatcaggggttgtggtccttgcagattattctctacatagataaaaacctgttgctatgctcgagggcctttttcttgaaccaaaataagaacaaatgatattttgtttttaacttttttttttctaataaaatggatgtgtttccaggttaacaactatagatctatattgtcaggtttggtttggtttggtttgaaaactacttagtattttgctgctagaagaagtccaccaaatagattttggaattgtcgtaatttttttaatgtcctcattttttttttttggagcatgggactacaggctaaaaatttaaatataaaatttaaaaaaaagtattctggtaagtaaacactgtttagtattaaacttcgatgaacttgtttttcactttagttatattgacctggtttttctttgaactctcacaagaatgtaagcaatatttatactttgtttacttatttatttatttttttgagacagagttttgcttttgttgctcaggctagagtgcaatggcgaagtcttggctcactgcaacctccacctcctgggttcaagcgatcctcctgcctcagcctcccaagtagctgggattacaggcgcccaccaccatgcctgggtaatttttgtatttttaggagagacggagtttcaccatgttggccaggctggtctcgaactcctgacctccggtgatccacccgtcttggcctcccaaagtgctgggattataggcatgagccaccgtgcccggccaacatttctattttaaaaatgctttttttcttaatgtggtagattcctgggaggtgattatattatctcctttataccttttgttataagttaaatatttactaatagtgttttgaaaccactgaaataaatacaattagtgagccaccacgcccagccaaggggggatattaattcagattcttcctatgctttttatgtgttcagttgctaaaacataaaatttgcaacttatttaaggatgttgacgtaaatatttgaactttaaaactttttctactttcaaaggcatgtgtgtgtgcatgtgtgtgtcagtgtgtgtgtctctgtgtgtgtctgtgtgtgcatgtatgtctgtttgtgtgtgtctgtgtatgcatgtgtgtgtctgtgtgtgcatgtgtgtgggtcggtgtgtgtctgtgtgtgtcagtgtgtgtgtctgtgtgtgcatgtgtgtgtgttggtgtgtgtgtcgtgtgtgcatgtgtgtgtgtctgtgtgtgtgtcggtgtgtgtcggggtgtgtgtgtgtgtgtgcatgtgtttttaaacagcatctcccctttgttgctcaggctaaagagcagtggcacaatcatagctcaatgaagcctcagcctcccaagtagctaagactgcaggtgtgagccaccatacccagctaatttttaaatgttttgtagagacggggtctcactatgttgcccaggctggtttcaaattcctagcctcaagcaatcctcctgcctcggcttcccaaagtgctgggattacaagagtgtgccactgcatgcagccccaaaggccctgctttaacaatctggtccttatttgaaaataaagcaatttgtaaataaactattggaaatccaggataatggaatcaggctctttgcctttattttttattttatttatttattttttatttgagacagagtttcactcttgatgcccaggctggagtgcaatggcacgattttggctcactacaacctccacctcccaggttcaagcaattctcctgcctcagcctcctaactagctgggattacaggcatgagccaccatgcccagataattttgtatttttagtagagacagggtttcaccatgttggccaggttggttttgaactcctgacctcagatgatccacccacctcggcctcctaaagtgctgggattacaggcgtgagccaccacacccggcccttctttgtctttaatgctaagacagtctggcttcaaaataaatattttaagaacaaaccagatgaacaaattgatgattggggacagaaaatctccccaaagctttatttcagattaataatttgtatcaatagtgttgatttttgtagcacatataattgttcaaggctttgcaaatatttttgaagttagaaattaaaacctacgctcttctgtataagcctccatgtccacgggctttattctgtaagtggtcatttatttttctcaccgcgttatctattttcctatccaaaagatatatttattttattttatttcagctaatgaaatttatgctcaaaaatgtgttttaaatatgtactgataagagaacagttcccttatttgggaggtgtttgtaatctaatgttaagtgggcagggagaaggatattacattgtttatatattaaattatgtttatatgaaaattcaagggaaaaataataaaattagcaaaaatcagttggtggacagggtgaactgttttttttggcttgctgtctttccctttttcctatattccaagtgttgtgtgatttcatttgcttatttaaaaaacctaaaaattaaagacatcttcagaacaaaataatacgaagtctatttaatttcatccaccaaaaacatttttttatgcttataacataacttatgttcattgtgcaaacaaacatgagatgttccaaaaaatataaatgaggacattaaaaaaatcactgtcattccaaaatctagctatattctctatgaacattttgctgtacttgctttcactcttttttctcttccttttttcttttctggttttttgtttgtttgtttgtttgtttgttttgtttgagatagggtctcgttctgttgcccaggctggagtgcagtggcacgatcacggtttactgcagcctcaatttcctgagaacaagcaatcctctcgccttagcctcccaagtagctgggactacaggagcacactaccgtgcctggctaattttttctatttttttgtagagatgaagtctcactatgttacctagcttggtcttgaactctgggttcaagcaatctttccaccttggcctcccaaagtgttggattatacgtgtgagtcacctcacctggctactctcattcttttgaaatagtgtttagtgtgattgcaattcgagtatatgtagagtgtttttttttctttttctttttctttctttttatgtttttgagatgagatttcactctgttgccctggcctggctgcagtggagtggtatggtcatagctcactgcagcctcacatagaggatttttttttctttttcttgaaatatcatgggcattttccatgatgttacttttgttgaaatattatttgtaatggttgcttaggagtcttcaacatgaatagcctacaatacatgtcataattccaccattttgtcaatgtagctgctttccttgccttgccttttacaaatcgtgttgcactgaacaacactgtacataatattttgacttgtctttgattatttcctagagatgaagtcttagaagtgaaatgactaggtccaggggcaaaaaaaaacttttttattctatttttgaggcagagtctcattctgtcgcccagtctggagtgcagtggcacaatctcggctcactgcaacctccacctcccaggttcaagcaattctcctgcctcagcctctagaatagctgggactacaggagcgtgccaccacacccggctaatttttgtttttagtagagacgaagtttcactgtttggccaggctgatctggaactggtgacctcaggtgatccacccaccttgacttcccaaagtgctgggattacaggcgtgacccaccacgcctagctagtaaaaacaaacaaacaaacaaacaaacaaacaaacaaaatatatatatatataatgcccttcctatgtttttgaactgcctgaccaagaggtgtcttcaatgtatgcacttgtgctcattaagagtatcttttaattctaaaaaaggagaaaaagaacttaagctattttaaaagataaaaaatgcatctcattattctttctcagcattgctttggttactagtgaggctgcgtctgcttttcctgattggccagctgttgctctttctgtgaataatgtttcaagtccttttttttccccgttaggatgtatttatttaaataaatacatgtatttaaataaactctttaccagaattattatttctttagttacaatatttatgacaaatatttccccatattgttctttaactttaaattttgtttcttatcacttttggtacacacaagtttgcatttttacatggtaaaatgttggttttgcttgctgagaattccttcatggcttttatgtgttaaaagagcatcttcatacttgtctgaatgttccacctagattttttaatgtactttattttatttatttatttatttatttttattttattttattttttttgagatagagtctcgctctgtcacccaggctggagtagagtagcgcgatctcggctcattgcaagctccacttcccaggttcatgccattctcctgcctcagcctcccaagtagctgggactacaggtacacgtcaccatgccccactaattttttttttttgtattttttggtagagacggggtttcaccatgttagccaggatggtctcgatctcctgacctcatgatccgcccgcctcggcctcccaaagtgctgggattacaggcaaaatgtgctttattcatttatttatttagagatggagttttgctcttgttgcccaggctggggtgcaatggtgtgatctcggctcactgcaacctctgtctcctgggttctcctgcctcagcctcccgagtagctgggcttacaggcatgcaccaccacgccaggctaattttgtagttttagtacagacggggtttctccatgttggtcaggctggtctcgaactccctaactctggttatccacctgcctgggcctcccaaagtgctgggattacaggcgtgagccaccgtgcccagccaatgtgcttaatttttttaagttaactctttaactcatctggaattattttgatgaatggtgtgaggcataaatggaaccaagcttttcccaaacaaccaattttccattatagttattagttaatatttcctttctccaattaatttgtaattcttctttttaccacatgagaaggctttacatctatgagagtccattgtctgggccatttactttatttcactggtctgccacttcttgaaccaacataccacaatatttatattgacactttatcttttcatatctgatatgaaaatcatttttttctaaaacatcttagttatttttattagtttattcatacggatgaaaaagtttaggattttgacacattttaccagatctcatggaattttctttggtactgcacttgttcagttccccaatcctcaatcatggtagagctgtagttttccttatatgggtcctgctcaaattgttagaaattcttatttctaagaaatgtattatgactatcataaggcgattttcccatcaccacccctgctcaggttactaccaattattgttggaataacagaaagtgtttttttccctattcatcatacacatagctacttgctgcgattatggattctgagaacgtcttaggtgactatttgggttttccacgtgggccatcatatctgcaaatagtagtatttctgcctttttttttttttttttttttttttggtatttccacttcttgcttcatgttttactgcattggccagggctggtagaaagatgttcagtggtcacgtgaggttttactactgactttattaggaatgcttctggtgtttctcatctgagttccgttgtcgcttagactttgaaatccctttttaaaaatcgtgttcagaaagcacatctcatggaaatgacaaatatgagaactaaaaccgacaaatttctgcccaaaatcccacatgcagagcctcctggcctggagcctcctgaggcgtcggttctttgatgacttcccatttcttttccctttttttttttttttttgacggagtctggctctgtcgccagtctggagtgcagtggtgcgatctcggctcactgcaacctccgcctcccagcttccagtgattctcctgcctcagcctcccgagtagctgggattacaggcgcctgccaccatgcccggctaatttttgtattttcagtaaagacgaggtttcaccatgttggccaggctggtctcgaactcccgaactcaggtgatccgcgcgcctcggcctcccaaagtgctgggatgacaggcgtgagccaccgcgccagctgatgacttcccatttcttccttggttctttcggagccactttgggaaattcggttctatctgcagtggtaaaatacaggtcggctctccacgcgcgcggccaatggacgctcccagcgcggacagacaggccctttgctggagctgggcagggcgaaaggaccccagggcggggcttcagtcgaggccggccccgcccaccgctgcagccgcgcatgcgccatgtacaggctgctttgggccctcccgcgtgccgttcttacccggcctgccccgcgccgccgcttccggaagtgggtctcgtctcctcccaagcggagcatttgtgcctgaagctgccgggtctgctacggcaccgcggggctgcagaaacccgggggccaagggcgggctgcttgccgctatggctggcagtcaggacatattcgatgccatcgtgatggcggatgagaggtgggtggtgaggccgggcccgcaccccgccctgtctggtcgtctcccagcggcttcgccgccggctgcggcccagggcggctgctggagcctggcgtcccttgggcgtgcgcattggggagcgcctggtggccgtggacgcagggacaagtgtgggcctgatgctctggtcctcttctcctggcccgctccggcggggcacgtgcccagctgctcttccagacccgccttccctgtcagggctgccccaaacatctgctcagcctggtggttcccctcctccgaggccgcctcgtcctctgggaggacagacctttgccatctgggagctgcctttttttctggttccttaatcataggacatacggcagtattcatggatgtgctgatagatgtacccgaccacaccccttttccctccagagcccctggggagcccctcgtgctgcgacagtgggggagctgtgagttgcctcctggctgacttccagtgcccggcccagaggacgcgtccatagatgttagttaagaaagcggccgaacatttagcagtcaggcgctgacgtttatttagctcgcgctgtgagtcagacactgagctaaacgttccaccctggttatctacttcagccctacttagtaagtggatcctattattcttcggaatttacagactaggaggcacagtcactttccagggtcacacaactattaagtggggagctatgcaccctgcttcatggggcgctgcagcccactccttgcatgtttggtgactgcaggttaagatagtggcagttccactgttgggcctcagggtcagtgctactccgggtaccagtcggagaacattttgtggtgatctgatgccatttctctctgttgccctacccatgtgatgtcaaaccctgtgtatgttgcagttttttggaagcggttgacttgggctagtgctacttgaacactcacagaactttggccccctaactctggctgcaaaccagacttatctaggagactttgaaaagtagattccgggccagatgcggtggctgacgcctgtaatcccagcactttgggaggccgaggcgggcggatcacgaggtcaggagatccagaccatcctagctaacatggtgaaaccccgtctctactaaaaatacaaaaaattagccggatgtggtggtgggcgcctgtagtctcagctacttgggaggctgaggcaggagagcgtgaacccgggaagcagagcttgcagtgagccgagatcgcaccactgcactccagcctgggcgacaaagcgagactccatctcaagaaaagaaaagtggattgcaggccaggtgcggtggccctcacttgtaatcccaacacttggagcggccaaagctggaggatcgcttgagcccaggagtttgaggctatagtgagctgtgatcataccactgcactccaggcagggcaacagagaccctgtctcaaaaaaaaaaaaaaaaaaaaggaagaaagaaaagtagattccagggccttgctccagacgtactgaatctctgggggtgaggcttttgagttaatatctttgaattttccttgtgtgtttctagtaccctatcaggtttgggaatccctaatttagccctttgttgtagatgaagaaactgggctacaagaggtacagtgacttccagaggcaaataggaagtggtagatctgggactggaatctgtgtcttctgacttgaattttaggcttttcctcctttactctggtttgtcttactgggtccgggtaatacaagagagagaagtttttctggagaaagtattctttctcctgttgatttgatgaagcatgcttcttcttcacaggtttcatggggaagggtatcgggaaggctatgaagaaggcagtagtttgggtgtgatggagggaaggcagcatggcacgctgcatggagccaaaatcgggtctgaggtaagtgggaacccccatctggagatgaagcctcttcatttacaatttataatttatttcgatattcagtgtgatggagtaagaattgtcaggccttttaaaatcacagtgccggatgggcgcggtgactcacacctgtaatcccagcactttgggagtctgaggtgggtggatcgccttgaggtcaggagttggagaccagcctgaccaacatggtgaaaccctgtctctactaaaaatactgaattagctgggcatggtggtgcatgcctgtaatcccagccacttgggaggctgaggtatgagactcgcttgaacctgggaggcagaggttgtggtaagccgggaccgtgccattgcactgcagcctgggcgacaggatgaaactccatctccaaaaaataaacaaaaaaaatcacagtgcctttgcatgggagttaatggactagatggactgttgctggagaaatattcttagtacagaaccaagagtgcattttgctgtaggtagatacaattaaattatgcatgctggataaaagaaaacaagtccctggtctccttagtttacttgggagtgtcatggtgctggctcatgtactaagccaaagaatgggtgccctctgtcatgtgaacatattccatttatgtttacgttgaaatttcattaactttatgatttttttttttctcttcttgccctttgtcctagattggcccttacagataagtggcccttagtggcaaagtctgagttgaggcagttatgactatattggatgttcgatgctgtgaaacagatcaccacaaaattcatgggcttaacacagcaaatatggatgatctcacatgtttctgagggttgggaactcaggagcagctttgctgggtggtcctggctcagggtgtcagccagagccgtgtcacctgaaggcttgactgggcttggaggatctgcctccaaggtggtgctgtcacctgactgtgggcatggacgtctccatggggctgcttgtgtgtcctcgtgacattcaagagcgagtggtccaagagagctggtgaggcaagtgacactggcttttatccctagactcaggagctttgtgctgttcctccacattctgttggttacgaaagccaccctggtggagtgtcgagggacctgcacagggcatgggtaccaggagatgaggactggggcatctgggaggctggctgccccaccgatgacctaatttcctaatttccattgcctaatgctcaacaggtgcttccagaacaatagtgtgagaagcaccgctgccttctgcccccaccttttgttttgagatcttggtaatgaaagtgtagctagttgcttattaatttcactcttaaatatttttcacattcacagatcgggtgctaccaaggttttgcttttgcatggaaatgtctactgcacagttgcaccactgagaaggacaggtaaaggtggagatgtctttctttctcagcgtaggaaccaggagttctagttccatgggttaccagcatgcccttgagtaatcaatctgtctgttcctcatctgtaaaatggagaaaattatcagtgtcaagcttgagtgttgttaggagatttaacggaaatactaaatagaaagtgccaggcacattttaggtgtttggtgaacactggctgttgttgcttctcaagagttctatgctcctgccttttacctggagtcattagtgcaccatgtggcttttagataccctaccaataaaataatgttgacattgattgtattttctcattcacctttcccctgagcttctaataaacaaattataacagttttgtatcacttgggctcagagatgaggacaccagtgtcatcagttttttaatgtagccaactaagtctgttaacaagaaaatgcctttaaatgtgtttaactcctttctggaacttgtcaacactcagtaagtgttagctgtcatttgaattgtttttagcctttaaaaactcttctcggccgggcgcagtggctcactcctataatcccagcactttgggaggccgaggcgggcagatcacgagatcaagagttcgagaccagcctggccaatatggtgaaaccctgtctctactaaaaatacaaaaattagccgggcgtggtgccatgtgtctgtagtgccagctactcgggaggctgaggttgaagaattgcctgaacccaggaggcagaggttgcagtgagctgagataatgccactgcgctccagcctgggcgacagagcaaaactccttctcaaaaacaaacaaacaaacaaaaactcttcttcctgcattgtacttactgaagccccatgtgaccctgctttatctatcttcattctgaagctggaaatgaacccttgagatggtttggatactctgctgttcatgggcagcagcaagcgcgggacctgagctggtgctctgcgtcattctgacacctggtggccttgcctagcgtgggaggggcacaaggagagtgggtaactctctccctgactacgtgacttgtgcttttatttgaaatatcttgaatttctagaaataccttgaatatcttgaatattcaaatgtttaagaatgaggatgcttgcaactgatacgggtagttctttctgctccgtttgtaccagcagttgggagtcgatgggattctgggttagcagaggggcacttgaggacattttcctcctggttctcaggcagcggccggcagctggggatcccaggggaatcgctgttggcagcctgtgctaccactaggtggcagtcaaagctgagcctggctctcaactccaggccacaaaaggatgtgtgttcttggagttctccgcctgtctcccttctcccacagcggcagaatctgccggctcctggagaagtgctccgctgtgtgccagtggtcccatcccaggaggttgccagcccttaccccagagcaggggtttgctgacgtctgaaagcagcacactcagtctagctaacagagaagaaccgctttggttgacgaggggctggtggaagccctgccagacccccctcgcagccgccctcatcccatccagtagtacccagaggtctctttggaacctaaggctttattgtagagcagtggttcatggatgtttagatcttacatgtcaggtttttttttttgttttttgtttttttttaaatggtgaagggctgatattgcatgttttacctgtaaatttttccaaataaggatgttaagagaaaaacacctgccaccgcattgtcattcagcaaaatgctgggcattgtaacaccaaagaaaccacggagagcggcatctcaggccaaaagatggtgctttccgttgagtaactagctttccggtaaactgcgtgacacttctgtccccggcttcagcagtctggtgaaaccctcctgcagaccagcgcgcaccggggctgagcacgggggctctggcaccatcacttttctttcattagccctgagctgctcacacctgcctgacgtgtgccgcctctgatggtgcgcccggctgggtgtgtctgagcagcatcgctgaccagaaaagtaaccgcttgccaagtggaaagtgcgtggtcctctgcatcgggttagcatacagccacctcccacgttttggcatctccctttggtttccctggaaaccaggtgctttgttgctaaaactgacttgctttgacctttcacagttttgtattttctcagagaggtagccatggttagctcttgtaaactggatgctgctggcaaacttgctcttctctgtatccaggagcaccagctgtttgcaagtacacaggaggtcttggttgctttgaattgctgttgattcatcctaactgtcagttctttaaaatgcccgttaatcgagtatcttgcctactctggccactcacatggtccaatgcggcatagaggcagcatgcttctcaggaccacctgtggttcattgaaaagacctggccccacgagatgtacacatgtgtggattatttttaaacccctgcaggtgagagccctgatctctaggatccagaggaaaccaagagaccaagagactaacatttattgagcacctactctgtgctggagtccaagcttcatgtcaattttttttttttttttttttgagacggattctcactctgtcccctaggctggagtgcagtggcacaatcttagctcactgcaacctccacctcccaggttccagcaattctcctgtctcagcctcccgagtagctgggactacaggcacacactatcacgcccatctaatttttgtatttttagtggagacagggtttcaccatattggtcaggctggtctcgaactcctgacctcaggtgatccaccctcctcggcctcccaaagtgctgggattacaggcgtgagccaccgagcccggcccatgtcagttatttaatcctcttgaaagtctgtgaggttgctgttactctccccattaaaaaaaaaaaaacaaaacagaaattaatttctcaccatctggaggctgggatgccccccattttacagatgaggccagcagggttgaaagcaggtagagaggtgttggggagatgtcatgcccagggctgctgtctcctgagtgcacagcctttctgcagaacctccttgcctccccagcaaagctgtttcctccctggggaggggacagtactgatttccgcctttggagggaggggtttgctggtttacctgcagctgaactttggaaggctttgagcacaaagaatccagatcctggaaaatccccagacccagagcaggcctgctcgtgcccagccccagtccctcttgcccagttctgtctgtttctgcatgtgtgacctcgagagtcagcagggcttctggctgcctcagccccttggccccgtggtcggaatggaggcgtgtctgtaagctaggcacacacttgctgtcgaggcactgggtatgggcctaagctcgttgctaggtaaataaatatgatttcgtgtaatgagaaaataatcatccagcttttgaacgaaggcattcttagcgcacctgctgggtttcaggaagccagcagcatagctgttgtgtaagttgagcctgttgtgtgcacatgactgagagtctgtatttctgtgctttacagcagaaagatgaaggtcttagaatcattgattggaatgatccagaaattcccttatgatgaccctacttacgataaactccatgaagacttagacaagatcagaggaaaatttaaacaggtgcgtgcactgtgtgtttcctcctgctaggagcacctgattgcgcctttcccaggcggggcagcgcactcccggggccgctgcggcaatggcctggggctgcgtgcgccgcggaactgtccgtagaggcgcctcatccttgagtcgcagtgcaggaaaactgaagacagtccagagaaaaggagttagaactcatttatgggctggccacatagacaggaaaagctatagctagagatagagttatcttctcatttttcagtaaaaatgcacaagattaaaaataccatctcttttgtgttttcagttttgttcgttactcaatgttcagccagactttaaaattagtgcagaaggttccggactttcattttgaggaggatggatgaacagagaccgaacgtcgaggaacagatgtgtgtgtgacgtgtttagaaatgcggtgaagggccagacggtgctgggaaggcagttgttcattgggagggtgagggttccggttcggccgtgggagggcttccttccctggggttttctgcctgtgtcaccttggtgcccgtcttggggcctcgccacacatgccctttgttgggctgaagccgtccctggcagagccctcgtgcattgacttgacagcctctccggcagcacaggcctagctggttctgggttggagttggctctggatagggtcagtcaccaggcctggactgaaggcagttatttttattattattattatttgcaatgagagagatggttggccccgaatgaggctcatgggaggtttggacgggtgctgtgccgcatgtcgaggccgattgtgtgccaggcggtgcgggacgtgcctcccgtgtgttatttaatcccttcaggagcccacaagatgggtgttattctcattttacagaggagggaggggagacgcgaagggattgcctggtctaagggcacccagcagcagagctaggacttccgccctaaggctgtgcctcactgccaccaggcacagccgcctccggaatgcacaggcgagtccctgccctccctcccaggccgcacaggtcctgccaagcctcacggagcacgggggagtctgtggtggccagtttacctgggcatctggctgagaggaagaaaggccaacctgatcctgaggggacccagacatatcctttgcactgtccctagaggggcgatgagctttgcagcattaaaaaatggtgaaggggggaaatattttgaaccaaagaccaaatgttaggccgccgttatatttgcagaagctttgagaaccatgcgtatagcctcctgcattctcccctctcctaggagctcttttgtctctgtccttacgaggcgtcatacagaggcagtggggtgggcacagatgagcagagtggatggttcggtgggtccccacgaggcgagtggtggtcatatgtgatggcacgtgttcacacaccctcctgtgtacccccccagggtcaccgaagtccccacacgctggctctccacacccctcctgttccagaaagcatgtccgaaagcagtccaggagattattaaggggtcgccatgaatccactttggttttaaaaccattcccgaatgtcctagtggattgtgttgtgctgcctaagctgccggctgcaggagccagagaagtgacccccgcgggagcagcggcaggtggatctccacggtggctcgctttgtttttgttttgttttttcttttaagacggagtctcactctgtcgccgagtttggagtgtattggcgcgatctcggctcactgtaacctccgcctcctgaattcaagtgattctcctgcctcagcctccctagtagctgggattataggcgccccccaccacgcccaagtaacttttgtatttttagtagagatggggttttgccttgttggccaggctggtcttgaactcccagcctgaaatgatccacccacgtccacctaccaaagtgctggaattgcaggcatgagccaccactcccggcctgctttttgtttttgaagacaggacttaggtctcctcctcccgaactctaaacctgcgtgtgtggctgtgcaccgctcgtttgtagcgtcacctcaggtctggggaagtctgtgctggcatctcctcattgtgccttcatcagagctggtgccttcgggccagaaagactctcgttctttctagatggtgggatcaggggcctttgctgtgtttcccttggtggatttttgtgttttgtaagttgtctattttgataatgtattatttttataactgtaaaaaaagtaaatagcatattttaaagtgaaagtttgggaccatttataacacaacgtcatttataacacggcatcatttataacacaacatccagccagtttatttcttcctccagggcatttaggatctggatatgaaggaagacatgggccttagatttctgccagcttgtctccttaacctagcgtagacacagccactgcgagagtgctcccattgtgttggggactggtcagctcctgctcacctggcccagccacctgtcagcagctattactaatccaccctccccgagacatctctatgcccactgtcccccaccttctctcccttcctctcctcttttttcttctcccgtctctgtctcctgttctctctccctactccctctctgcctctttggcacagctggctgagcagcatactgccacttcctcctctggtttgcctcacatgggagccagggctgcctcctcatcttcaagattctcacacactctgctgacctacgcctgcctggcccctttctagaggacgagacccagtttccgggagcccttggtcaccgccaacattgcagtatggacagagcccactgtaacaggtgcttccgtcgtatccaggcaacgccatcctcagcttttacactgggaatgagcatgtctgtgtctcctcttctgctaatgaggtgttagtagagggtccgaccagtccccagcacagtggcccactcttagaatggctgtgtctgctgggttaaggagatgagttggcagaaggtcctccgggggcttctgggaaaggttacgtcattccaaagaaaaggtgctggtgctattttggacatcatcctgttgggatgcggcagctagaactgctccaggcatcttgcaggctggctacagctgaagccacccctgagcctggcagagtgaagagctaggaagaacctgcgtcctcggtgccactgcttgctgttcccaccagccctgagccaccttgctcacacctgtgagcgctacccgtcccagtcctgcaaggctgtggccctgggtgtccgctgtttgcggacaaagtctgcttgctgtcttccccatccctgccaggcccatcccgtcccgctagttccagacatcagcctttgtccagagtggctttgagtttgggagctcctggggttggattgcatcccttgcggttggtttcccaaggctctggcctgctccttccttcctgtcagaagctcccagcgtgtcgtctgccactgtctcagctcaggctgccaccacagcaccactgatgggtggcttcaacagcggtccatcttctctcggttctggaggctggagtccgagatcaaggtgtcacagggctgctccctcctgaggcctctctccttgccttgcagacagctaccttccccccgtgtccttacgtctttccactgtgtgtgtcctcatctcttataaggaccccagtcagattgcatttgggcccacccttacagcctcatctgaacttagttacctgttaaagacctcactctccagtcacattctgaggcactgggggctaaggcttccacacaagttttgtggggacacggttcagcccctcacaggaccctggctgtggctgctggatagactgctgaattgggactcgggagaagagaaagccatttcatgtaaaagttgaagttatttcaattagttttttctagaatgttaacatctaggcacaagcaagagtagtcagtcctccactgaactctccactttggaatcacctctcagagtcactggatggccaaagggaactgcccaagggccacactgctgtcctaaaacacgaccacatttcactttattttacattcaccccttgacatttttttctctaaccagtggcaagaaaagaatgatgagatatggaagaagggacaagaggcctatttgctgagtggctgctggtggcctgccctttaccaggattatccaccagtgctggaggcagggctaccaccctcactttgcagagatatgaggcccggctgagaacaagtctagtggtcacagtaagtggccaacttcaggcttgatggggcgcagcagggcttgagcaggttgcatgaacgattcgcttcctgaggccgttattttagacatgtcttcttcgtcaatgcagaggcttgtttttctgggaatttgcagcctgtcttcaggaccagtcttgcatctggcacagcagtccccagcctttttgacaccagggactggttttgtgaaagacagtttttccatggacagggcttggtggtgggggatggtttggggatgaaactgttccacctcagatcatcaggcattagattcttgtaaggagcacgcaccttacatccctcacgtgtgcaattcacaatagggttcccgctcctatgagaatcgaatgccgctgctgatctaacaggaggcggagctcgggcggtaatcttctcttgtctgctgctcacctcctgctgtggggcccggttcctaactggtcatggactggtgccggtccacagcctggggatgggggaccccctgatctagcagactgaggccagattgaggcaaaagcagatgaatttatggaaaaggatccatgctggcagcctgtaggagaggcagtgcctggatgggtctttagctgccccagaccccgtgagcaggtctctcctagcgacgcctctggcactttgggagcccaggggaggggagggaatgagaaggtgggcaaaggaggagatgaccttcgtactgagctttgcgagcgttcatctggcctcacaacaccgcggagaagtctctcccactctacctgaaaacgccaacgtaatctggagataccaaaaagtgtcatgatcacgcaagcttatcctaattcccaccgttattctggtccttaatgaatcaaatgaggaactggtttgtgactcaggaaactgaagtcacagagttcttaagatctgagaaaaatgggtcactgtgtttggtgcttcacaggacacggggcctgcaggcgaggagccaggcctcaagggttcagtgagttgtccaagccagcgtgactaagggttccgctgggacctctcagattaacttccaagaaggaaagccgctccttgcgcatacactttttcttaactctccccggctggtaaactcaggtggcatcgaggccttggcgtctaccccttggtgacacccccatcaggataacgccttggctgtgtctctctggcaccctttaccagagcagctgggcttgggttgcagggatggaagcctttatctcaggcgatacctgaacatgtagagtatgtgatgcttgctgagctagaggctcatggattgatgtccctctgctggttccagtgagtatgtgcccctgaaattcgaggggactgtggaggctgcttccaggctttgagagcccaagtctgttgcaaattgaattgtatccgcaaaaggaaacgttgaagtcctagcttctggtactttagcttctgtgactttacttggaaataggaaatagggtctttgtagatttttttaagatgtaaattgggccaggcgaagtggctcacgcctgtaatcccagcactttgggaggctaaggtaggtggatcacgaagtcaggagttggagaccagcctggccaacacagtgaaaccctctctctactaaaaagaataataatttaaaaattagccaggcatgatggtggtgcctgtatttcccagttactcgggaggctgagtgaggcaagagaatcacttaaacccgggaggcggaggttgcagtgagctgagatcacgtcactgcactccagctcaggcaacagagcaagactttgtccccccccaaaaaaaaagatgtaagttaaggtgaggtcatactagagtagggtggccccttcgtccaatatgactggtgtccttttaaggggacgggagccagtggcacagaggagagactgccacgtgaagacatggggccgatagccctgtgaggacagaggccgagtttggagctgcgcatggaccagctgagaagagccgaaggtcgcccgaaaccaccagaagctgggagagagcgggcactgcagacactgctggcctctggaactatgagagaaatgttggttgttttaagctgctgagtgtgtgaaaattcattacagcagccacagaaaactacaaggcccctctccctgcctgggcttcgtttgctggtctggagggtaagggtgccggccacaccatccagacacttctggccttgcatgtggggcctcctcagggatttgcctggactcccccaggtctcagccgccactgagggcaagtggcgggagcccccgaaaggcgctgtgaccgcaaggctcactctccaagaggcctctgccttctgggaggcgcagctgccctgcacagaggactgagtcagggtccaccagagaaggctggcttgagcctctcccctggtctcagcccctgcaggcactatccggcctcagaacttgggatatggatgtggtcaggccctttctccaggtcagtttggtcacacgtgtgctctgttacacacagagtgtgtgccatggaagagggacctgtcccttcagacagagcagttctaggcatacttctgggcactggtggccccaagaggagtcattccctgaccctgtggaactcccagctaagcaagacaggcatgttgaaattccaagatcacatggtaactttgtcagtcgctcctgttgtttatatcaatcataacatgttagatctagaagaggtagaaaacacacacaagcggccgggtgcggtggctcacgcctgtaatcctagcactttgggacgccgaggcgggtggatcacgaggtcaggagatcgagaccatcctggctaacacggtgaaacccggtctctactaaaatacaaataattagctgggcgtggtagcgggcgcctgtagtcccagctactcgagaggctgaggcaggagaatggcgtgaatccgggaggcagagcttgcagtgagccgagagcaggccactgcactccagcctgggcgagagtgagactccgtctcaaaaaaaaaaaaagaaaacacacacaagctgtaatagttaagtgtctttgaaaaccaaatgacacagtgcccatatcaaactgacttaatgaaggacaatgattggcttctggaacaaaagggggatgacttcaggagaggcttgatccagcagtttgtctggagacccattccctgctttccctcagggctggccttacgctcagcctcccctgtgaggtcctgggagcagctcagtcttcccttagggctgcaggggggcagtgccacccctgggcttgtgtttccctgctgggaatcctaaggaagggggaagcattatctttttcagaagctccagaaaatgtctcctcaagactcaatggctctatttgatttctcacccatccattaacttgctgctcttctggtgggtgtggatgtgcagttgggtttcagcctatgaagacctggcctggagctggggatgggttcggtcccactcaaaccacagatctgggaatggtggttccctggagcaaagtctgggtgctgtcaacaccaggagggggcatccgtggtgtcaagaagacccagaactgtctacttaatgtgccaaaggagggaagtaagatcggctttggtgccaccacccaggcggccgccgtggcatggaggcctgtgcttccagacctgggcagtgcatggaatgctgatggtgattatgcggatgcgccgaggggatgatggcgttccctgagtgatcactgcaccccaagctcggtgctcagcagtgcttcacacacattgagccatagaatcctcagcaccccagaaagaattcagttattgacagagatttatggagcccccgttctgtgctggtcgttgtcgtgagtaggagatggagacgactccccatcatgggctgtgttcttgcaggatttccccatgttataggtgtgaacattgaggcccagagaaatgaggccgcacagctggaaagctgcagatccgagatccaaccccagggccttttactccaaaacgtgtgtgcttaatgtgtgcctatacatgccggtgagttttctttttaaacagctggtcaccctcagatgtccactgccggcctgtttggctgcccttctccaggccagcagccaagacacagtgccgcccgcaggggcaacctactgggagcctcgaaacaggtggagctggcgaagcagggccctgagctgtgtgcgtggggcctggctgcaaatggcccaatgaagcctccgtgcatttccctttttgaagcttgagccttttcttctccatgaggctgacccaccaggctggcttggtcacacactagctgtgcagtcctggctcagttactttacctctctgggcctcggtttactcatctacaacaggggtcggcaaactaccaccctcagcctgaatccagtctgctgcctatttttgtaaataaagctttattggcacacagccatgctcactcattcacagagcggctgcagctgcttttgcacagggcaagagaacctgtggcccacaaagcctgaagcctctctctgtggccctttccagaaaacctgccaatccctgacctagcagatgggatgattgtgtgcgggagagtgtaggctctgggagggcagggctgtgtctgtggctgccaccagagtgtcccctccctgtcaccaacccatggggtcgttgcaaaactcagagagaaactgtgttcggtgttgagcacaaggcacacagtgcgtgctcagtaacctccagctgcgattcctcccgtgattaaacaaaggcaaggaggactgcctcgacaggctcagagggcccagggtctggaataggagctgatcctcgggttagaccactcagctcttaaagtggctgccggttgagaggcttgtctcagctgccgctaggtgcaaattaaaaggattaatggacaccgccgtctttgaaaggctcaaggcccaccgaagccccttcagcagagggctctgcattctctcttccccagccctccttgtgtgccctcgtgagtggcggtgacaatgctcccggatgtgggccccaaggccagcggccccagagctgcccgcccacccgtccgcctgctattgtctgctcaggcctggcggtgtggcgctgggcttgtggggccctggcgggcaggggactgtgggaacggattagaggtcctgggcttgctttcctcgtcttgcataaactcttgatcaaagacattcctgggatgacagagccctgtgagctgcgaggctggcccagagtgcgggacgcacaccccacgctgcagcccctgcacaggcctgcccttgctggccctcgctggccctggctgcagtgctgactttggggactagccttatggtgggactggtgatagagcgggtgccagcaggcaacacagccttccccaccagattcagaggccaggcccccaatgctgggcagagcgaggctgtgactgcttcctggggtgcttcaaggagggtcacgctgcatgcagggtagccggagggattgccggatgcatgccactgccactggacctggcttctctggactcccatgggcagtgcaccaccctctgcacagccctagccactgttatcccacaagcgcggtccgaagtccacgtgcccactctgcccagcctccttcctctgtcccctcagggcctttcactccttgtgacaactctaggtgctgtctgggctcctggggaacccccgacccttccagccatggaatcagctcccggcatgcgggtcaggctggacccatggctctgcacctcagcccagcagcttggggctgccctgtaggagccgacacgacctcccttccattcggcccccttcctaggacccactgtatgccagggtggggagacggaggcagagagaaatctgggagatttccgtcctggaggggctcagccagagcaggaaggtgcccaggcatgacaatcccagactcccagaaccacctgcctgctgtggggtggggaagccctcagagagcccatccttacagtcagagcagagatgaaggttcctgtggaccgaggcggtgggccaagcgcagaacaggaagctggatgcagtctggtgtgtcaggagctcctgggcaaagacatcgagcttattggggtcaaggctggggagagatggggctgagtcccagggaccttggacggagctgaagggagataggaaggctgggggttgggggcagaggatgaagaatggatgaggactgtctggctgcagggagatgggccaggaggcagggcaggtaggggtggcgggcgtgtgaggacaggcttctgcgaaggggctgcagggagagctgactgcggaaggctttgtctctgaagttcctcaaaggtcagtttttaccatcaccctctgggtagcgcagatactccaacaagggacgaggtctccactgaatcccaggaggggttgcaggcacagaggtgatgtcagtggagtttgagagttgggaacaagggcctagagtggccagacgatgcctttgatatggtttggctgtgtccccacccaaatctcatcttgaattgtagctcccataattcccacgtgttgtgggagggacccggtgggaggtgattgaatcatggggcagtttcccctatactgttcccatggtggtgaacaagtctcagcagatctgatggttttataggggtttcccctttcacttgagtctcattctctcttgcctgctgccatggaagacgggcctttcgccttccgccgtgatggtgaggcctcccagctacgtagaactgtgagtctattaaacctctttttctttataaattacccagtctcgggtatgtctttgttagcagtgtgaaaacggactgatacagccttggagctcgtggcataaccacgatgtatagacccacccatcactgggggatgtacagaaccccccatcgtggcacagccagggatggggggtgtacagacccccccatcgtggcacagccaggggtgaggggtgtacagacacccccattgtggcacagccaggggtggggtgtgtacagacccacccatcacgggatgccacagatgccgagacagagagaatgggttgtgggagagcttgcaactgcttcactctgggcccaagccctctctacacacttggctgtgaacccacctgacccacccagggccccggccctgccctgccaccctgcctgagccccgcgctcagctccatctctcccagtagacatgtcgctgccttttggctctgccagacctatcagcctacacatccctctttcatcttaaaaaaccttccaaacactaaagtagatccctagacccatgtgctcctctccctgcatggcaaagtggctctccagcttcttccccacatccttgctcaaacctaacaggatccgatggctcccttgcctgctccgtgaaacaaccaaaggtgccctgtgcgatggtcggagctctctgcacaggcctcctgctacacccatgtgctctcgggggatgaatgtaaacccagctgcaggccgggggtggggacatggcttccctaggaccccagccctgacacaggacctggccattgcctggaactggagagccgcaatggtgcagacctggtccctgccttcagagtaatttgcccaggagcaaggaggagctgggccttgtgagccacccgagtggccaccagtgtcacctctggctccgactgtcccttgagctctttctgatgtgacctgtcaggggcaccttgcaggctcccccacccactcaatataggactccctcgaggaaggctcccggagcccccaccctcaggggagaggctggtggagacctacaggggccaagcgtttccctccacaccccaccttcctcccagggcaggcgcctgtggagccaacacaccgaccaccccggccccactgttgagccctgggaggagtgctctacaaggcaggaagggtagacagcaggtgcttcataaaggccacggagattcaacctgcagctgacaagtagcacccatcggtggcttgggacctgagcttccacttagcttgggatgaggacaaaccagcctcacagatgggttcaggagcagtgaccaaggtccgaggacaccttcccagggcactcccactacctgcctccaccctggggtttgaagttaagtccagtcacgtgcacctgaaatccagaggtgggcgtcatgggtgtcctataaggcggcctccaggtccccacgatcccagtgaaaggccaccccggatcatggccctgacacggtgctttgctctcccggagcctggcgtcgccaaaggaccatgattcatccagagcaaacagcagtttgcgccagaagagggttaacgaatgccggctttatttattttcctatctgcaaataacccgggaagacaaactggtggggcaaggaagagggggaagatgttccccatcaatgggcaccgctcacgtcacccaggccggagctgttgtctcgcgtggttggaggtgggctcacccagccaggcagcctgcaaattattctctggagcctcccggggacaggacaccgcctcccacctcacacacctgtgctgagggcttcctcccagttgggaggggtgtgcctgctcctggctggattctgtccccacccccggggatgtggcagtgtcaggagacattcttggttgtcacggcgggtggcgtgactgtcatcccggggatggaggtcaggatgctgctgaacttcccacagcgcacaggacaggctgcggcctcccacatccgccaagcctgccaccctgccctggttctagggcaccaggacacgcgtccctggctcacggccagcccaggaagcaaagaggcaggcaccacgctggggttttaccagttttatttctagactttcatgtttgtctttttgtcttctgctggaaacatgccggttacatgttggtgctgggaagcgccgcggtgcaaccagaaatgcacagacccagccgcccgccgcccagaccctcagacttgcgcgtcacaggacagactccgctgtgccccgtgcacttgccaccagcctttggcctctcgatacacacaacatccaggacttgtgcccttgccccatcacgacagacaaagcgtccctcaaggcccccgcgtggttcagacagacgccgcagccaggatggttgaggtaagcgtgagccgtgttctggaggggtggggcggggtgggcctgtgcccgagatggcctccgagcacaggatgaccctgccagggcagggccccaaccacgtgggcccgcagcggggtgcaaattcttttggttcggcagcttgctaggtgaccggggcacacagcactgtgagctggcttcattgagatttggagtctctttaaattagcattatggtgtaattaacaaaacaataacaaacagaacactagtacataacagattaaacatacccaaaacttgaacaaattccagaagctattccaatcatcccgaatgagagtcctacaggtacaacgccgtggtggcacgtaagacacacttgttataataataataataataattatgcaacttccatagctacacgcaaagaataacacagctgtaaaaactactatgatgctacgcccccgatcagatgaagtgcccagcatcacaggcgcagggaagagaagagggacacagcctggtctctggggacaccggcgcggttctcacgcacgcggcctcggggccggcccccgccagcctgtgtgggatcgcgcccgcgtgtctgcccgccaaagcaggcagaacctgcccgctgggtccaccatggctaagtgaagcatgaggtattgtgaaacagcaacctttttggaatagagcagtaatcacattaagtcaaaattgatcacataaaaaaaaaaaaaactacaaaaaaggcatctgtaatacaatgttctaagagaaaactaaaactagtacatggcagtatatgacattgtaaaacaaaaaactgatcctccaatagcagcaaacaatgtgaaagagatacacagaagcgatgtgaatatttccaaaccgtgcctggaagtcaacggtagcagcgcaataagaaaatggagctgcggcctgtccccggtgtgggcaccgccccttcccctcgggagcctcctcctcacacctcctcccgcctgtcctccctcacacgtcagcctccacactcttgccacctcccttcaacacttcctaaataaaaattacaagaattacatagccaagatgtgcaaattgtctattttgtcactaagttttttaaaggaaggggcaggggataagaattcatcggaaccgaacttaggttgagtaccctaattttccttgcacccatgcctgtccaatcagatgactctgggaaacgccaaacaggctgaatcaatgtctttgtgtggtttttttcttccagattgtttttttctcacctataaaaggatctatctttaaaaataaactgtattaaatctgtaacatcaaaggcagaaggtttgtgtgtgtgtgtgtgtgtgtgtgtatctgtgtgtttaaatcaaggggagattgcatttataaatcatactggccttatgaacatcctctgcaataaatatactttttagccttaactataaattatatattttagtgtttaaaaaccttccggtgtgaaacatctaagataacccttaaaaaccacctgttctctaggtaaacctctgaggtccctactttcaaacaccagttggcaccaaaggattcctaaacttcaacttctttaaagaaaaggaaaggaacttatcatcctggcaatgtgagaatgcaaacctttttcttcttgactggcacgcagcctcccaaacaccccacctccactgccaccacagtggcccacacttgcctcaaagtcctgcttgcaaacaagtacatggatattcccaaaccattccattagaaaactgccctccctgcacacacaacaaaaacagcgctatttcctacacctattggactgaaagtgcttggaaatggaatggttttagaatatgaagaagaacacaaaccaagtagctgtgggttgaacctggacgtgagctggctgcagggccgttgggtagaaaaccagcatctcataaacaggtcactacaaaaataggaagagtataaaaatagaatatattatgtcactatttcgtcttctctttatagtagcgtatcgtaggagtgggacaggtggcctttcccgaccctgctacgctggctggtgcccgacaaacctccactggatggtttgtcactggatggtttgttggggtggtggtcacaggcgcaaaggacatgcacacgggcacgctacgctactgtaaccaagaggtgacttcagccatgaataaggtgaagaggttacacatctacctacggaatataataacatacaatgacttataaagtgactacatgcatatgagcaagcaaagtacagagatgcctagaaccccactacagctgtgctttatcaggaaaagcacaagaatatgtttttctacctaaaaccctcttctactttaaaaatggtttgctgaatttttctatgtttttaaaatgtttttatgcttttttttaaacacgtaaaggatggaacctaatcctctcccgagacgcctcctttgtgttaatgcctattcttacaacagagaaacaagtacattaatataaaaacgagttgattattggggtataaaatcctctatcatctgtagcacaaccctcctcccccaccgctcagggttatgcaaatactattttttttttctctctctctcttttaaagacagtttttgggtaatctttttcttttgcttaagtcagagatggaagggggaaagagcaaaggaaaaaacaaccaacaacaaggagaatgaagctttcccttctggtatcaaaatgctccggagaggagggactgtcaggggagcacctggggccggctccgccctcgctgcgggtggcggtggcgcccgcctgcctggcgccctcagatgtccacgtcccgcacgtcggtgggtgtgcaagccaggtccacctcctcctcctcctcttcctcctcctcggcggccttggggtccatgttctgctgggcctggcgcaggcttgactccagcagggcttcgatctgctcctggcaggcccggaggcagtcctgagagagagagggtggggagaggtgggaagagggggtccttagaaggggcctgcagcgagggccccttcccaggtgccatgacccggaagcctttataagagcaagactaagccaaaaactgtccctcggcccatgctgcctcctctgaacctgagcgagatgtgggagctgccatcacctgtcaggacactcaggaccaaatgcctccacctcccacctggtctctggagccacaagacaccagatgcttgcccgcccaccctgcacaccccctgcccgtccccatgtccaacagcgccttcaccgcctgttcccactggccgtgccagctccctggggaattcagtgccatctgatctggacaggaggccctttgaaccctgccttttcagccttttcagacttaacctctccatgtggcagcccttgaggtgaacctggccttccatgatcaatggctgtcgaagccttgggccgtgcatgactgaggatgaatgctgggtggccagggggacctggaccattgatccctcccctccatcctctcccgctcaggcctgtgccccggggccagccatcagcctggcacagcatgcatccacccactgcggccactgaggtgctcgccctcgggtggagtgcgacggacgctcctggaagtcctgcacctccaccctctggggctccagactcccttggcagcgtccacaccacactgtcagtgggaaagagcagccgtgaaatctggaacgccacgcccagccaggggcctctcctaggctccaccacgggcaagtcccacgcagcctgaagtggctgcttactgcccgggggcttctggatggagaaccggctccatgtgttggggctgtgtgtgtcccaactgccaggaagccacgctagggcttcaagccaagtctctaggcagcccaggaaacagaccttccacaaggagcagggctgggccacagccccaccacgtgccgcacaggtgccacttaactcccaaccagaaggggctggacaaaggcatagcacgacaggcgatgacccaggccagaacgacttttaggtggaccactgaggtcacgacattttagcgcctgtacctttatagggagggctttcctctcccgcccctcagataaattctcatcatggcaaatgaagctggccgggctggctgcacaaacagtcccactgtacagatggggaaactgaggccagaggcctggggtgagatacaagactcctgacgttcaacctaaaacaccagccagcttcaattctcagccccaggggcctggcagctccatccagggattcttcacctgcggcccgtccctcgcccatgacccactccagggtcacacatgcagctagactccaggaccttccttcattcctctggccccacagctgcctgcaaggctaccccggtggacaaagctgttctcccacagccagaagctccaaaaaggcagcacgctcctccgcgaaaagtcactggtgtgtggcactgcgcacccgatttgcacagatggacattccacccaccaaagaaaattctagaacacgccctagaaaatgcaggggcctctgctgtggacggtttttctgagtctgggctcagctacgttggtcactagctgatcaggcagagtggactccgcctcgggtaacttcaccccgtgtgtctgtcagctgtgagacgtgtgcctccaatctagttaagatggtctctactcaaataagggccagcgcccaacttcccacaactgcccgaagacagcaacatcccagggcagtcacccctggcggggaagcggttttcactcagggcgtggagttcgaaatgaaaagtgcagacgcgagtttcattttgatggaggggctttctctttgctgggcttctggaggcctcgatggtgtttctgagccattttcctgagagagctgcgggctgctggcctccaccctacagcgggtgaggacacctcaccacccccaaaggataacacggggcagggtgcaagggaggccatggccgagaacacagaagggaggcccctgccaacttcggtgtcccacggcaaaaaagcttcttcctcttccgagacacacatgggctgggcagccgctactcccagtgtccccgggacagaggcaccactaggcaggggacaggcaggtggaccctagatagcatctgctgagacccgtgcggagtccccgggaggctcgagggcagaccaccaagaggcggcccaggccagagccaaaacgggtcttgcaggcccacccagccccaagctggggtcaggcggtcactccctcacacaccgcggggccggcggctgacccggccacctctctggtctaatttggtaaatgccacaaacccttttgattgtcattttaattctttctttaagaaaagactcgggaataaaacaatggcatttttaagaagaaagacacagtcatcccagggtttaacagcagcagcctctcaaagaggccgtaaacaacaaggctgtctctatccgcccgttgtccggtgtctcggacctcacaggagcccttttcaagcatctatttattggccacgcacattgtggcccaaacaaagctcgcctgggcctaaccccacacaccatcaccacacagaccattggctggggccgcctggggcctccgtcccggacgcttcgcccagaaactctacggctcctggaagccccaggggacgtgagaaggctgtgaggacctcccagccagtcagtaagttctaggagcagtggaagaagccggtgccctgtcagtctgtggcctggggtccgaggggcccagccccagccccaaccttgtcacccttgggggccttggcaccagcctcggcatttccgtggcactaggtgtctccccctgtaagccccggcaaggctgcctgggacatcaccctcacttaccgggtcacacttgatcactctggagaggaagcgtgtgaggcggtagtaggacaggaagttgttggggctcctcaggttcaggccttgcactgcggccaccacgctccccgctgccaccatggagggcggattggaaatgaacttcacatctgaggcagaaggagagagggaaggaggctgtgagcaggggaccctctcagggcccccgtgatccgggcatccctgtgtgctggctctgagcaagcggcccggcctgaagggaagcactcggtatctgaggctccacatccaggccctcctcagcctccagccatccctgggcactcggagagcaagagcctggcccacggaccctcctggaacgtcagccccactgttgactcaaacataaccaaggaaagagaaagccacgggaagacacaggacaggtgatggggacatcactgccttctcatccttttagcatcttgagccttgtgaatgttatcacgtattcacaaaaacaaaattagatgacgcaaatatgaggacgtagagatgtcgcttctatgaccctaaccctcaccccaagtacctgccaccccccagcagcagggattgcagacaagtcatattctgaagggacatcgcatggctgaagcctaggcctccacccgggccaggccacggggctgcagggtactgatgaagccattccgtgtcccttgaggggtaagccctggccggcagccttcagggcggctgtggtgtggctgcggctcaggccctggcgccaggagagcccggcttggctcactcgggaaggaagagctcttccagcaacccatgccccttaccatgggaccatgactgtcacagtgaccttcagagcacagaccaagtacaccccaactccacccgggccctctactcacaactctcctatttctggccgatgacaaaaacacttttctgggccgtctgatgtagcccaacaattccagtgacttcccaagtaagggaagaggtgtggggttcctagcaccagtcaccatgggacacccctggaggactgggccgggagccgggccccaggagggagcagctttcccaagagggcaccagtgccctcacctggggcttcctggggactgtcccgcacatctgggcccacttccaagagggacaccaatctagggcggcccatcagcctttgtggtctgcacaaaactccctctggtcactgccagatactgggctcatccgcctgccaggctgcagtagtgggcgtctcggggcctctgtgactgacctcctagacaaacagcagactggctctttccacagagagccctgccaccaattacgtcctggtttgtggcggggaatgccggcctcccctcctcagggcagtcatgcgcctaccgtggacaggtgggccagtgtgggatgtgcctcttggcctggcccccaccccagcggagcctgggggcagccttttgtcacacccacgaggaattctgcacaggaaccaggggccctgggctgggagccggacgtcggcagggatgagtgtggcatctttgtcggccccatcgcctcatctcgcgccactgagcgcccgggaacaaggggggtcgggggagctgaatgggagccgacccaggcacaaagggagaggggcccccacgggccgccaggggtgtggcggcccatccgagacttcatcccgagagaataaacaacttcggccttgttaaagagagggccgccggcgaggggccgggaagaaaggcagccaccctgaaggggagacaaagccggctgctgggcgccgtaacaacttagaaaaagaaatccttaacgagccgagccacctcttttcccctttaaatgggagcagttccacccagtctgagagccgggagccatgaatgaaaaccttctcattgaggcaaatcagaaccgcacacagaaaccgcttctgcagggagcgacaggttctagctggctccgcaccttgtgcacccccccgtctccaggggcacacacagcgtggagtcactggggccacgttgtttcagaagctcgtgcccccaccccagtgtgtggtgctgtctgtgcttagattaggagccacccagaattagacaccaaagctccaggatttgaccctatccgctgcctggttgtaaagggaagtgacagctgtcccggaagctccttggcactggacgttcctcacctggcctcccacggagccaagggcgcacctgccctgaaacccccatgcgtgagtgtatgcagcatgtgcacacctgctggggacctggggccaggaatgcctagtgcagggagaacacccagcatcacctttaaatgtaacctttgccacgtggagggcaaaaacaccttcctagactctttcccacgcctccacctccttcaacctgtttctgactttaagcagccgtaagtcactcttgtctccacagatgtccagcaggaacaaggcactggctgctcagttacgttccatggggtggccacgggtcaggacccggagcactttgcaggggtgggtcccctggtctcctgcccctccctcgggacccaccctggagtggactccacagtcactgagagcacgtgcacagctgggtccccaagtgtccctcctccttcacccaccgctgggggcgccttcgcagacaaagggtgtgcagtagtgggaaggacgagaatctgcacctgcccactgcctcccactagcacccaggggtcctgggaggggagctccactgctggagccaccctgtagggaggctgtgcaagaaccacgccccacgttctctccaggaaactttgcatttctctgaagccactttcagctccataaaaggctgtctggagtctccggaggcctctctcctctgaggagcaccagccagagaatgcctccctgtctgccgcatgcccccccaccccagacccatccagactggtcgacatccttggcatcttcatctgcccaccttggggactcgcttggaaacgtgggggaggggttcatgccccaagcaggtggaggaggtgggggaggcctcacgcctaaaccagaacccattctggaataccggctgcgggctaccggtgtcagaagggagctctgaagtaggcttggggggctctgccctctggggaggggagaagatgctactgcctctttgatgccccgtgggccttgtggcctaggtcacccagagtgagcccccaaacagatgtgacaactgaggcttgaccaaaggtgggccacagcagagctgggtgggatggggccatgctcccccatgaaggtaaccaggcctcctgggccagggaaggaggcggtcacaggggggtcagaggcagggctggggacagcaggaggcggcaccctgtgtatgtgcgagtctgtccccactgggttctggggccaaggccatgtcagggaggggcctctggggccatgccaggggaagtgaggactgggtgcttctgctgcccacggtggcggcccaagctgagagtgctctgaagcgccccctcagggctcagctgagcccggctggctgccggcacccctggcagggcctcaggcagccgagctcctctgctggacacccctgcactcggctgcccagagcacgtggtgcaggcaggccgacagctctccccgcccctggaggcgcctctggcaggtggcccagcctgggagaggccaggagggggcctctgcagctcaggctccttaaggacacaagaagggctggaggtgggtggagaaaggaggcggccctgtggccaaggtaaacccctttcagcatggagtggccacaggctgcctggcctgaaggacgaggccagagtaacgggacacaggcaggctgagccgtccacaccaatgcccaaggtactgcatggtggccgtgagggagcaaatctccctccatccagcgcgacaaacaatccagggcctctgctcaccagagctggaagagcgctctccagcgcaggagggggtctggggacatcttcccagacagcacccaggtggagagcaagaagccggccagggtcacctaaggagccggctctcaaggggaggccgggggctgccgggcctgccctacctgtggcacagagggcaacgaaggtctgcgcgtgtttgcggatgatctgtttgttctcctccgcctctggcattttggagaggaagtgttcaatgaaatcgtgcggggtcattgcggccaggttccacttgagcttgttcaccaggagcagctccatttgctgcgaacacagggtgagcggccatcaggggaggtgcgggccagcccgggggcgcggggaagccggcagcacgggggccgggccacgccgcacctccggctcagagcactggcccctgcgtctcgtgcggtcctggatgttggaggggagggctggcgaatgctggggactcaagggagctggggcaacacgcaatcccagatcaaaacagaaaaggcgcccgccgcgtgaaaagactctgcaagtggaaacaaaaagacctcccaccacctggaactggaggctcagcgccgagcgcggcgctcctcgtgcagccgctggagggcgcgcgccgcccacttttcggccacaccgcggggcgcgaacgcggtgggagtcgcaggcaagcgcacacagggcggcgggacgagggcggctaggatcccgcccgctccccggacagggacgcccggcggcggggccgccctccctcggaggagcagatatgtcagaggcgggccggccgccaccgcctgcaccttccccggccccgtggtcctgcgtgcggctcgcggggggcggggggcggcggggtccagtggttaccagcagctcctcgggccggatggagttgtcggtgtagatgcacagcttctcggccgtcagggggatggtctccttcatcttagaggccacgaacatgcaagtggcccccagcagctgcaggcggctctttttcacgggctccagcgacaggaagcggtccaggtagttcatggccagcgggaagacctcctcctcgcacttctgttcctcgcagacctacggaggcacggggcccgtgaccgccgccgccaggtcgcgccgcccccccgcacgcccccgcaccccccatcgcgcttggcagggccgccaggtctggagggcgccgaggggtcggggctgggggcggcaggagcttcccgtgatgcgccccctcccccgcgcgtccccagtacccaccctccccgaaactgaaagggaaagtccccgcgaggctggcacggtgggggcgggagcgggcacagctgggcggcgtgcgcggcggcgcgggctgccggcccccgggaccctggcccgccctggagctccgtggtccctctgactgggggtcgacaccaactggggtgcggggccgcggaacgggccgcggggttgggcgccgcgcctgcgagacacaaaggtggcgtcccaggccgccgcgccgcatttccccagacgtcatcttttcaaaaaatatttaaaaatattaaaaaaataactaagtgcataaaaaaaccctgaaaatgaccctcgggcgaccctttacccaggccgggggttgggagttcgttacaggctccggggggagccccaggaattcaaactccggggcccccccttccccctgggcgcgggcggcgtttccctctcgcaagggcaccacgccgcactttcaaaaattattttaaaatacttgcgggcccctcaggcgcccaccgaaggtctgaaaatgtgctcccaggcccccggctcgctcggagaaggtcctccaagccgatatccctgcagacggggatcaagccctggcgtcttgggggccacgcgaccttgcagctcgccgtgctctccggcccaggctgcccgttcggggcgccccgggactcgctgcttgaacaaaggcccccccttccctagcggcgtccccccaaaactacccatgccgcgtccctgcgcccctcccgcgggctcccggcagccgcgcggcccttagctgcggccccagcgcccggcggccgctccccgcccccaccctgcccccaattattaataaacacttttgctttgcaataaaagagcaaagatggcgcataatactggcacgagcggcccttgcatacgtgtccatggatattaatttaaaaatcaaatctatgccccctccccccggagttggcggctcccggccgctgaggcgcagccgggctggggcgcaggcgggggacacaaagcgcacccagcctgccagcccgcaccctcgggcccattggggtgcccctggcactggccttctcccgaaggcacccctcccggacccccttctcccctcccacgaaacgctacttctagcacccccacccccaccccttcctccttcagaaaatacccgcaatttttattttgaaaatacggatccctagaaacaccacggcaaacttcaaagttctagcgggagagaagggaggggggtgagtagcaaagaaacgtgggtctgggcaacaagttgcagggaagtcttaagagagccgcccgaagccccgcacctccagcatccaggtggcgacgatcttccgcatggacggcaggacctccttctgcacacatttgaagtaggacaccgagggcgcgcaggtctcctccgccttcagcatggcccgcagcacccggtcgttgaggaggttggcatcggggtacgcgcggcggatggtttccacttcgcagcacaggagctggtgttccatggctggggctcttcctgggcagctggggagggctgtgggtcctggctgggtccgcgctcggctctcgcttctgctgccccgcgctccctcgcgctcttctgcccctcgccggagcgtgcggactctgctgctcgctgctactgcgccgacagccctctggaggctccaggactttgcaacttcaacaaaactcccctgtagtccgtgtgacgttactgttgttaagcaaagatcaaagcccggcagagaatgggagcgggaggggggcgggggcgggcgcagggggagggggcgcgggcgccaaacgccgggagcagcgaggggcagagcccaaaagccatccctgaggcgccgcgcctgccctgcggcggagttgcccctgtagtccggttttcatagaaatgcaaatcgccccgctgcagcctttctccccgccagggaagaggggtgcagggggccccgtccgcctcgagtgggtcccccgggatttagggggtgaggtggaggtggctctgcagtaggggacaactaggaaggccggcaggccacacgcagcctggggagaccacgagaaggggtgactggggcgcggcgacaccccatatccaagccggcagaatgggcgcatttccaagaacgccacgagggcacccacgggcggacagacggccaaagaatctcagcgactgcatcttctttcattttcattaacacgtgtaaattgcaagaactaatttagcatgcaaggacggggaggaccgggcacacaacccctgtgcaagtttcattccggcgcacaggggcgtcgttgcaaatgcccaagggggtaaccctaaaagttaaagggatttcagcttagcatgcgctcgctcaaaaaataaaataaaataaatgcccgaaaattccagcagcagcccaagatggtggccagcatttccttcatcttgtccttctagcctggagactcttcgggctgccttcctaccttgaccagtcggtccttgcgggggtccccaactgcaccccctcccttcccgtgccggcaatttaaccgggagaaacacacctctgaatggaaagctgagaaacagtgatctccattctgactcattttttttaattaaaaaagaaattaaattgctggaaatattagtcccctctgcctgggacaagaccaccgaaggttcctaattggttttgttgggggtgtagacgtcccttcacctttagaatttgccctgggactgaattcgtgagcgtgagggggctggcaggagccggcataattcagaacaattatcaattaaacaaacgagtgtactgatctgatttttagcaaaatcgataggtgttcgtggttacatgagagggtccccaatattatcgcaaacttaagcagatgtaaattaaaatacacagtttttaaaattacaggttctgtctctttggtgcattaaaaaataaaaggacattttactgtcttaacttttgtttttatttttacagtacctgccccaaattaagaaaactgttcatttacttccttttgaatatagttcagtgtcatcaaaccaccgtaccctcttaacagtaaaagctcaaagaaaactgatagaaaaagccctctccccttcgccagggtgctcacagcaagatgcgaccccccccacccccacctttcagggtgaattcctcccgcgccccctcccccgccgggaattaggattactaatattccgggtcctgggggggtaattacccccggattccgcatggggagcgatgggttgccccagcagggagcacctacggtcgtgcccccccccactccccgagcacccacaatcgcgttggcccccgcatagccaagcctcagagcatcagcccgcgcacaagggcggcccagctgctttttcattcataaaatcccgacccggcggccgcctggatgatttatggggcccggagctatcacccggcctctcccatcccgtggggcgaggggccccgagccccgcgtgcgccctggcccagcccgaggcgcgaagcgggccgaagtcggctaggggcagcagggcataaagaggctcgcccactccggcacaaccggctctgggtccaggagggagcttcacccccccatcccgggcgcaagacagaggaaactggaattagcatgagccaatgggggcgcggcgctgttactaggcggaccgggcagatctcgactaggaacttcgttgatttcccggctcagggacgagcgcaaaattgcaagcccggttagcgagcgtaaagagccgtccaggaacccgcgggggaggcgctggaatttggggcccggcgctggaatttggggcccggcggggagcgccagctgcccagcccccacctgggggaaccctgcttggcggcccccgggtcccccgagggggccaatacctctgggcttttgagggtcattgcttcaagaagcgcagagaaagcattttgattttattttttccaaagagaaaagcaactttaaaaaacttttcggttgcagttttactttacactgtcttcttaaaacccaccacgaagcaggaactgcggattctgggctcatttaaagtgctctgttcttatttcttggtgaccatttggagacaaagggcaagtggcccagtcgggagggtaaccacgttgtttgaaagaaaatccaaaattaactgaaatcaccttcacgctttcctcgccccctggcccccgccccggtgaccgcggcctgggcggatggtcggtcaggagaaagcgaattccgctgcaggcgcgtgttcgccaccgtccctggctgtgggaaccttcattcaggcgggggaagggagcgcgttcattcaggaaccggcgcgccgcgacgcagaccccgggactcagcgcggctgcgcgccgcggggctcggggcttgggttgggggcgggtggtgcagggaccagtcccgacctttcgccagcgacctcccgcacccgcttttccaccagggcggctggcgggcgggcgcacccaggtggggtcacctgcagccgcatacctggcggcgacttgaaaggacttggctcaggctccgcgagttttccattgttaagcccttaagtcgcccgggaaaacgcttccgaaagccggcccctgggctccgaaggcgctcgagctccccttccccccacactgcttgcttttggggtgcgcgtggcggcccacgtgctatggcagctctgcttcgcttacgtagcgccgatcccaggcgccccaaaactgcgaggtgggccggggcgaactccggccccagtgcccacccgagacagccacacgctcggcacatggacagccgcaccgccccccccatcgccccaaccgcagacgtgcgtttccgctccagatcaattagtttcagccacacacagaccaccctgccaccgcccctcccgtgccccagtcgtctgtccggcgggctgcggggaaacgagacccctcccctagctccgagggctgccggcaaggtgtgcgctggagttaaaacgcaaacccaacaggtaggggggcggccctggctccaacgacgcatctgggatcccgaggctgaaggcgcaactcttgagggttaaaggcgattctaattcctcgactcccgcccctcaaaacgcatcggctggtaccctgagcaatatgaacccccaaatccaccagagattccctggccttccggccccagcccctctcagaccaagtggtggggagtaggcgcccagatcgagaagaaaaccacttccgaccacaggagagaaagctggctgggggtgacctcggaggtcacgttcggccctctcccccgcagtcaggcctggccgcggcccacccgaggctgagcagacccccgcgtcggacggagacgcagggcttcgctgcgggactcgcggggcctaggaaacctgcggcggcggctcgcgggagccggttttccggcggaggatccgcgctgaggccctcgtgggctcccacggcatgccccactccggaacttgccgcgccctcccccgccctttccggaagactgcggggaggaccccgcatccccgcgcctctccagctcgctcctcaatgcccttggaacgcttgaaagcgcttccatccctcgctttggcacttgggggtgggtggagggacagcggggtcgttattacggggcgccttagagttctggttatccggacactcaacaagcaggggaggggagggaaagggagtttttttccaggtgcggggaaacgggttgcgtacctaatgccccgcgcccttcccctggggtccctggagcccgtgccttaagggctgggggcaggactcggattcggaccccttagggaattctgggtcctcagggtctgagggactgatgggccgcgctcggtccccaagccccttctgtgtgttcacgcggggcacgacttgcccagcgagttctgggcggcagggccagggccggggtgcggctgggagaggtgaggggaggaggcgagagcgcgcgccgccggaccctgggccgtggctcgggaaccgcgcgaggccgcgccgcgcattccgcgcattcccgccgggcctcggttccaccgccacgtggttgccctgcgtccgcgtttaccgtaaggcttagaaaaagcgcgcattacggttccggagcgcatgcggacctcccaggacgcttaactcgagcaccagtccagctgtggtgccgaacatactccttccctgcgggtagataggggctgcttttttacgtaataaggcgggttgtactgctggagcgatagcatgttcatctgtaaagacgggcaggaaggagtgtgctcggccctactggaatccgtaataaggcgactgtccggctgaagaaagtgacagaaccgggccgtgaccattccaccttctcagcggtggtaaagcaccaaatagcagctgcagccttccgatggcgtccagtgcactgtggctggaaagctcggagcaagaaggtgcttaacaaataggaaaacgtccagaaactgcctatagctacattttattttttttttcttgagggtcactttaagataaagaatctagtgcatccctggaccctgaggccgaccttaaccaacaggatgcctgcctgggctcatgaggttcagggcatgattggggccccctgagacacaggctaggttgtgttgcctccccaggcttggataagtcagaggaatccttaggcccctcctggaccatctcgctgaatcctgacttagagagctgtctctgctatcctatgggagagagacaggttatgtgccctagggtggagggggctgcattggtccccatgcttctagacacacttctagccctgagcagcaccagttcacccagtctaagggaagcatggccatttgctttgaggtccatctcctgtagggtttggagaaaaagccttcactcaccacccatcctcatcttctcacttctatgaggtgtttcctccagccaacttatagtttcacacacttaatctcagggaaatgcgtttaatggtaaggaaaccgaggcacagagaaaccaggtgccttgttcaggttcacaacattggcaacggtgatggtctgtagccatttcatggacactgtcagaataaatccagcttgcttagaagctggtaaagataaaaatctactttttcaagaattcatgcaaagccaaaccacttttttttccctcaaaatttcaggcaggtggcagccacatttatgaaactgaacaagaatgtcacatacagacctacatctgccactagttgtgtggccttggacaaatctctgtccccatctgtaaaacgggctgtgatcgttttcttcgcaaggccacggtgaggagtaattaaggtaatatgtagaaagcatttagcacagggcctggtgagtgtcaaggcctgctcgatttattcattcatgtatttgttcttatgcaggatgaaggccatgtgccacacgcagtatgtggaattaattacacatttcagtttatatgcagaaagaggattttacaaatgactttataatctgtcagcttgcttctctatgctgacttctcctgagctgtttgtggacatgagatttaaatcacggaacaaacttttacatgaaaaaaaaaaaataaccccatgaatccttccttctttcttctcccctaactcttctttctcttactctgcaaaaggagtagaaatgttgattttaaaaagaagcactttaattaagggcacaagtgtcaatgccaggatgagaggcagagccatagggagggtttctgctggccccagagggtcggtagcccagggctctgccctgtctctggatggactggccaggttcctggcacccattgtgtaataggagccattctgctcaagcgggagggggcagtcacaagggacgctggccaaaggtgtgggtcagtgagtgtcactgctggaaacaaaaagacacgactgtcaagaagctgccaaggccatgtgagctcagggcctcgacacggcctgccaggccagcctctgctcttagtatcttgctatagggaagggagagggggctcctgggaccgccagcctggaaagcattccttgggcccccaggctctgagcattggttctctgctggccctccgggctgcgggttggtatacttccaggcaaaggcaaaggaagcctgaggccttcccttagctgccttgtcctgggcacatatatcgtttactccctcccttttgagttattgaaaaaaaaatctctggaatcccttttgtagcatcccaagaggggaattatagctgcaagaagggagccactgaaggttattgagggccaggggcgtggggccggagcagcttgctgggaaggtgaacctgggcttctccaaagggagacagatcctggagctcccttgcccccccaggcctctgccttttagttgtcatctgatgaagccaagcttggaatccacccacccatgaattcccatgcgagctccaaggtgctagacagaggctgtttggaaagaagagatgagagataacgacagtaactggggagatgcaatgtaggggagtcacgggaggaggcagcgagtcacacttccaggagtaaggggtgggcaggggagaaacagggaggagatgggaaagttaggagcctccacagggaagcagcccttctccctagaccctggctgctccctagaccccggctattctctgggcaaagatactggtgagccctgctggcggtgatggcgtggccccccgagacgcttactgtgctctccacctgccctgcatcttcacagagggcatctaattcaatcttcatggcagctccaaggagaggccctttatccccattttacagatgaggaaaccgaagcccaacacatcattcagctgtggtagagctgagatgccttctcactctgactccagaatgcaaggagaaaaacggtaaactccaaagcacctagaaatggtagggttcacctttttatttttttgaaaccactttattgaaaaataacttacataccgtaaagttcactcgtttagagtatatagttcgatggattttgttatgttggacagccaccatcaccatctgagaacattttcatcatccgccaaagaaaccctgtacccatttgtagttattcacccttttcttcccccttttccccagcccctggcaaccactaatctttctctgtggatctgccttttctggacatttccaacagatggaatcatatgctatgcagcctcttgcatctggctttttccacttagcatcacgttttcaaggcccacatgtggcatgtgtccatggttcattcctctttatggttgaatactatcaatcgtattgatagaccacattttgcttatccattcatcagtcaatgggccttaggatggtttctacctttggttactgtggacaatgctgccgatgaacacagaggtacaagtttatgtgtggatgctgttttcatttctctttcacaaggcttatcatttttttccccctagatacagggtcttgctctgttgcccatgctggagtgcagtggcacgatcataccttactgtagccttgacctcctggtctcaagcaatcctcctgccttcgcctcccaagtagctgggactataggcacttgtcacgtcacccagctaattttttaatttttgtaaacatggggtctcactatgttgcccaggctggtctcaaactcctgggctcaagtaatcctctggccttggcctcccaaagtgctgggattataggcatgagccaccacacctggccttaattcttcttcttattattattaacctatttcccctttgaggaataaagtttctgtactttaaaaaaatagaattttcccactttttgtctattatgaataacactgctaagattttatgtaaaatttatttttgaaataaacttgacagcatgatgttataagatacatatacatagtaaaatggttaccatagtgaattagtgtaacatacctgtcatctcacatagttacttttttttgtgaacagagcagctaaaatctgctcacttaacacaaatctcttgtttctggactttctatcccgttccactggtctctttttcagtccttaccccagaagcatcatggaagctatacgctacgaattcttgatatctggcgggctaaatcctccaacccacttctcttttatggttgccctggctactcctggcccttggggctccataaacatttcagaatcaacttacacatgtgcacacacacaatgctggaattttgattgggattgtattggatctatagatcaattttgagggaattgacacttttactaacagagtcattcaattcatgggcatgatatagacctctgtttatttagattgtccttaatttaattgcaggtgtgtgtgtgtgagtgtgtgtgtgtgtgttgggtgttgtgcatcttttattagatttcttcttaagtacttgatattttgatgtcattataaatagtattatttatacatttcatctttttggatcaagattttgaattgggagctggtggtgggaagaatcagaaaaggtaggaaatgttttctagtgtagaactgggtgaggcattcaagtttatgagcagcagtatctgtgctgcccatcatagagctgtgggctctggtgacaaggtggtgtgggccgctgcagttttactggagggtctggtgttgggataggtaggggtagccctggcttctcatcagagaagatctgcagcatgcttccattgtgattcgtgctgtcttgcctcccttgttcctgcctatcttctgcatctgattttccttttctgctgaaatctgccagcattggtttctgttgcttggaaccaaacactaggatgaggaggacaccaagactgatcacttttgcaagttgcatagagacccgttacatcattgacaattatcctatttgcaagagataccctagagacaatctcatgttcaagaagaggggaatggcaaattagggtgtgttcactggatggaaaaacattaaatgaaaaaaagcaagatacaaaagataaaaccagcataaattcagcaaaataaatacatagctggtttgaaggacatatagcaaaagagtaggagctgagacttgggatgattggagtgatttttcccttttttttttttttttttttttttttttttgttgagacagaggcttgctctgtctcccaggctggagtgcagtggcgcggtctcagctcactgcaaactccacctcctgggttcaaacgattctcctgcctcagcctcccaagtagttgggattagaggcatgcgccaccatgcccagctatttttcttttctttcttttttttcttttttttttttgtatttttagtagagacgggtttcaccatgttggccaggctggtctcgaactcctgacctcaggtgatctgcccgcctcggcctcccaaagtgctgggattacaggcatgaaccaccacacctggccaattttttccttttctatactctgttatgtactttcacatactgtattctattatgaacaaatactacctttatagtagagaaaagaatccaaccagaaacaacttcaaaagacacccaggtattttccaggtcccaggctccctggctcagggaacacctgagccaaatcccatgtgttttattgggcagtagctacatgagattctctccgtcatggagggaggagccccttgcccagcccccagttaccaggctcaggaggatcctaaattccccatgacctcctttccagcaggcagtggaatgggaggctggtgtttcaggtagagtttaattggtctggtcccagggcagatgctgcacgtaaatacaaaggcaggccttcgtgtcactggatgatgacaacttaggagcacaggaggcctggattctgcctcctaagatgcagggcatgggccgaaagcaggaggaaatggaaagagaaatgacagttatagcatcaacatacaatgctttcggcacagggccggtggggtggctgctgagtaagaagcagtaaggcagccgtgttttccttagcatgaactttgaccacgctacctctaagaattcatgaggtccttgggagacgtgtgtgtctgatccagcagcagcctgctgtctactagggcaaatcaggacactttgaaggctgctagacctccagagtctccctcaattcctcccaggagcattgtattcacaggtgggaaaaggcagtgctgcgggatagggttctgggtggcaggcattgctcagtgccctttgatatctttaatactctccttcttccatagcaatagagtttttaactgggcacctactactcagctaaagactacatttcccagcatcccttgcagcaggggatggccatgtgactaagtcctagccagttggctgtgagagcaactgctgattgaaactcctgggttggggcattaaaaggcaggggcatgctatccccttctccttttcctcttcctgatgaggcgcaaacatggcagtgacttttcttgaatgatgtggatgaggaatgtcacattgatgagggccctttactcaattatagagtagtgccaccataccaagttttgtacatgagaggaaaaaatacattatgccttatttcagccactttgtattcatgatattggcagtgggagtggtttccttgaagacaggcagagattggaagggcaagaggcttgaagggggcagtgctctagatgagaggaagagacttggaattgcccacgctgggtcttagggcacagggacagggatgagggggccctgtgcagggctgaacttcctgtggtgcttcccaggaatgatgggcagtgactcaaattgtggaacttaacttgttcccttccacactatgattcccttagctctcttagccctcagtgaggcctgtcctctgccatgaagattaagaagcaagaacagtgatgccacagagacacagtcaatggcaaagtggtagtggcccttagtggggtcaggattttcggggaggagcaggaagtctgagagcagagctgccaggggagaaatcagctttgctggaaagggaaggaagttggagaggagaatgggtcacgggtgggggggtgcggggggttattttcttttcaacgggagaaatagcagcagacttgtttgttgaatgggaacattccaggagaaagggaaaatgatgcaggggagaggcaaacattgcaaagcccttcaggaggctgtggggcggggcccggtgcacaggcagagaactggctctggctgggaacatgaatggtttgtctgcattcatggaagagacaggagagtcagtggtcataaatgctgggatgggggcttctgggagtgtggggcgtgtatgaggacaaagtacccagacaaggagaaaagtcccagttctgagggatgaagcgggacccaggctgagccacagcagtagcaagggacaaaggaggtccaacaagggctaatgatgaaagaggagacagaaaagctggagagtttttattttacacttttttgcatttttcagtgctgatcatgaattttttgtgtttttcaatgctgatcatgaatttttttttaataacaaaaaagaactataaaataagctctgattttaaaagttgtggcagacggtctctagaatggcacccagtagtcctgtctcctgacactcgtgcccttgtgcaatcccgtgctccttgagtgtgggtgaggcctgtgacttccaaggaaatgtgatgagacatcccttccaagaccgggttctgaaaaggctgtgctgtctgccttgctggcggtcttggagcccttgcccttggagaagccagctgctatgttgtgagttgtcctctgggttgtccacatggccaggaactgcagtccccagcccacagccagcaaggccttgcaggctgctgacagccacgggtgtgagcctgtaagtccacccttgagatggctccagccccccaagagccctttattgcagcctgtgagagaccctgagccaggggaccaagctaagccccacgccgattcctgacccacatcacctaggtgataacaaatgggcattgttttaaacaacattttggggcagcttgttacacagcaatgaataactaatacaaaaggagaggcatgtttccagctcctgattcagtcctttcatttctaagcaagcatacaggcctgtcctcctccttgcctcccgggtctgccgatggattacagcccagccaagcaaggctgtgcggtgatgacatgtgcggctctggggccagaccctgggcttccagtcttagctctgctgcttgctggctgtgtggtcttaattgagttgctttctccatgtgccttgttttacttccctgtaaaatggggtgataacaatgggaggacttaacaagtcaattcctgtaaagtgccctgacctagggccttcacatagctggtgctgaaggtgtcagctgctgttacgctcatcacacagcttgacgtcgggcctgtgaagcttgctgtatgtcaccattccctttgcccacccgcctggcaggctacactcaaggacttctctcacgatgctactctgcactcaggcaccctcagtggctccccggggaatcctgaaggtgttctaaaatcactacctggcgttccaagaccctcttcacccaagtcaacttttccccacccccgggggcctaccacacctcttttccagcccatgggactcagctgttcttgtagtggtgcccctgcccccaagtgcacggcacctggaccttcaacacaagaccccaccgcggtcccacctcgccacattgcaaccagctgcgcacagccgccacccacacctgccgacgtgtctcaggcaccatacgtgttgctctacggaagagtgacttcctccagagtctgtgaccacccattccctcccactgccatcctgggctctctaggagctcaggagagggagggatcccacgtggcttctctttggagaaggcgggctggcttgagatttgaagcaggcgtggagtgccaggaggtagggggtctgtctgcaaaggcagctcgtgagaagtcatgaaaacaccgagatcatgtacttccagcttctcatgctaagatgcccaactcgagcaccatggctggatggagccggactcccagggagcctcagcccaggcggaggctcagcaggcagctctctgctgctttctgtatttagtcgtcgttgttttcgctgttgtgggcttttttttgtgttttgttttttgttttgccatagaaccttgactggcaatacacaaacctcctcaaaagaacatgaaaaggaaaattagagggagactgctgaggtactttgcacaattggaaaaatcagcattctccctgttgcagagttcaccggcacatccactcaactctgattaaggggccttggtgtttgtgggggcgttcggcaagaggcctctgattgggagacaattttgtggcttcagcctgtaacttgggtgcaagggatcaggcacagttaatgtgataaccttgcaaacctctgcttgtgaccgaagtgcctggccaccacgagccatcattaaagacatgctgcaaacactcctgaggctgggaagggccaggaaggtggcactctggaaggcagttgggaagagcccttttatggctggtgttgggagtttggagataaaagtcactggtcatgtttatcatctagttctttttttttttttctgagatggagtcttgctttgtcacccaggctggagtgcaatggcgtgatcttggctcactgcaacttccacctcctgggttcaagcgattcttctgcctcagcctcccaagtagctgagattataggcacctgccaccgcacccagctgatttttgtgtttttagtagagatagggtttcaccaggttggccaggctggtctcgaactcctgacctcaggtgatccacctgccttggcctcccaaagtgctgggattacaggcatgagccaccgcacccggctatcttctagttctaaatgcaccctgctattgagtttcatatttgctagatatcagtgtttgatattatccatgccctagaccaggggtgtcccattctttggcttccctgggcctctttggaagaagaattgtcttgggtcacatataaaatgcactaacattaacatagctgataagctaaaaaaatccccccaaaatctcatagtgtttgaagaaagtttacgaatttgtgttgggtcacattcaaagccatcctgggccgcatgaggcctgtgggccgtgggttggacaggcttgccctagactataaatgttttgaggcaggagggaaaccacgtgtgtcctggggtactgtccactgtaggagctttgcacagatgtgttggaccaaggaatgaaggaatgaatggacagaagtgtttaaaaacatgttttgggcttgaagagtgatggccattccaggtagggtgatggccccaagaaaccttcctgagtaccagggtcatttgaatgttaccaggaacacatgggttctttttggctaatgactgcttttgtgcatttttctggattcctaaatcaccgagatcagaaggctactgagaagacaaactctgtgtgtgtgtgtctgtgtgtgtgcacgtgtgtgtgtgtgtgagagagagagagagagaaatgtggaaaatcaggaggggtggggtggaagcaggatagcgtgagggagggagggatggagtagtggggtggggtaggggagggataaataatatccacagccgaggcttcctaccccctctctgctcctgcagggtacacctgggctcgcattcagcacagtgtctttgcgagcgtatgctacacgttggtgtccgtggagtctttgaggctctgattttatacgatatttctttggttcaactcctcccaacccgttgtgaccaatatgggctgaattcctgctgcccctccatttggctgggaggagactggaaactttgaaacagaaatgcgtcctaggaaattgaaggcaaccaaaccaacagaatgtaagaatgaataagacatgaaggagtttatacagcgcaaattccttgtcctaactttaagatcgaagcaggggtcagttagctgagctgataccattgatgggaaaccaagctccagcttcttcctctttctaaaggttagcaaagatacacaaacatccagcactaaatatactttccggtttgacttcgggcatgtgattcttgatagcatctctgggctagatgataatggagttcggtgggttttcccaattaaacagggaccattgagcagtggccgccaaggaaatgggtctctagtgacaagccacagggctctctgttactgttcaactctctgctcagtgacttaagtaagaagtctacaaagcctgcttatctaactgtcaaacaagagagaacttacactcaaaggactgttactaaatgcagatgaattggataaactttcctcggctggcaaaaatccaggttgtttcagagattttacttataccaataacatcttaatacaaaatgcctttctcggctgggcatggtggctcacgcctataatcccggcactttgggagaccaaggtgggtggatcacgaggtcaggagatggagaccatcctggccaacatgatgaaaccccgtctctactaaaatacaaaaaataaaaataaattagcctggcgtagtggtgcacgcctgtaatcccagctactcgggaggctgaggcaggggaatcgcttgaacccgggtggcagaggttgcagtgagctgagatcatgccactgcactccagcctggcgacagagcgagactcagtctcaaaaacaaacaaacaaaaccccaaatacttttcttattctcagtctgattgccagcagcctaatgctctgtgagctgttaataaagttaccatgacaaagattctggggtcaaattaattgagtaaatggtacatagttttggagatccacaatgcacattagcaggtaaaaggcactgacaagtcctgaaatatagaaatatctgtgtttgcaatcacaatactctttctatataatatctatcaacatcctttggaagtattccagaaatattacttggaagatgctgcccagaacatattttccaaagtgatacaaaaaggtataaatagtttgtctttttttttcctcaagagccaagaagggctgtcagaatattctcgagaaacaaaaccaaattatagcaggcacctcaaacaatgtggaaacctgtttccctttagtcctcacaacacaggttttgcttccttcagctggttcgcaggtgtctaacgattttcgtattgttttgagttgtattttcttgaattgctagtgacgctctgcatttttttcatgggatgctttgttgtccaaatttttcctggtgtataaattgcatttttttcttctctgatcactcattaacttgaaactggatcttgagcttgcatatttcacagcaatacttcatatatctggacagttacctttttacttacatttattacacattttccaatgctgttgttctaattgtgttttattgtgcctatgattctgtaaggagttcacaacttttcttttcttttttttttttttgagacagagtcttgctctgtcaccccaggctggagtgcagtggcccggtctcggctcactgcaacctccgcctcctggtttcaagcgattctcctgcttcagcctccagagtagcttggattacgggtacctgccaccatgcccagctaatttttgtatttttagtagagatgggggtttcaccatgttgggcagactggtgttgaactcctgaccttaagttatcggcctgcctcagcctcccaaaatgcagggattatagatgtgagccactgcgcccggccctaggagttcacaactttttaaagatgctcaacagacccccatcttgtctctaataagatgtttccgtttctttagtcagagtttgtttcctttacacagatgggcaaaaaatgtgattttattttcttctagcttgttaaaataaataaaaaaaataaaaagaatgttttctcatcacacaaataatacatgtttattatagaaaaaataaaaataattaaaaataaggggtccaggtgtggtggttcacgcctgtaatcccagcactttgggaggctgaggcgggcagatcacctgaagtcaggagtttgagaccagcctggccaacatagtgaaaccccaactctactaaaattacaaaaaatagctgggcttggtggccggcacctgtagtcccagttactcaggaggctgaggcagggaattgctggagcccagaaggcagaggttgcagtgagccaagatcatgtcattgcattccagcctgggtgacaagagcgagactctgtctcaaaaatgaataaatgaataaataaataaataaataaataaataaataaataaataaatggaaaaaagcacctgaaatctcgctactcagacagtatcggtaatattttttgtagatcttttcagacttctctcaatgtttaaatataacaaattaaattttttccccaggatgagtaaattctggatctctcttgtaccacatggtgactagagttagtaataatgtatcacatacttgacaattgctaagagagatcttaaatgttctcaccgcaaaagacaaaatggttaactctgtgaggggatggatatgttaattagcttcatgtcaatgatacctcaataaagctagaacaattttaagtaaaaatgtaaaataatatagtgggccgggcgctgtggctcacatctgtgatcccagcgctttgggaggctgaggtgggaggatcacttgagcccaggagtttgagaccagcccgggcaacatggtgagaccttgtctctacaaaaagtcaaaaaattagccaggcatagtggtgcgtgcctgtggtcccagtcactcgggaggctgagagtaggaggatcacttgagcgttggaggtgagccatgatcatgccactgcactcctgcctgggcgacagagtgggaccttgtctcaaaacctaaataagtaaatgagtaaataaaaagaggaatttggggatttctcaatcaattcattacattcctaaaagtaacagtgaaaaatcatttggcctttactaaatggtgtgtaggaaaaacagctctctggaaagaaaagccctgattggtgcatttgttgactgcttgatggaaatacccacactgtggccactttccttccttccttccttccttccttccttccttccttccttccttccttccttccttccgtccttccttccttccttcctccctccctccctccctccctccctccttccttccttccttccctttcttttttatggagtctcgctctgctgccaggctggagtgcagtggcgcaatctgggctcactgcaacctccaccttccgggttcaagggattctcctgcctcagtctcccaagtagctgggactacaggcacacgccaccacgcccagctaatttttgtaccttagtagagacagagtttcaccatgttggccaggatggtctccatctcttgacctcgtgatctgcccgcctcggcctcccaaagtgctgggattacaggcgtgagccactgtgcctggccactgtggccactttcaagctatacatgacttaacaaatggctggcaaattttctgaatatttaagagttgtctcttgccagctggcagggataaatttttcatctttattatgctgcttcttcctaacaggagcgggaaaaattctgttttttatttatcttcctttatttctcctattagggtctcacaatgccctttgggtaagcatcttatgtcgccaattaaatggatatacaattatttgatttttaaattgctcttgaattctcttttattttacatgcattttctagttgcattatattcatgtaagatgcacttgattaaatgtcttcttatgtatcttctggaagtaatttactggtacttttggttgctttcctaggtttataatcatggctaaaagacaattcacattttaatgtcttctattcttatatttacatgttatttctttttcttattgatagcttttgccagtgtttctagttttaatttagttttatattaaaataggagtggtaaccagacaagcgagagcatgtccagatttttagtgctaatgactttctattccttaagcaataattggcctttttttttttttttaaagagctagggttttgctatgctgcccaggctggactgcagtagctgtctacatgcatgatcatagctcactgtgcagccttgaattcctaagcttagttcatctccctgcctcagccttctgagtagctgggactacaggcacacaccactgtgcctggtggcttttggttttaaatccataatcttggccaggtgcagtggctcatgcctgtaatctcagcattttagcaggctgaggagggaggattgcttaagcccaggagtttaagaacagcttgggcaacatggcaaaaacctgtctctacacaaaatgcaaacacttagccgactgtggtagagtgcacctgtagtcccagctactcatgagacttgaggtgggaagattgcctgagcctggggaggtagaggctgcagtgagccaagattgtgccactgcactccagcctgagtgacagagcaagaccctgtctcaaaaaataaaaaataaaattccataatctttatcatatttagaataaaacctgtcccacaaatttgtagtgactttttttcaaatgcctccttgatatttattgagataattaaatggaccttgctatttctcatgctaatatgataaatcatgtaaatcattttcctgcttgaatgccaccgatatagtcttgggataaactcttcttggttgctatagacccttttttttttttttttaactggcaagagtctctgcttgtatttggaattttaagataaaccttttattctgaaataatttttatttttttgagacagaatctcgcttgtcgcccagggcccaggctagggtgcaatggtgtgatctcggctcactgcaacctccacctcccaggttcaagagagtatcctgcctcagcctcccaactaactgggattacaggcatgtgccactgcacccagctaatttttgtatttttagtagagacgaggtttcaccatgttggtcaggctggtcttgaactcctgacctcaggtgatctgcccgcctcggcctctgaaagtgctgggattacaggtgtgagccgccatgcccagccaattctggaataatttttgatagtacagagttcccatatacctctcacctggtttctcctattgttaacatctcacataaccacagtacatttgccaaagctaagaaaccaacactgatatattactgtttgatatagtttagctctgtgcccccacccaactctcaccttgaattgtaataatctccacatgtcaagggtggggccaggtggagataattggatcatagaggtggtttccaccatgctgttctcatgagagcgagtgacttcttgtgagatctgatggttttatcagggatttcttcttccactcagcactcattctctctcctgctgccctgtgaagaggtttcttttgccatgattgtaagtttccttaggcctccccagccatgcagaactgtgagtcaattaaacctcttttctttataaatgacccactctttggtatttcttcatagcagtgtgagaatggactaatgcactgttcattaaaccccagacttctctggatttggctagttttcttatttgtgttaggatagccaaggtccatgttcatgactaatctttaaagcttcgctgttcttagtttgattcaaaactctaatcgtgtcatactcccattgtgtcccccattttatatatatttctaatagttgatttagtggaaggattatttgttccttgaaggatactaatttttcatggtttgaactaagttgataaacatgtgtagaaggttaatatactgtgataatattctgtgttctttgctgttctagaagaatccaaagaaaacgagagctatttttttttttttctgtttcctacttctccttccagagggcaagtgataccttgagataagagagataagaggaccaagctgctctggccccagggaagggttaagacacttttcttggctgggcgtggtggctcacacctataatcccagcactttgggaggctgatgtgggcggatcatgaggtcaagagattgagaccatcttggccaacatggtgaaaccccgtctctactaaaaatacaaaaattagccggacgtggtggtgctcacctgtagtcccagctacttgggaggctgaggcaggagaatctcttgaacttgggaggcggaggttgcagtgagccgagatcatgccactgtactccagcctggtgacaaagcgagactgtgtctcaaacaaacaaacaaacaaacaaaacagacactccacttttagaaaagggttgaaatttctcaagggttagaggaagctctagggtttgcaacagggcctgggaaggagtggcctaactaaatgtggccagacctggcagacaagatggaggctctatttaaaagaggggacattccaagagtgggaaagacccttgcggtgttcctccagagcacccaggaaagtagcaggtctctgagaagtaggggagagagaaggagacagttttggggtggggctcacttcttaggatccctgtgcatcctggcatagcaggatggagcccaccttcacgtggccaacgagagccactcctgggcagcccagatggaccaaagaccagcgtcctctctcccaccgtggaaccatgtaacttaccaaatgcttgtgtgacccagatgatgctaactttctggaatcccaggattgtccttgaacctggcctttcttctgtggacatgcattccctcagtgatctcattcagctcagggatttaagtcccatctcgatactgaccacccacccccacgttgatgtctcccacctggaaacctcccctggtccccacattcattcatgggacacctgcccctgccacctcgtgaatatttcaggcttcaggttaatgagacgtaccaaacgtgttcacaactgaacccctgatcccctcccaatctcagctggtggagactccatttctctagttgttcaagcccaaaccttgcagtcatccctgactcaccttttcccctcacaccccatacccaccccctcccagctttcccttcagaatattcctaaccccgactgcttctcagcacctcttctgctccttttctggcctcagctgcgttgtctgtcactgggattatcgctatagtcccctagctgtccctctgtctccgcccccatatcagagtcaggctggtttcgctgcagtaacaaaaaaccccatctctgtggctggaaacaacaaaggctctgttctccttcgtgctgggcacccactgtgtgccagggggctcggggccctgggcgccagctggtcaccatgccagaggaagagagggcgtggctgagctgtcctggctctgaaagtgtctactcaagggacatcacccttgcgacattttgttggcctttgagtggggaggatagtgcaatctatcctgtgtctgacatgagacagagctgggacatctgtggctggtcccagtgcccctcgtcccccaggacattctctgtttcactcagagaaaagatcaattccttctgctgccctgaggtcctgcaccatttctccccaccctcagtgggtcctccccactctctctggcctctgcccctacagtttcccccacactcaccctgctgagcccggccagcttctctgctgagcctctgatgcatcaggcacactcctgcctcagggcccttgcactggctactcccttgacccggaatgctctttccctagctagctgcaaggctggcgtcctcctgggcttgaactcttcaaatgctgtgctctggatgtggctgtccccatccatcccatctgatgctacagggtaccccctgcccagtgcaccccacccccttgccatttttatttatttatttatttatgtatttatttattttgagacggagtctcactctgtcgcccaggctggagtgcagtggctcaatcttggctcactgcaacctctgcctcccgagttcaagcagttctcctgcctcagcctcctgagtagctggaattacaggcatgcagcaccacgcctggctaatttttgtatttccagtggagtcggggcttcaccatgttggtcaggctggtctcgaactcctgacctcgtgatccgcccacctcggcctcccaaagtgctgggattacaggcgtgagccaccgcacccagcccattttcttttgctctgtggtatgcattgctttcccagcatgctctgtaatgtatggtatttattgtgtaaatccttgcagtagaccgtgcaccctgtgaggcagggcctgggtttgggctcagctgtgcaccctgcaggtgctcacggaagtggctctctgccagtttgtcgagtggatcaacacctcgagcgcttaggatgcaccaggcgttttacgaagggctttgtgtgtgttgccagggtgacccccttacctagattattagttccaaaatggcatttcttgcctctttgggttcaaagttaaattgaatttgatttagaaagactatgaggcctggcaaggatggttggagggcagctggggggttccaggagtgtctgtggcaagagtcaggagagatggtgggaagcgtcggccgggcctgtgtgggggcctccgggctgggctccgtccatctgtcagcaggatgcactggagatgttcaggttagagagctgcgtgaccaggtggggaagcaggtggggcagtttggaggatgggtttaccagaggcaggaaggcggttcctgggcctctccagccagccctcagcagtcagcgtccaccctcaactctgcttcaagaatgcattttacatctcggagctctccaatgtgtctgccaaaggcatgagagagaataaaccccactaatattggcattctttgggagcaggaaagcctgccgtggaaaccttgcctgcgggtttatccacctcttacgggaagcgtgagacggccctggtcacatttgcaggctcctccccgcccaggggcttctgcaggaccagctcttgtttcatgcttcagagccccctactcaaatacatgctggggcttgtgccatggcccagggcagaagatgcggcagaggttctgcctcctgggggctgcctgcaggagggcaggctggggatgacgcaggcgctggttcctgacccgggggaggtgaagacaagcactttcccagtccttgacttgtgcctgttacacccaaggcaggtgggagtcaattcgaggaccccaaagtctgggactgacaccccgcaacttcatttcagctgggccccttggctggagctgagagtctggtgctgtttactgtgtcgggccgcagggctatgctggcagctcctatgagtgctcatcacaggcccctggtccagagtccaggctcccagaggcctctctggcccctgcatggcccagcctctcagcagatgcagccttccagtgcggttgcctggcccagggcatgcaggatgggggccggaggtggaggctgtgtcacttctgggtctgtttctagggccctgctagcatccaggaccccttggttcaggggtttcttgggcagtaattgtgccttggcacacatgggtcctcactagcgtccggtcacattggtgaatcaagcctttggggtttggcaccaggtaagtcttggctccttactccaaaatttaccaaatgtttccagtatgacatctgagaagccccatcctcatagtctcttgcctgttgatgacattcctgggtggatttgcaatatatacaccatctttctcttgagccaccactccttctagtctcaaaggtctcctcgttacaacatcctcactccatatccactttttttcggtgggggggttatgggtaggggagaactggggagccgggcctcggagcaattagcaggggccaacaggattggggcttccatcaaagccctgtgggatccctgaggagtttggttaccattaaatggctttaacattaaacgccagactcattaacaaatctcagagtcaaattgcagaagccgccagtagggcaacgggcctgcccatctgtaaattgggagatggagcctccctcagcgcagggaaaaatcatggctcaggaattgaaaataatgtggtcagcagtaatttagaaggcttttcactgagcaaggtttaaaaagaaaaaaaaaagaaaaaaagtaactcataaaagtctgttttaaaaacctcaatggaagcggctgtggtaaaatactgccatcgtttctatcttaattcagtaaaatttttattaacttaattttttcccctctcttgttttttcactccataaaaacatttaaatcacttttttaaacattccccaatcaagccctttatcttcacagggcgaattccacctgccaatttgcaaatgggcttgttttggtcagcggaccacaggcagcattccctcctctgcaaagtttccgtgtgtagatgggcaggcctgctgccagccctctccctgcgcttcggaagaggtgcagtcaaaaatggcttttttaaaagaaaaaatggtttgagggtgtgtgtggtgggggagcacagacacccgaagctgctttttttttttttttgtcctatcttatggtgttcgcagcttcgaacgtttcgaggtagagaaggaggtccattcctgaggtcctctcgtgcccctgcctgagacctcagagggtcagatttgtgcctgccgtgctctcaccttgcttgggggcccttctactgtcccctgccctgctcctgtctcttctgtatcctctgccactgtggcccagcaccctgggtcaggcactgacctgagagcaccttcctgcatcctgccgtgggctgggttggatttccttgctggggtggaggtgggaggctctgcattggagagccaggctcccagctagggctggctgcctcttccctagcccacctgaaaccatcacactcccttaaggagtaaaacgtggacctgtttgagggaggtggtatgtctcattccttgcgtatcctttgcgtggaacaaagatgctgtctgtgtatcaagttcaccactgttagcccctgtctgtgaaagggattcggtattacaagacactaagacagggcaccattttcaagatgccaaactaaagccccagtgtggcacattaaggctttgtccaaggaaccatctttccatttccagctggtgaaggacttccccctgaggaccaaggtgtgcggaaccgtggtcacgccaccaccacttgctaatatgacggcagccagacatgtatttcccaacatgtgaagaggtcaggagctcctaacctgtggcccattaacttggggcaggggaaagttacatcttgatttttaccaacctctaactgcacggtggcactggagggtaggccatgagccacagccatagcagcagggcgtgtggctttgtcgtttgtagaaattgtggattttttcaagtcacaatacggttgctgcagacatctcggaatgttgtttgtgctggtgtgcccttcgaagccatggaagtgagaagacctgctgctgcctttattgcatgtgctggaaaagcaggacagtttccatatgatacacttgtttttttaaaattttaattttaaatttatttatttatctattttgagactgagtctcattctgtcacacaggctggagtgcagagaggcacaatcttggctcactgcaacctccatctcttgggttcaagcgattctcctgcctcagactcccaagtagctgggattacaggcatgcaccaccacgcccagctaatttttgtatttctagtggagacggggttttgccatgttggttggccagactggtctcgaactcctgacctcaagtgattcacctgcctcggcctcccaaagtgttgggattacagggtgtgagccaccacgcctggctatttatttatttatttatttatttttgagatagagtctcactctgttgcccaggctggagtgcagtggcaccatctttgctcactgcaacctccacctcctgggttcaagtgattcttctgctttagcttcccgagtagctgggattacaggcacatgccaccacacctggctaatttttgtatttttagtagagatggggtttccccatgttggccaggctggtctcaaactcctggcctcatgtgatccacccacctcagcctcccaaagtgctgggattactgcgcccagcccactttttttttttttttttttttttaagaatatttggttaactgatttcagtgtaatttgcttcctttgtaatcctatatattttgtgttttgcactgataagtgttattctgagaaggggtccatagaatttaaaaatttcccataaagtctacattgcagaaagggctcagagcccctgccctggttatcttcttttcctgtccactgaatgagaaatgcaaatctgagccctgaaatcagaagcatccagatgattccagatgattccatgtggatgtgatgcatggaggacatggtcactgaaatgaacaccaattttaaaaacctcatggagaaatcgtgggtggcccacccacccaagaatatggcccccaggccatcggctctcagctaactggacaggcccacttgggcttccttagctttgtttacattgttcactgccctccccgcatccctaaccactccctacctattccaatgtttcatgtttctcaaagctcttctgggcctcacctcctccaggaagcctgcctggatctatagaggtcatgacaacacattctcactgctcaggcccaggcttgcctcgtgccatgatgccaagggccccaatcccttgaacagggctccctggacatcattttttggttctaagccacgtggtttccctgaggtgctgggagtcctctccaaggctggggaacccgggaggaaggggatgtgcttgggttttctgcagctaccctttggctggtgcacaaacaccacggtgatccctgtggaaaatgattgctcgtggtcagggtgtgcagagcccaggtgatcccaagctgccagcggccatttccttcctaacagtgggagtgggctgaggccggtgaccctgcaggctgtgaccttgaggatggcattcgtgataggcgctttggtctttttccctgtccctcttgccgcgagggctccccggccaggtgggtgcccatgtatccagggaaagagctggtcacactggcatcatcaggaaggtctgatggagacaagcagagtcactttgatcccagagcccggaagtccagctgcctcctcactttccattccctcctgggacggtgggcagagatttcacaacttccctcctgcccagatgtccaaatatttctcttatcaaaatgtatattttcagcaaattgtacagtcaaagaggaaaatcccacagaaacagaagaagaaaaaaggctgtgttttcactttagaaaacaatctcttgaaaaaagaaatcttcctggccatggaggccagaatatggttctgctgggctcatgtgtgatctcagactcagatgaatccactgatttaacaggcaatttcccttaaatgactctgaacctcacttacctcacccaaattattctttggataatttggggcctgtttggggttgatggactctggattctcaggacaaagttctcagcacagtctactaggggaagcaagaacttcggagggaagcagactctagtttgaattttggaacttctaacagatacctgtatatcttcagatcccagtatttttacttgtaagatgagcagcatgtcatctgcccatgttaatttcctgtccttacttaaacaaagtacatagtgttttggagggctggctgggtatggaattgcaaatgaaaccaatgtcatacttacaagtgggccaggacttcttccccttcccctcacattcaaggaactgaggcaagaatgagaatcattcccaaacactctcacctctgcctaaagtttgctcctgaatttaaaatccaggcaattgccttggtttcctgcttctcagttaagacatactcagcattgcagtttgtctattacccagaagatgtttattgatttgaaatggcaggtgtttggaggttaaccaaatgacacaggttgacttggctttcccctcttcccttccttgttccccctctccctcagtcctgttcactcattctcacttcccaaccaagtacttgcagttaagtctttgtttcaggatttgctaagaacattgggctaagatagttggaaaaaagaaataacctctgaaagcagagccccaggatgggattttggtattggatcactcactagtcaaacatcaatgagggccccgttcctggtagtggtgatgattatggcacacattgccaaggctctcacctgtggttgcctgggatgaggtgcacatggaaaatgaggcattgggctgtgcagggctgtggcacttgaatagcatggagtgtgcttcctttagttaaatggccctgggagccttgaaaaaagaaagtgataggtttagattagccatctgtcagttcatgtcaagctgtggaatccagagggtctctggcagcatttatagattttcattttctgtaaggcagactgtactgaaaatcaggctcaggatctgattgtaagagtggcagagcagcaaagaagactgaatgcacagacctgctttgtccaaattagggtcctggtaggaaaagagtgggactttgagatccaagatggtaacatttaggtggatgaacctgaaaatcctgtacatccagattcttttgagtcctctacatcagcagatatccttatcccttcgatgagaaatgccccctttgcctagagcttcctccaattcacaaagtctcacttgaagcaggtatgtaacatgacattagccattttcagtatgtgttcccacctcagtacatccaagccgataaggctaatagctagggtcagccctgagcatggcccatgtgaggaaatgtatttcctgctctaagaggaaagagctcactagtgaagaaatcaggagctaatgaatatgtaccaatgggaaccagggacgtatacatagtagtaggtttcagtttacaaacccagactccattaattaattaattaattaactaattaactaaaagggaagttgagtatccttgagggaggatcctgtgataccactgccagtttatgcagcaattatttccctgatgctttcctgaggtgacatgtggctatctaccggagtaactgtgcactgaagagagaggattacttacactttcagggattgttggatatagggcctgatatcaggcaatctgaaactcctgattatcccctggttatactggcagcggacggtggggggccttcctaagaagaccaggtgataaatggagttcctgcccaaggtcatcacacagtggagccattggatccaaggactcatctcatagtcatttcccctctcccttattgtagtaattggagtagccagacttcagaattggcaggacttttgctttgattctctgacttgtgggaaaagagccatgaagtgggaagaaccaagtggaagcccctgaaactgtcacctcctggctaagatggtaaaatcagaagcaatactataaaccagggggaactgcagggatttaggaccatcacaaaaaacctaaagtatgtagtgatgctgcgctgtggcattgtcatccaattcacctctctggcccctgccaaaacagacagatcatggtgcatgatggtatggtaaattttaccatgtaaacttaacctcgttgctgctgctgtgccagatgtggtgaatttactggagcagattgacacaatctctgatatttggcatgtgactatttacccacttatttaccagttcagatagtcttcattcatttgtgtgggttcttatttccattggtataatatccgttcaaactaaagaacaccctggcagtacagatccgctggtgggaaatgctttcaggttttatgggtctaaagagacctttatttcatcctttcctccactcttgtttttgaagggtattgtcactggatatagaattctgagttgaaaaattttttcaacacattaagtctctcttggcactttcttctgattttattgtttctgatgaggcatcagtacgatttgtatctttgtttccctccttgtaatgtacatttttttcccctgaatgttttcaagattttctctttatctttggttttcagcagttttactatggtgtgcctaggtgtggtttttcttggcaattgttctgtttagggttcactgatttacttggatctgtaagttgatgattcccatcaacttttggaaaagttttgccttatttcttcagacttttttctgccttgttatcaccctctttccttctaggactataattacacattgctaggccatttgattttattccatagttatctcaggatctgttactttctttacattttttttatctctgttatttagattgcatagtttccactgatttgtctttagatcatttattctgtcatttctaatcttcttttaagtcaatccagctactttttcatttgctttgtgtttttgagttgtagaatttccatttggttccttctctaagttttaatttctctgctgaaattccctatccattcagtcattaacaccatatttttctttaaacccttaacatatttattataataacagttttaaagtctatgtctgctaagtgcaacatctgggacatctcagtgtcatttccaattgatgcctttttttctgagtatggctcacgttttcctgttgcttggatgtctagaatttgtttttattatattctggacattgccgataacagaccctagaaatctaggattctgctatttgcttctgagtaccgttgatttctattctagcaggcagtttgattctgacagataacttgaatttgcatagactaggatctagtgtttcccaagccccactaagttgatttaactcatcctccaagttttgccttccagctatatgtggtactcttgttgaggcttagttttaggtttagttagagagtatagagtagaccttattctagattatggtccttactcctgaggcatgatttttctgatgtctcttatgtctgggatataaatgaaaccactcccctctggctgagctggagttccaatatgtctcagcatcattctccctctcaactgcatagcaactgatctctggtaattcttcaatctttccctgtatatacacagctccacctttgtccgaggactgtgggtgacccccacacaaacttttgaggtacccatgcttggaagagcttcccctgtttctggtgccctgacccatagatccagctatttggcagcctcttcagctgggtaaaattgctatgctctcgctaagccccctggaccacagttaggacattttccttagggagagaggcagggcaatccatgggctcacatcaggagtttcccttctcttagagatcacagtctttgctgcctgtagccaatgcctgagcacagttgcttcatatccctcccccgttccccagttttagagttgtttgtggcaggaaagttacttttggccagaattggaagttggaaggtgtgcagctattgctatagcaaatgtgttctccatcctgatcagtaaagaggataaaaagcaatttatcattagataggaaggatattcacaatctcactccagatctatgttataataactcctgttctccaaagaatatacttcacaggtaccataatcatcttgatattctacagatcatgctggtctgcccaacctttcaaaggcagacactagactgggtgtggtggctcatgcctgtaatcccagcactttgggaggccaaggtaggcagatcacttgagcccaggagtttgagaccagcttgagtaacatagtgaaatcccatctctatgaaaaatgaaaaattagccaggtgtagtgtcgtgtacctgtggtctcagctactggggaggctgaggtgggaggatcacttgagcccaggaggttgaggctgcagtgagccgtgattgtgccactgccttccagtctgggcaactgagcaagaccctgtctcgaacaaacaaacaaacaaacacacacacacacacacacacacacacacacacaaaagcagacagtaatgacaaaccttcaataaggcctcattccttgagggctctgaccaaccacttagtggtaagttgattatattggtccccttctagtctaaaggagataacacttgtctttttaggaattggcattactctagatatgtatttgccttctgcgttcacagtgctctgcccacatcaatcaaagggctgacagaatctgtctccaaggaattggcagatgccttgaagcaaggacacattttacagtgagggagacactctctggagcacacactggtgagatctgtcaggcttacaacagatatattcccataagccagaagcatcagtccaagggaatgtgagagcatcttgctaaagactctgctaaggtgtcagctcagggcaacacccagtggcattgggaccccgtcttccagtgtgtggtgaatgcactgagctaatggccggcacacggggctgtgtccccaggaattcatgggcagtaggagtgacgcctctcgtggtcacactgcgacccactcgtgcaccgtaccggagtttgtggatgactctagcagagggtggttgctgatggatgaaggcgggattaatgttttcccctctccagaggaaagtccaggaaaacagtcacacactccttggggaatctcttggtttgagcgaccagtgagggtagcaatagcaagttcaagtctgtgcctttgtgtcgccccctgtccttccagccttgctcaccccacctcagatcatacttctccatgaagggctcacactcaagcctttgtttcagcctctgcgtactctgcaccactgggcgctgaggccatttacccggtaatattgatcgagctctcacgatgtatgaggtaggatactcgggctggggacacaacagtgaattaaacagacacttctccccaccaccccatggacaccaaattctagagggagaagcagagaatgccatgtcactgaatgagtaataacacaaagggaataatgccaggtaagaaattgagagtgaccgtgggtggaaggagaggggagcagggaagcagttagcacagggggctggggggatttgtatggacctccaagtgggccaaagaggacagccaagtggccatatcagggcagagtgtcctgggcagaggggacataagggaccacatcagggaggtgagggtccctttctttccaatctgttcagcattgagaaataacaaatcttcagcttcccatcagacccctgagaactgggcctagccagattatacaagaactccacatgccagtgagcctgtgacctacagaccatgcagagccttccatccatctcttaccccgggcacatgagcccagcaagaaaattatatttaaaagatgaagatcaaaaggaaggcaaaactgtgtgcatccggaatccctttattagagaccaaatttagttaagatccgtcttttctactttattatagtacagaaggataaataaaagatggtgaacccgagccctctccttggctgttcattaagaaagaccattttgattttgagcaatctcagccaggtgtgggagggaccacagtcatcctcaaatgataccgttgatggtggagaaattaaccaaagtccacaggagagagcacagacacatttttcttcttggaaatttttgtttgtttgtttgtttgtttgtttttgagacagggtcttgctttgtcacccactgcactccagcctgggtttgtttgtttgtttgtttttgagacacagtcttgctctgtcacccaggttgaagtgcaatggtgctatcttggctcactggaacctccacctcccgggttcaagcgattctcctgcctcagcttcctgagtagctgggattacaggcgcctgccaccacacctggctaatttttgtatttttagtagagacagggtttccccatgttggtcaggctggtctcgaactcctgacctcaagtgacccacccacctcggcctcccgaagtgctgggattacaggcatgagccaccgtgcctggccacttcttggaaattgagttgctaaggaatctcttcagatctcatgtctgttgtcttggggcatttacgtataagtggcccgtagctgtcaaagggctttaaagggtttgaaagcaggtgtagtggacagaggcacatctcagaaatccccattgctggcagggacaaagttcagataatgcccacagcatgttattgcagaaaaagaaagcctctggcaggattctgtaataacactctgtatctgtggtctgttttcatccgaggatctcaaaacattttcaagcattaattaaacttcacaacgatccaaggccgtgggtataattagacccatttcttagctgggtcatttgaggcccattaagatgaaccgatttgcttagagccttggaacccgactttcctgttttgaacctcagcttgccaaatgtctccaaatcagagaggaacatgcacatttaagcaaatctactcagaaaccagttacttaacgaattcttggacaaaccctcaatgggtctccgtgaccactgtgttatcatgttctttcatcacaaccaattaaccaaggtattttttacatgcctttatgaaaagtcactgtatggaaatattgaaaggcaggaggttggtctcaagaagcagtgaaaagtgcccctttctcatggcctgaaactgactccctcctgggcgtaaaggagactccggtgtgctgttggtttcccatcattttgccagaaggctataagatgtcttttcatcttaagttacataagtatccaacaaataagaagtctgttattacaacagcaaccatactggagggaaaaagggttgatttattccgaatatctgcacttaacagttttgatgtcttttaagagacttccgagttttaggagggagaaaaaaaatgcacaaacattcttttaaaaatgcaacctggctgtggctaatgttgtctggccagaaagctattgttcataagcccagggccgcgcagttatcattcatcctgggatgcatcgacttgccttcttcctgccgacaagctgcttatgcaaagcagcccccagtattcgtatggagggtgggggtagggagactctcatgcgtttactttgaaaagtctcctcctgacaatcaaaaacattctcaggaaacatgccttgctgtggatgatccccacaccccctgccctcctgtcttcagaaaaacaaatgagtggtttttctacagaaaggtgtagaggtaactgagggaagcctgtgatgggagaggaaattccccgtttttcatgtcccccttataaccgagggcctccttctccgaggtgctctactgagcttcatccttccacattctttccccttgactgactctcaaaggatccatttcaacgcggaagaaaaaactccagcatcttggatgatggtcgctgattctgacactcagatatgttgtcggttaaacagatagctttggctcagtgatatcggacaattgacctcttggtgcacagactcccagcagcctcgctcccaaagggggtcttaggggaagccaggtccacagatcaggagcccctaggggacctgagatgggtctagggtttcagtttcatctgtgatcttttcggtgaggtgtgttcagtcagcgacttcctaggaggaagccttcagctgcatggaaagaaatttaagttcctattctctgtccccagagtcatttaaatggggccagtgtcggagaccggagcgtgatcctgcgctgtgcccgtgtgcgataccatctcagttgccactgagctcggcctgctggggaggaggaaggtggcctgccccagggagtcaagaaattcaatccaagtccatttttaactcgatgaacattgattgacaatttagtaggtcttacgtggaatgcaaggaggaatacattaaaagacagagtctctgctgaaggtaggaatgtacataactagcataatgcaagtggggatgtggtatgtatattaagaggggcacgagaatgtgctgcagaaatgattctatcttggagaagtggggaggcactgcaggtggatgacagctggatcctgaagggcaaatgcagtgtcagtgaatgtagtagtgtcttgatctgctggggctgccatgatgagctattgcagatggggaggcttaaacaacagaaattgatcctctcaccatcctggggctggaagtcccagattaaggtgtcacagggctggttgctcctgagtcttctctctatggtttatagttgactgctttctccctgtgtcctccagggtggtctttctgtgcgtgtctgtgtcctcctctcctcttacagggacatcgatcagatgggattaaggcccacccatgtgatctcactggacttaaattacctcttcgaagtccctgttcccaaaaacagtgtcacatcctgagatatggggggttaggacatcaacacataaatatttgagggacataattcaacccgtgctaagggagaaagaggcctttccatggaggggacagagtcagcaaagccagaaggatatgaaagggcagggtctctggccaggcttctcagatgcagagcctgagacaagggtttgggtccatgggattgattgacagagggctttcaagagaaagaaagtgagagaggctagatggggcaggggaggctcagcacagtggtggtttcagccccacagggggctctggagtgtgacctgcatcacagagtcagtcccacagtgaggcatgggggcccttagacccccagggtcagtcagtcagtcactgactatggccctaccaggcagggtggttctggtgggatgttccaggccaggtggctttcatgcagtcaatgtcaattcttggctcaggacatggctgtcagtcctcagcagctttcatcagagactaggggatgctcccagaagccaggccaacacaggggacctggatggtgagcttggggatgagaaagcggctgctctgctgtgttgaccacagggctctgaagtggatgctggaaaagtagtcggtctggagagacttgaaggccaagccaggaatctggactttgactgtaggaggggagtttccatctgagctgtgcggccggtcctgcatactgcaccctcttgtaaacatgtggattcaccccaggctcagctgggcccaggaagctgcaggttcccaccttcaggtttctcctggccaggctggccctcaaagctgggcgtgaagcagctgttgtctcccatggcctctgctctcggcctcctctctgccaccgtggtcttgcacatgtagggacctcatcaagggtttaacaggaaactcatggggcccagcgcctgcatctggagagccacctcccttctactctttgggcttttatgaaaaagagtccatttaaatctgatgaataagtcaaaatgaattgaataaataaacgaatatgtgcatctctgcagaggatgtggctgcctggtggagaggccagcgggcctgccaaagaacaaaggcaggcgaggactggccacagtcctggggcctggtgggggtatggagcccaggggttatcgagagccaaggaggagtggaaatatggttggctttgcttccttccctgttcatcagtggtggtcctattaacacttgccctgtcagctccatccacggttgctttgagtgaaggcctcccagtgtcattaccgtcatcaccgcatgttggaaaatgataatgtgtttgaatttcctgagtacacatgaatttccgaggtctgaatgtggcactgggtcccaggcgagaaggggtttacacagggagagttctgttgggacgcacacgctcccatgtgggtgccgctccgcaggccactgtccctcccaagaggcgcagatatggggtctggagctgcccgttgccagcagttcttcctgctgtgggtgctggccttggtcagtgcccacggaaggtctcttctctggaccctaagtggccagttggctaaggaaggaaactagtattaactcatcactctactgaatccatctaagctccagggatggagacatgggggtggagggtggtgctgactcaagtgaaatcttgccccagctttgattctgcttggacgatggaggaggatcccaggaaagtctcctcacccctacccctagggtggcttaggaatgcactgacattttggtttcctccttccaaaaataataatttgcacataacagacaatttctttcaaaaacagagacccatgttataaaaagggcaacaccctgctagagatagaccacctcatggtggaaacaaatagcttgttttataaactgtactccattccttatagaaattgtgtttcctctccagtgtaccccgcaaccctgatgcaccagatggacattgatggggagtgtctgcagatctaacgggagctcagcttcacgttcgacttgggtggcagctatgccatgtggaactgtaaagattctggtactcgatttttataaaactacgatacttatttttaaaactgacaggcaaaggaagagaggcagaaatgctaatttaactcaagctgacttttttttttttttttagctgactttgagacatgacagaagtctggaaaagataaagcaacaagttcaaacgtataacgcttacttttactccgcatcaaagcaaaccaaacatcgagaagacctatatgcagagctaaaatactcaattgatcctttttttccccactgaccggctcctgggaaacatggatgcctcagcctcttaaataacgctgctaacagcgggccaattgtgcagcaggacgggcactgccccaggtagccgataacttcctgtgttgaaacgatgacttggagatttcatcatgatatctttgcacaccaggaaatatcatctttcagacctgccatttcttaatcggtgagaatgctattaaagtcgatgtcttaattaagcctagcattagccaaggaattacaggcatccgaaggcttagctgtctggtgggatccagtttcatgaggcaggattaggtgcacggctgggaactccaagggggagatccctggctgcgaagagaacaggaacatctctggagaaacctgcagggtgtgcctggtgggcaggaactcagaaactctctttgcctctccagcctctttaacccattttattacaattggtcagtttgtttatgctataaatgaatatgtacagccaggctcctcggacttctaggcctttgtttaactcctctggcctctgttttcaatctgagaaatgggtttcattctcaagtgcccaagtagactgatcacaaacagctctgaaatctaactttggagtatgggacgtagtactgagccagggggctgagccctgggctctggcctggccccaccacccccaaagcatttgcaccatggagtgttaagattgagaggtaagggtaggaaagctttctggtcttgaactcctgggctccagcaattctcccaccttggcctcccaaagtgctgggattaaaggagtgagtcactgtgctggagtggagtgttgctgtcatggctcactacagcctcgaactcttgggctcaagcgatcctcctacctctcagcctctcaagtagctgggactgcaggagtgccaccatgcctggctaatttttctattttcagtagagatggggtttcaccatgttgccctggctggtcttgaactcttgggctcaagcaatcctcccactgctgcctccccaagtgctgagattacaggtgtgaaccaccatacctggccaggaaagctttctgaacacctgaattcatgtacctaggtaaatgattattattagcaaagcaaggagagctgcctccatctgcttagggtgttataacaaaataccacagactgggtggcttaaacaacagaattttctcacaattctggaagccagacgtccaagaccaaggttcctgttgggtttagctcctggtgagggctcccttcctggctgccagactgccgccttcttgctgtgtctttgcatggtggaggaagagagggagtaggctgtctggtgtctcttgctcttcctatagggccacagtcctatcagactagagctacaccctaatttgaccagggccacacttgatcagtggccctccagggatgaccaaccacctgtccagacccttccaggctagaggctggggctgctgagtggaccctgagcctgacgcaagagtaggcagagccatgctactcctgcccaccgggtggctgtcagcaccaactatggggacccggaacccatgtgccatgcataaggaagtggttacatccctctggccatatttccggggaactctgcttcctcttgacagcacaaggactcaggggctgtgagcacataagcaagtccttcctaccccaggtgctcacaccatggggacacctgtcctgacgtcagtccccagttctcacaaaagctcatggccattccttttttctaagtaaatctcaggctgcatcaattgtaacagtgacaatgattataatgataataataaaattttaaaaggctggcctggtattgccagtgtcttgtgtctggcaccaacactgtgtctacttggaatcaccataagatgagacaaattctacgccatttcctcagctcccagtgcacagaggcctggagattttgctggactagagagaggactttctcctgaatgttctacactctgtgcctggagtcccacgggccaatgcacctcctggcctggtgggaagggacacgaagcactggcctcccctatcctgtgggattggcccccttaagtgatgctggagtcctgagccctggtacccatgaacgggaatgtgaccttgtttggaaatagggtctctgcagatgattaagatgaggtcattaggacgggcactaatccaacatgactgtggccctcatgaaaaggggaaatcacacagaggggcaaccaaggggagacgcagggagaggaggccattgacaagccaaggagtgcgtggggcccccagcagcgaaggagaggcgtggcacgggtttccctcagacagaaccaaccctcctggcaccttcagtatggacctggggcctccggaactgtgagtggatacatttcgattgttaggccactcggtctgtgggccttgttatgacatcctgagcaggggactgcatcctgtgggccagtcattcccctcctacttgtgggggctggtaaacctgcaggttggagctgccctttggagagaggcgtcccctggggacagaggatgggatgctagcctgtccatagagagaaaccccggtgctcctggggttcccaccccgtcgcactgccagggctacgggaaggatgcttgcttgccccctcccatggcaggtactccatgcgcctttggtttgcaggtgagggaaattcgaactggaggtggctttgctggagcctgtggttgggctgagcagcctacacccccctctgaggcagcagcagaaatcaggggtgaccaggggcaggcccgatgtcaccaccctcttcacatcatcactggcagggccaactgggcacagcctggacaggttctcagagcccctcagcttcttcctgcagggaccccctaggaaggtagccaagagctcagccacctgacaaagccagcacccacacttcgcctctcaggggacagaatgctgggagggtgactctcgcatggtggctcctggctggaggggtcactgggtggggtcggctctgtgtctccactgcccagcctgcccaacaaagtgtctgttgtttccaggacaggcacacagtagggtccgttttgttgctgttgaagaagaagaaaaagatctctaataagccccattaagacttgagtcaacacagtccctagaggtccaggagtggccaaaatgtctgcgtgtagccatgtccctgtgtctggcaaggagagtgtgaggacgaggcatgaggtcctgggagttctggggaaagaaagcagttgggaaggggccaccgtgtgcccagccacgggtctgtggtgatggtggctgggatgtgcctgtcactccttcacctgacaagtcctgaaagccaaggcgctcgcatggtgctggatgctgagtccaaggactagagggaccctcgtggtcctgcaggtgctcccagtgaggtagaaggggatgctgggcttctgagcgcaggtgggcggtgtccacctggggactctagggacaggaagatggtaatgggatggccaaggtgagacaccaaggtggcatttgctgctgccagagcccatcatctaacagaaggaagcaactctgtgtgtgtgtgagcatgtgtgtgtgtgagcatgtgtgagcgcgtgtgtgagcctgtgtgagcacgtgtgtatgtgagtgtgtgagcctgtgtgtatgtgtgtgtgagcctgtgcatgaccatgtgtgtgagtgtgtgtatgtgagcgtgtgtgtgagcatgtttgtgtgtgtgggcctgtgtacatgagtgcgtgtgtgtatgtgagtgtgtgtgagcgtgtgtgaggatgtgttatgtgagcatgtgtgtgtgaaagcataagtgtgcatgtgtgtgtcagcatgtgtgtgagagcgtgtgggtataagcatgtgtgcgcataagcatgtgtgtgcatgacagcatgtgtgtatgtgtgtattgtgagcgtgtgtgagggcatgtgtgtgtatgtcagtgtgtgtgagtatgtgtgtgagtatgtgtgtgcatgtgagcatgtgtgtgagcatatgtgtgcatgtgtgtgagcatgcgagagtgtgtgtgtgagaaagcgtgtgtgtggatgcgagcgtgtgtgagcgtgtgtgtaccagagggccttcctagaataagtgacaccaacaccaacttatgccttgaaggcggaagaggaaggcagtctggccagtgggagagggtgggcaccccaggtcaagggcccagcaggagaaacggcgctgaggcatgacctggtgcagttgttggtcccgctgccaaaacaggcggatggcttaaactacaggcatttgtcttctcacagttctggaggttggaagtccaagatcaaagtgttggcagggttggttttccctgaggcctctttcttggcttgtagatggtatcttctccctgtgtcctcacagggttgaccatctgtgtgtgtctgtgtcctcatctactcttcttatagggacacagtcatatgggattagggcccatgctggggacctcattttaacttaattactcctaaaagccctatctctaaagcagtcacattctgaggcaccggggttaggacctctacatatgaattctggggacacaattgggcccgtcacacatggggtgggctccaagggaagttggtgcagtggtcctagctcttgtgaccgcataagctccaaaggcttgttggtattcagacctgaggaatcagaggcccaaggaggacaggagacacggctttaggtccccagttctttgtggcaggactgcctctcacccaggtctccactcccaggagaagaccccttccacacttgatgccaggcttcttattacacagaccctactgcctcaaaggcctcaagtgaccccggactcactcacgccctgcaagcaggggaactgtcagcatctggctagggccatgtcagctgcgatgggctggggcgagctacagtaagagtggggcccgtggagtgggttcctgggggagcccatcgtatgtctagcagttgcgggctttttgggatgtcaaccacctctgctgggaaggtgctgggcgtgggtgggtgggtaagatgctggctgagtcatctgtgtccccgaaataggctgtggaatggggaagcttgagctgtgcacgtctgcaccaccgaactctgagttgaccaaggagagggtgaagctgtgtggggcagccttccctcacagcagagtcccacacacccaccccgacctctggcactgtgaggctgctcatttgagcaaattcttctctcacctgccctttgaataccaggagtcaaccagcacagcgcccttctttttgggctaagcaccccattccttcaggctcactgtgtcagccactttacctctctggtggcgtcctctgcacagtccttagtgtgctctgttaaatgcctggtggcagggggtagaatcctacaaaaaccagcatgagccaaaaggatcccagttggctcttgtgactggagaagtcaagtggtttcagggatggctggatctaggcactcaggtgatgtcattaggctttgttttctgtcttggctctgatttcctctgaatgttctttctctcctttctctttgccagttcacacgggcatctgtcacgtggccagagaagatggtgcgctccaggcttatgttgttctccgaccctagtggaaagaacactcatctgcgccaccacccacagagcaatcccagggaggactctgatttgctctgcttgggtcacatgaccaccctgagccaatcactgtgtctgcaggaaggagaaaaggaactatggctggctgagcctgtctctgcccacaccgagactgaatgtacccaacttaggatctgttctccaaggtccctggagctggcagagctggccttcaaggccaaaacctcatcctccctgtgcagcctcttggtgcagcctccaatcaggccctggggagggcaacagcttggagatgcggcctctgccttcagcggtttacacctggctggggagacaaagcaacgacacaggaaacaaagagttaaaagttcggccacagagaaaaagcttaaatgaggtgccaatctgctcccccatgggctgtggaaggagggctggcccagaaaggggaccccagcagcaagaaggtggctccctggctgtcctcctgtcaccccgatgactggcctacgcacggccaatggggactgagcagggggcgtcggggaggttttggaggaaggtacctttggacacctacatggaggtgtttcccattttcgtattcaacagtcacttactgtgcatggaactgggccggaccggtggttctcacctggccacacagaagactcacctgggacagttttgcaagaagacgaaggccacccactgccactttggcggaatccatctgggtttgtttaaagcttccaggcgattctgaaatgcagccgcttttgggaagcactgagccagacagacgttgggaggaggttcttagaccaggacccggagacaagagtgtttgccgcctgtcatggtgagcactcagagggaaggcctcactgccccggggagctgccagagccgctgggcagaggccctggtgttgagagctcattgtctataccggggccggtgcgggcaccgggtgatcaggaagcaacgcgtgcggcccgctaagcccccgtgggccctcggagcagacgtggcctcctctggccctctgcgtgcagcacagtccagctcaataggaagagaggtgagttcattcagccacacagagtgtcgtccccgctctagagagttccaaccatgaaacagaacggaattcagggagcaggagattgcattcacttacaattttcagaacgtgattcaaagcgaaaatgggcttgaataggtctataaaaagaacaccaaagtccccttagacagacgaaagcattttgatgattttagtataaatgaatctggaacataaggattaaatttttctcacaatacttgagaatccaagatggtgcagagaacaggactgtgaagaatctgacagctttccgagactttttcgacgggaaagacgtagctgagtaaagctcccagagaacgggtctcctttcgttttccttctgagaaaggattttccatttctttccttctcttcacagatgtacacggcaccctccttcatggacagccttagcccctctgtctggggagccccctgccctctctggccttatctccttggcttgtcttgctctgtgcccgttcttattgtaccttgaatctcattcctggaatctgctcaccatcaggtgctgggtgggggacactctgtatgggtgggggtgggtgggaaggctgggaggtggactttaatgtagacatggggttgtttggggagggctgggctgtcaaggtctggtttctcctgaggtctctctccggcttgtagacacgcattctccctgtgtcctcacgtgatcatcctctgtgcatatctgtggcctcatctccttttcttataaggacacaagtcagattggattaggactcccccatctgacctcattttaccttaatcacctctgtgaagacctcatgtccaactgcagtcactgggcaattggggtcagttctgaggctctgggggttaggacttcaacatgttcattttgggggagcatgactgaaccctaacactccccatcagcaagatcctccccgtcagcatgatttgataggttgcctgggataatggtgaacatttcttatagttctaaaatcctaagagcctgtttcaatcttatgacagtgatatcactgaatcaaaaatgagcctcacagaggaaatgaaatctgatctcactgtttcaggaggagatggtgggatattgtaagtgaattatatccacatctatatacacgatgatacgtgaacaggacacagcaaggtctggtggcgtctttccattcaccattctgtgagatgcttatggctgccctaacaaaatatcacagactggttggcctaaagaacaagaatttattgtttcacagtcctggaggctggaagttccaaatcaaggtggcagggttggttgctggtgagggctctcttcctggcttgcagactgcagccttcttgctgtgtcctcatgtggctggcagagggggaagatggagagagagagagggagctctctggtgtctcttcttataagaacaacaatcttaatagatcagggccccacctttctgacctcatttaaccctagtcacttacttagaggccccatctccaaatacagccatactgtcaggctttaacatatgaatcctggagggacacaaacattcagtctataacatacatctcctcattttctcttcccccttcctgactgtactttaaactttacaccatcaaaatggacatttataaatagttggctaaccacagttcaggcttcagaaattgaaactgtgtctgaatctcctcttataaggataccagttatattggattagggtcattttcttttccccttcctaagtgtacttttaactttacaccatcaaaattgacaacatttatagacagttggataaccacagtgtaggcttcataaattgaaattgcatcttaatcttctcttcttgtgaggacaccagttttattggattagggcctaccctaaagatttcaattagtcttgctttttggtttttcttatggtgctttttttttttaacatgtgagagatttttgttttcatgtaatttaaacttttttatcccttttatatttttagtcataatttaaaggccttccccattgtctagctgtaaaataattctttcatgttttcttgtagcacttttataatttttttcctttacttttctcatttgaacctttgatcgatgtggaattcatctgagctatgtgacgaggtccctgattgtcctaacaccatttgtggccatctcttccccattggttaagatgccctcttttccacgtactgaagtgtcatgtgtattctgagtctatctgaactttttataccttgtcagtggtctgtttatttctggtatcatactgttttaatgactgatgctttttttttctttttttttaaaattatactttaagttctagggtacatgtgcacaacgtgcaggtttgttacatatgtatacaggtgccatgttgatgtgctacacccattaactcgtcatttatattaagtgtatctcctaatgctatccctcccctcttcccccaccccacgacaggccccggagtgtgatgttcccaaccctgggtccaagtgttctcattgttcaattcccagctatgagtgagaacatgtggtgtttggttttctgtccttgagatagtttgctcagaatgatggtttccagcttcatccatgtcactacaaaggacatgaactcatccttttttatggctgcatagtattccatggtgtatatgtgccacattttcttaatccagtctatcattgatggactgatgctttataatatgtttaaatatctgccaagattatcatactcttttctcctcttctttttcagggttttcctggctatcttatttatttttccacatgaattttaccattgctttgtctggttagagaaaaagaagctatttgtattttcaatggggtcaagttgactttgaaaattaacagtgagaattggcttctagaatttgggttgtttttccaattgtttattttcctttgtgttcttcaatagttcttaagagttttaaaagatagagatcttaaaaattccttttatgcttattcctatcattttatcttttaaaaaaattaactgagaagcagattctggattgtgtgtggtgtgtgtgtgtgcacgtgtgtgtgtgtgaaagctactgattttttaatatagtctgctcccttagtgatgcatttgattgcttataatagcctttcaatgtattttggggggttttccaggaatataaggatatcacctgcaaatactaagactttttcttcttttccatttttatactttgaatttatttgccttttctggttgtatttgctagtaattctgcaacaattaaataacagtgttgataatgattgttgctgtcttagtggcaatacctttcatgtttcttgtattaagaggaagctggctgagatggaaatattttgttagattaaagatagttccatctattcttttttattgagtgtttaaccaggaatttttcaaatgtttttcaactatggaaacaatcatttgattacctcccctgaagtcaattaatacaatcaattttattaacatatttcccagtgtgaatgtagtcttcttttcatgtgcttctgaattctatttgtttatattttactttggattttccccttgatatttataagaaattttatccaaagctcccatcaagttttggtatcaatgttatacttgctttataaaaataattaaaaaaattttcttccttgttgtatgctcaagttttaaacagcattgggatgaaaggtttaggagctattccctgtgaacctcctgggcctggttcctttttggggttgaaggtcctaaaatttgccattaaaaacaatgccataatgaatatccttcctatctatgcttgtacacttacacgggtttttcagttaagctaattcatagatgcatagttgctatcaaagatcagccacaatttaaaatgtgatcaataggtccttatagtccctatccctcccatggaggctgaatcaatttgtgctctctccaatagtgacattgggtattttcaaccttttttgtcttcgccaatctgacagacaaagcaaaaacaaaactcaaaattattatattattggtttaaaaaatgcacagtttttaaaccagttatgaggttgggcgcttttttatatttttactggtaactgaatttccttctctttgaattgcctgctcatgtctttcccatagttttccaacaggtttctctccttttcttcattgcttttcaagagctttttatatagtagggatccacaaacattccactgggtccataatcctaggccagccatgcgttgtcctggtggatggactttattataaaaattatgtagctgctctacagtacctaagttcactctactgggcagaggccgaactgcagatgattcagccttgggtcatgcagagaacttgaactcgtcaatcgaagatccagaactgacttgaggaacttgactcaactatcctgtgtccagttccagcaagctctttataggactggaaaaagtgtccatggctagagaactcccacagatggggaaacataccacacatccacgtaagtctggtcatcaaaattcatttcctgaataggatcagaggaagcatggcctgtccctggttagttatttgagggaatagaagggaaaggagctatttgcaatttttaaaaatcaaaattcggccgggttttctgtcgagttgtgttttttggtgctttgttgatttctggaggaaaacaaaaatatgtgatcgggatgcaaaggaagttttgggagaccaagaacggcagggaggtggcagttcccggctgataaccacagcagggagggagagggtgtatgttgcccatatgtagtttgctgtagctttgcaaacagctttaaaaatcaagcaagccatcaggccacaatagtttcagacccatctttttggaagctgcatctcttagcccagacccagcccttgcccatgtgtcctggcaagacaggatgtgaggatgagtcaaaaggatgaatgaaacatcagataaaacaaggggagagaatgtggctccactgtccagagcacagacattcctctgacctgtgtcaggcactgtttttgactttgggctgacaaaggtgttgagaataacagtacaatcatggcaacaaccaaaacacatgctcattctctgtcacaggcgctactgggaggcatgtcacaaacacacgcccattgggtctgcagaatgaggcaggtgctattgagacctcaacctgtagatggggaaagtagacttggggaggtgaagtaacttgcccaagggtgtgtgtctgggaagtctgagcccaaatccgtgctctgtgccacgttgcctcctcaagacaacaggtgcatgggtacgtccttggaagctcagggtgatgatgctgttgaaggcatgaagccatggcttggagtaccatgtggcacctgctgtatggggaaacagatgctgaggggatccagaagactgcctgggatgtcagggagggcttcaccagacacaggggcaggtgcccagggatgctttgggttttagcaggaaaacagggaggaggctaggtgggaggatggccttccggtggattggccaggcttctggaagcaatggagcccatgaaaagcgacagccagggacagtggggagggctggggttaaaatggctgtaactggatcgggcatggtggctcatgcctgtaatcccagcactttgggaggccgagacgggtggatcaccagaggtcaggagttcgagaccagcctcgccaacatggcaaaactctgtttgtactaaaaaaatacaaaaattagttggcatgatggcacgcacctgtagtcccagctactcaggaggttgaggcaggagaatcactggaacctgggaggcagaggttgtggtgagccgagttcaccccattgcactccagcctgggcggcagagtgagactccatctcaaataaaataaataaaataaaataaaatagctgtaactcttcctcagagaagagttagaagagctgtaggggctggtgggccattcaggagggtcccttagggctccactaaggagtctggccacagtgccccagcagtgggaaacactgcagtttcttaagcagagagtggcttggtcagattcacgttttttatttttatttttgttgttgtttgtttgtctgtttttgagacagagtcttgttctgttgccaggctggagtgcagtggcacgatcttggctcactgcaacctctgcctcccaggttcaagcgagtctcgtgcctcagcctcccccatagcttgggactacaggcgcacgccaccacgcccagctaatttttgtattttgagtagagacagggtttcaccatgttggccaggatgatctctatctcttgacctcatgatccgcctgccttggcctcccaaagtgttgtgattacaggcgtgagccaccgctcctgtcccagattcacggttttaagagcccattgtgacagcagccaggggggagaactgagggccacactatgtccttcataactcaccatctgggccccatttggaaaagcctaggcgaagtacagtcattggttcattgtcatggttcacatcccagcgaatcccagtggagtgggtgctgagtgtgtgatacttggaggaagagttgttgcaacggatgtcaacgtgcaggctgaacacggcgacatgggcccgatgttcagcaataacaaatgcaggctactggggagcttaggggcaggaatcctgcttctcttaacagagaatgtggccaagcctcttccatgtcagacttctcatctaacgacattgagcttttgatatatgaacattatttttaaggctaaaaccagatgtcacaatttttcagagtatttgctaggaatatcaccctgacttgttgcaagggaagtttcctcattgtgagactgagagattaaattctattttatgtgtctggaggaagccatctgccttcggcttttgttaagggcttctttctgcctcctttactttcagcatttcatgtttatgtgcatatgttaaaatttcaagatgacgccaaagaaccacactttattattattattattattgttattgagtcagtgtcttgctttgttgcccaagctgagtgcagtgatgccatcatagcttactgcggccttggacttctgggtttaagcagatcctcccacctcagcctcttgaatagctggaactataggtgcatgccactgtacctggctgattttttgtggagatggggtcttgctatgttgcccaggctggtcttgaacttctagctttaagcagtcctccctcctcagcctccctaagtgttgcgatcacaggcatgagccaccgtgcctagcctaagaacaaaactttaaatgggacatgatgacataggctggtgggatatgaattggctaactggtacagaccaccaaccacagacaattctccaagttccaatgaaatgtccccacagacactgaaccataaagtatatgataccagagatggcactgagagacagcttcatgtcaacatcagagaagaacagacaaaaatttaaacccacagagagcagtgcactaggtaaggtctgccaaagaaactgggaattagactgggaattgatcacctcatttgcttccctgtttgggagctgagaaaggaaatccaccgaatacaattatttgcctgatcatttaaaaacatgatgcctttacagatcttgctttgttcagggattttaaaaaggaagcaaaccagtaaaccaaccaaccaacaaacaaacgtccagaaaacaaacaacaaacaaataaacaaacaaaaaaccaccaataaggggcaaaacaggagaaacagaacagtatctaaaagatgaggatcacagtctgaaaatgttctattgcagaatcccccacacccaaataaagatcaagagactgattgggttaaatcctatgaaattgctatttttataagtctaaaacagctcaatataggcaatttcatagggttcaacttaatgtatattcaacataagatatagtttggctctgtgtccccacccaaatctcatctcaaattgtaatccccacatgtcaagggagggacctggtggaaggtgattggatcatcggggtgttttccccatgttgttctggtgatagtgagtttctcttgagatctgatggtttaaaagtgtgtggcggttcctcccttgcacagtctctttcctgccaccaagtaagacatgccttgccttcaccttctgccataattgtaagtttcctgaggcctcccagccatgcatgactgtgaatcaattaaacctcttttctttataaatcacccactgtcaggtagtttttttatagcagtgtgaaaacaggctaatacaacatatcaaagacagaaaacaaaataaacaaaaagaaatgtacacacaatcattgactaaagagacaaaatagggctgaatatctgggttataataataaatgtaaatgggatatactcttttattaaaaagactctaaaattcaattatgtgccatttccaggtgatacccctaaaacatagttgctcaaaaggtgaaaaaatatgtaggtaaatacatactaaataaatgcaaatacaaagaaagaaggggccgagcatggtggctccacacctgtaatctcagcactttgggaggccgaggcaggcggctcacttgaggccaggagtttgaggccagtccagccaacatggcaaaaccctgtctttactaaaaatacaaaaaattacctgggcatggtagcacatgcctatggtcccaactgattgggaggctgaggcacgagaattgcttgaacctaggaggcagagcttgcagtgagccaagaacatgccactctactccagcctgggtgacagagtgagactatgcctcataaaaaaaaaaaagtcacaatattaacattggcccaagtaaaattcaatagaaaaaaacagaagcagaacaaagaaggtaattttatttttacttttatttatttatttatttattttgagacaggtcttgcccaggctcgacttgaactcctgggctcgagtgctcctcctgcctcagtctcccaagtagctaggactataggtgcttattattggctatgtttatggatgataaaattcaaaataaagatatactgacttaagtttcttggtgatagataattatgccctaaatatatataatgtaaacatggttagaaatatagggagaaatggagagaaatccatcgaggccccaaatcttcttttcatcatttgattttcaaaaaactatgaaaggcaaaaccttttcttaagcctgaccttagctagggagtgaaactggacttgaactgttaggaggctatttatagtcttatctcactcagtgtggatatttgtgtatttcactgaagaaacatcactggatttgattatggggtcctgcctctgatctgtctgggggctttacatagaatgccctatattacttttctaaaaactagaacactctgagttttgatttatagcctgctccagtggatagggtaagcgcttgtgggcctgtgctaaagatatcttgaacatacttctctcagtctttggcctatgcaataggcaaaaaatagagtatacaacatagtcgtaactaaaataggtaaaattataattaataaacgcctttatgtgtgtgtgtttattaccttaccaattgagaatgcacattttctggctcttattgtaacagttttatgtttatataaatcacactctatgataccaaagcaataaaatcagaaatttacaacccaaccatgtggttttaaaaagcactcttctaaattaggtcaaagcagaagtaaaaactgaaattacagacatccaaatttatgggatgtggtcaaggttgaatttagagacatattaaatgctttcattattaaggaataaaaaaggagaacaaataagaacgagaacagggactctgccacagaggtggagaatttacacaattacaaagaagctgtggaagacccacggctgataaatggcttcatgtttactgggtgcctatgatgtggctactattgcctagaaaaatacaactggcaaaatttctgaattaaggaggggttgaaaacctgaaaagacaaacatccataggagaaattgaaaagttatcaaagaattgtcctccaagaaggctgaattc

SEQ ID NO: 61 - DNA, 169495 bp, Homo sapiens
  modified_base (70072)..(70171): a, c, g, t, unknown or other
  modified_base (139457)..(157244): a, c, g, t, unknown or other
gaattcattccctccgtgtccagcctcaagcccgcagttccaacactgagacctacccctctggactagagaagggaagggctctcaatagcgccctttcctcggtctgggaggggcccactcagggatggcaggaacctcattgttcctgccttggggctgcttcctttgtctggggaggcctgccggtcccgtgacctggtgaccctgccacccctccaagacccaggcacaggtggggctggagaagccacgagcctgctagccatgtccgctgttcccaactaggtgcctagccagacccctgcggtactcaccgagccatagagcttgcccttgctgctcatggccacgaagaaccggctggccacgccgaagatgctcaccacgccccgctccacgggcgagagctccagcaggcctgggggcggggcgcaggtcattgcggggcaggtgatccctggcccactccgcccctcggcttgttcgcctccggggaccctatttctggggtggggttggggataaagggccagggttcccggcgcagccgcccccaagggcctccagagcccaagctgccctctagggcctccggagcccaagcctgcgctagctcagattagcttgcctgtgtaggggacccccggcggccgcacccagtcccggaccttcagacgcgagcccgaccccagcggttccccagcctgggccaggccggggcgcgtgtctcgggccccctgtggctgcaccgcgcgccctgtgcccacgggcgaaggcgctggaattcggcgctcggagcccgagtttctgaaggcgggaggcggcgcccgacctcaggggttgcgctgggctgccggagccaagagtgtctgcgtccccagccccgcgtcagaagggaccggagcccgagtccgccccggttcccggggcccccgagcaggtgcccgccgagggtctcagagtgtgactgagcgggttggcccggcggccgttgccccccgcccccgccccttcgcgcctggccgcgccactcactgtcgcgggtgtccgcgtgcgcgccgccgatgcggccgtcggggagcgcctggaggtggaagccgatgcccacgttgcagtagagccgccgcagccgcttgatgcccagcaggtagtcgccggcgccgctctggacggccgcctccttgggctgcgctgccaccggcaggcgcgccaacgagagcgccaccaggctctcccagcggcgctccagctcggcctccagcgtgccgttgggtgcagtgggtgcggcggcgccccctcggcccgcccagggcgccagcaaggccagcaggaccgccgggagcagcgctaccgcggccgtcccgggccccgacatcccggcccgagggccgtgcgtcggtcaggcggtcagtgcgcccgggaagctggggggcagagctgcgcctgtggcgtcccgcgggagcgcacggccgacctcgggcaggagtgcgcaaccgaggaggtgcgggaggcaagcgacggggcccccgggcgccgggctctaccccggctgcatggagcggcgagccgggcggaaagcgcgcggctggagctgggactctgaggagcagtgcgcgcctccctgagcgccaggcccgcccgaggccgagccgctatatatatagcccggcgccccctcctactcgcccgctcccgcggggggccgttcgcgttctcctgggcgcccggggcgctgtggcgttcgcggctggtcgcaggccgcctgccaatcagggccgggggaagggaggaggctggggactagcgccgcgagtgccacctggagggaccccggcccccacccttggctccgcccggcccacggacctgttcgtcccgccccttggcggctcctacacttctgcttttcagccagttttgcctcttgcactttgtccctgcctgtccccgtccccgtctccctctctgctccggccgccttggcgcagccctaactcgggcatccgaagctcctagtgggcgcagaagccagcggctgctgcctgcccttcgcctttcggaggctcacgggaacttggttcctttgctggggccttgaggaccggcctgggaaggaggggtggataagagcagtaagcgacaccggggcctggctgggcaagggaggaccctttggctacaggcgggagggaggccacccccaccccctaggtcttggccccacaggcttggcgcgtttctgggctggagttctgaatacctggtggaggtccacctgagccaaagggcaaggtggcagagatgcacccagggaggcctggtcctgcaccccctacacacacacccttccgtgaaaggacaggtagcagggcatagggccagaggggatattcagcatcccctgctcctttgattccacagcagaaatatccatgtaccatagccagagccctcaatctagcagggacccaggccaggcctctggaagcctcccctctctcactcatggttctacctcccactgtgcccattatggcctgatggggactgtcctagctagatgcaggcccacctaggtgtgaaaacccctgttctttgtggtccctgaggagcctgcctggcccttcctgcaggcccgcctagccacagctgcagggggcttggtgcctaccccatctctcataccaccagcacctgtgaccagagatgtccccaggccaccgcagcctcctccacctccaccgcatccccacagggagattcctgggaccccttcagaaccctgctggggcttattcgtgcccctggaggggacctgggaggcttgagggctcttctctgaggtgcagaaaggggggcacttgggggtcatcaagtggctttggcaggaccggaacctcagctccgcaccccttgagaggatctttgttcctccttgggcctgcagcctgcttgggcagcgccacccagacctggaccttcctgggctgcagctcacagcttcgagatgcaacccggctgcctctgggtcctggggtcccccagatgagcctgcagatctggtgccaaatagacatcgttggccagggtgcagggtgcagggtgcaggggacctagaacccatccctcacttgctgtgttgtctttccatctctaggtccctgactccccatttgcaaaatgacatgggaggtgggctttcctccctcagcctggggccaaccgaacacaccctctggggaagtgagacccaggcctggagacccacctgtgccagctgacctgagcagagggactctgatgtcttcccccggcttttgataggatgaggctcctttcttcccaggactcccacagcaagctcaatttagggcttcccaaggacccctccctgtctctcctatttgctgtgagttcagcaaaggacgctgcaggcagctgatatatctcccagaactgcaggcccacccacacaggataggtgcttgtggtgactggggactgacagccagcagggcttttgggagctgggaattcccagcagaactgatctggaatctggcttccactttgctccgggtgctccctgagcacactctcaacctccgcaggccctggcctcctcagctgtgcaatggaggcaacaaaagcacaggtaaggaagaattgcggatgaaggatgcaccaggaagcactcacttatctgcatctgacccctttccgtgcccctggcccttgacctggcttcccacctgcttcctttctgctcctgtgttcccgccatgctgaccgcgtcatctctccccttcccactggatgacccccggccccagatcttcctgccaatgacttatcccattcaggtttgcctgaatggagaagccactccattggagtagccactcggggatgccttctggatcccctgcccagtccttctggttggagcttctttgagctcttaagagaaccttctgcacttgttagctgaccctccaccgcatttagattgtcatctccatggagcaagcccggatttgtgttgttgccagttgtacctccagtgctgggcacatagtaggtgctcaatagctgtttgtgagtaaatggctggctaggtacactaggagctcatccatcagcaatcctcactgcaagctgccctgcccaatctgccactgtgccccggggcagacaaacagaggtacctgcaaaggcctcaggcagagctgcccctatgggaaggtctgcattgcctttttttttctttatgtgaaagaaatagttggaccaaggtgactaaatcttttccagatctggttacttctcagcagagagacaaggggacctatatataattttttttttttttttgagatagtatcttgctccattgcccaggctaaagtgcagtggctctatcatagctctacagcctcaaacttccaggcttaagcaatcctccagcctcagtctcctgagtagctgggactacacactcagctaattttttgttttcttttttagtagagacgaggtctcgctgtattgcccgggctggactcaaacttttgacctcaagcaatcctcccgcctcagcctcccaaagtgctgggattacaggcatgagccactgcacctggccaggtgatctagaaacaggaccctcacttagcttggacccaaagcccttctgccatgctttaccccaggacgcccgctttgccaagtcctggggttcgaggaaggcttggggccatgttgggcttccggttgggttcaagtttaggctgtctccctgttagttgtataaccttacgctatttcacttcttagcattctcagtttccccatctgtaaaatgggcatgagctgatgtcggccttagcaagacagtgcctgacctcaggaagaggctgagcaaagtgagctgtttagactgcaagccccttgggggtggttcaaactgggtctgattaacagtaaatgctgggaatttgtgaaataaacaaagccatgtcattatcgggtggaagtctccctgtacgtcatcagccactggaggggtaataaattgagggagaggagcaaaggcccagaaagcctcctaacagtgacctttttcgacctccaaaaaaaaaaaaacaacaatgtaggatcttcatgtgaatggtcccgtctcccgtgaaggagtgaagaggcttctcagagccaccagctcaggtgttagctgttaagaacttacttggcttaatagtaataataataaaaaagaaagtgctgcataatagtccacttatagtcctcagggcaaaatgactgagctcagcccggggcaagggcccaggctgtgtaaactttgtaaatagctcaactgctttctcaattcaacttccctttcttggcttcagcaagacaccctcacaatgatgtctttctgcaaaagtccaggaggatgataaggccggtgggatagactggtctacactgagccgaagcaccccaaagcaagtggcatgtttttctttaggaccttcagaataaggggagattgagccaatttttttttttagctttttaaaaaatggtgttaattgggtgcggtggctcacccctgtaatcccagcactttgggaggccgaggcaggcagatcacttgaggtcaggagttcgagaccagcctggccaacattgtgaaaccccatttctactaaaaatacaaaattagctgggcgtagtggtgcatgcctgtaatcccagctactcaggaggctgaggcaggagaatcgcttgaacctgggaggtggaggttgcagtgagctgagatcgcgccagtgcactccagcctgggcgctacagagcgagtctccgtctcaaaaaagaaaaaaaaaggtggtaaaatatacatgatacataacataaaattgatgttaacctattttttttttgaggtggagtcttgctctgtcacccaggctggagtgcagtggcgcgatcgtggctcactgcaagctccgcctcccaggttcacgccattctcctgcctcagcctcctgagtagctgggactacaagcgcccgccaccacgcccggctaattttttttttttttttgtatttttagtagagatggggttttaccgtgttagccaggatggtctcggtctcctgacctcgtgatccacccacctcggcctcccaaagtgctaggattacaggcatgagccaccgtgtctggcctgatgttaactattttttaaaagacttttttcagagcagttttaagttcacagcaaaatggagaggaaggtacagagagttcccttacaccctctgtccccacacactcacagcctctctcattttagccattgttaagtgcacgggtaagtggcattaaggacactcacattctagtgcaaccatcaccaccatccatctccagatggttttcatcttcccaaactgaaactccctgcccattaaacacttgctccccattcggctcccccagccccggcacccaccatcttcgctttctgtgtctacgaatttgactacttagggacctcatgagtggaatcacacaatgtttgtcctttttgtatctggctgatttcacttagcataacatcatcaagattcatccacgatgtagcatgtgtgggagtttgctttctttttttcttttttagaggctgaataatattccaggtatggatgggccacgttttatttatttacttatctgtcagcggtccctgagctgctcccaccttttggctactgtggacgatgctgctgtgaacctcggtgtgcaaatatctgtttgagttcctgctttcatttcttgtgggaatatgcccagaaatggaattgctggatgaggtgataattctatgtttaagtttttgagaaactgccatactgttttccatgtttttttttttgttgttgtttgtttgtttgttttttgttgttgttgttgttgttttcaagttaccttgatcctggggcattaaagagacagcaggtcactccttggcttatagcgatgtcttacccagttctgcgtccaggagagtttcccctctcccgttattctgccctgtttctcttctactctgaaggtggcccagccaggtctgggcgacaggctttgggggcggtttcaatgactgcgaatcaataaaaccacctgcctccctgtgcacacgcgtgcagatcttttgcacatatcagatactcaaccctgggaagatggaagacaagccatgcctcagtttcctcatctgtaaaatgtggaaaatcagcgttctcacctcagagggcttctggaatagttacatgagagaatgtgcgttcagcccttagaacgggcaggcacacggtgatgtgtgcccacagccatcgctggctgagtggtgtgactacccagcttgagtgcagggctagggagccaggtcctggcgtctctcaccactgagggaatgtgggtgatttgctgagcctctcaggacccgatgtctgccttcattgcttgctagggaattagaagaattagacatgtaaagtgcccggtgtcttatccacgggctgtgagctggcaggatcgccagtacctctccagataaaagtcatcgctgccacgttcattaggtgctggcaggagcgggtttggtgcagggtggggctgctttgcaaggctgatcgtcttttcttctcacccagccctgcagggtgtggccctgctggtcatcaccattttacagaagaattaacccagactcaaagcctctgagcagctcactcaaggtcatggaactagcaaagagctaagccaaaactcaaactcctgctgtgtacgccaaagtcaggcccctgaccatgctgctgtctgcctcagtttcccctgcagcaaaatggagctggtggtctggaccttgtctgcctcagagggatgtcaggggctcaaactgtgcaggtgaactcttctgtcagcatcagagtggggcttaagctccatgaattgatatcataaccccagttgatttgttcatttggaggatcacaaaacagaccaccaagcctccaactcccggcagtctctttaatatttcaaataaaaaatggtcagagccagaagggactcacctaagggctgctaaagtgacccattccttgcacagaagccagtggaaggccaagaaggaaagggctcctccatgttacctaaggacccacctttcccgctcaggggtctggcaccccgtcagctgagtgagcctttatggagtgcctgctcaggagagtcatgggatctagggacagggtcatttcagccgagacctaaagaaagggtgagtaggagccagccaaggtggaagagtgggagcttcaggaagccagtgtgtggaagctgggtgggtgcatgaggtcagagggatgggcaggactttgtggacccaggaagggtttcagctccctttgaggggtgctgaaagccagggtgccatgggctcagctcaccccatggggcatgccagggaatccttgaggtcacaaccttccccagcagaaggagcaccccacaggcctggtgggctgaccctcagggtggtggggttgtgcctcctccccacttgcttcttcccttccctcctcctcagggtctcccagcaacatggaagagaagcccactttcctccctgacaccaccactgggcatgggattccacctgtctccatgagagaagatgggaaataccagtggggaagcagagaggctccccattctccagatttcagaccacaggcccctcaagggaagcatcctggtagggaggaggtggaagaaaagttctattcaaagtcagtcttggcaactgtaccctccctcccccctccctctccctggatggactcgaggcctggggaaggcctgaccacccggccctggctgtgtgagacatccatgcctcaggcgggttccttctctttccccctgtctccctccaggacagcaaagccaggttccatcccaccccctggaagaggtgttgcctgaggactagatctaggggggaccctaagaaaggtgtctatggtggcacctggatgggaacattctggagtcttgccattgggattgagagggatgctcaagtgatcataggacaaaaactagaatgaagctttggggcccaccctcccctatcagggaggagtcccttgttcacacagaagtcacgtctcctttgctctcgggtagttctgaacttggtgttataacatgtgggtttgtaaatctggatcactgaaggcaggatgcacccaccccttcactcaaatttggatttagattgaccttggtctgaaaagcattacttgattcttgggacatatgtgtgtttctttgtccaagaagataggagatcagatgagaggacttcagcagggacaagggctcagagggataaggataatctctggtacattttaactatgaatgatttaaaatactcttactcttttttgttgttcttgttcttggttttttttttttttttcttttgagacagggtcccactctgttacaggctggagtgcagtgaggcaatcatcgctcactgaagcctcaaactcctgggctcaagggttcctcccacctcagtctcccaagcagctggggctgcaggtgcacgccaccatgcctggctaatttctttttgttttttgtagagatggtgtctcactgtgttgcccaggctagcgtggaactcctggatacaagcgatcctccacctcgtcttcccaaagtgctgggattacaggcatgagtcactgcgctgggccttctgttacttctaattaatttattaattgacttttgggggagacacagttttactgtgcccccccaggctggagtgcagggctgtgatcttggctcactgcaacctccgcctttcagattcaagcaattctcctgcctcagcctcctgagtggctgggatcacaggtgtgcaccaccacgtctggctaatttttgtacttttagtagagagagggtttcgccatgttggtcaggcttgtctcgaactcctggcctcaagtgatccacccgccttggcctcccaaaatgttgggattactggcgtaagccaccacgcccagcctcttctgttacttttaaaaatgtgtccagtggagtctataacaataccagtttgacagctgccatcttttattttagaaaaaatacatgaataagctttactccagcagacaaatattataaaccctcacccattatctttgtattttaacctcgaaagtctttcattgatcattttattattattcttttttttttcttttttctttttgagatggagttttgctctgtggcctaggctggagtgcagtggcacgatctcggctcactgcaacctctggcttccaggttcaagtgattctcctgcctcagcctcccgagtaactgggattacagacttgcaccaacacgcggggctaatttttgtatttttagtagagatggggtttcaccatgttggccaggctgatctcgaacttctgacctcaagtgatccacccgcctcggcctcccaaagtgctgggactacaggcgtgagccacagcacctggctgttcactctatcattattcactgcaataaatgaaatatttaaaaaactaatttcctaggctgggcgcagtggctcatgcctgtaatcccagcactttgggaggccaaggcaggcagattgcctgaggtcaggagttcaagaccagcctggccaacatggtgaaaccctgtctctactaaaaatataaaaattagccagtcatggtggtgtgcccctgtaatcccagctactcagaggctgaggcaggagaatcgcttgaacccaggaggcggaggttgcagtgagccgagatcgcaccactgcactccagcttgggtgacagagcgagacttaatctcaaaacaaacaaacaaacaaatgaatttcttatgactgttagcattaaatggttttgttctggattttactttaaacaacttttactaatacatagttaatcaaaatgccatgaatgtaatatcacataattgataagtaaagagcacaaataaaattctggtagaaatgaatcttttttttttttcctgagatggagtctcactgtcgcccaggatggagtgcagtggtgcgatctcggctcactgcaagctctgcctcccaggttcacgccattctcctgcctcagcctcccgaggagctgggactacaagcacccgccaccacacctggctaatttttcgtatttttagtagagacggggtttcaccatgttagccaggatgtcttgatctcctgacctcgtgatccgcctgcctcggcctcccaaagtgctgggattacaggcgtgagccaccgcacctggccgaaatgaatcttttaatgtgacctaggacagggctttaaaaaaaaatttcatatgaccactacttattgctagaataatatggcgtttggcctcaatttcattcccattttctatttctgttgatggcaaagccaagaagccttgtcctcaggtggaagacacagaattgaagtttcgttatggtgatgtcactcaaggatttgaacactcgccaaggtatacactcaatcacctggtttatataaaaaatggtgtctcctgcttgatctgctgacaccatcaacagctctttttttttttttttaattctttgagacagggtctccctccgaacccaggctggagtacggtggcacaatctcccctcacttcagcctcaacttccctggctcaagcaatcctcccacctcagcctcccaagaagctgggactataggcatgtgccactatgcccagctaaattttttttgtttttggtagagttgggatctcactgtgttgcccaggctggtcggcagctcctctcttaattccttgatagcaaagactcaccagtcattggagctgcactttctcaacttcgggaaattttatccaaaggttttatttgtttgtttgcttgtttgtttgctttgagacagagtctcactctgtcacccaggctggagtgcagtggtgcaatctcagctcactgcaacctctgccgcccaggttcaagggattctcctgcctcagcctcccaagtagctgggattacaggcacctgcaaccctgcacagctaatttttgtagttttatagagatagggtttcaccatcttggccaggccagtctcgaaatcctgaccttgtgatccaccagcctcggactcccaaaatgctgggattacaggcgtgagccaccatgcccagcccaaaggtcttttttgccaagaacaattaattataccagttacttttttacttggaggagacttattaaacctgatataatgaaaatggggaagactgggaatgaaactgttgctaatttcaacatggcttcgccagtactatagtgatacaaagcttccaatgcattgcgggtttatatctatttctttccgaaccttgcagctgcagacacaacctaggcaacacttagacagctttccccgtatagccacagaatcagtaaagccagttttctcagtgacagccatgtgccacttaccattggaagacctcggattgtattttccaattcaaacaagtgagttaatctgcgtctccagagtataccccctgcttctgatttctgactctatgaagtaggaggagatgcagacatgaagagaaaaggccagatccctgcctggagctgggcacctggcgacttctaggctcaccaggatttttgcctcctttcctgggcctctctctccaaactgtggccttgagaccacaagtagcccaggacggctttgaatgtggcccaacacaaattcataaactttcttaaaacattttgagattatctttttgcaatttttttttttttttagtttatcagttatcattgttgttagtgcatttgatgtgtggcccaagccaattcttcttccagtgtggcccagggaatccaaaagattggacacccagccgggattggtggctcacgtctgtaatcccagcactttgggaggtgggcggatcacctgaggtcaggagttcgaaactagcctgggcaacatggtgaaaccctgtctttactaaaaatacaaaacttagctgggtgtggtggcaagtgcctgtaatcccagttactcaggaggctgaggcagggagaatcgcttgaacccaggaagcagaggtttcagtgagctgagatcgtgccattgcactccagcctgggcgacaagaacgaaactctgtctcgaaaaataaataaataggctcacacctgtaatcccagcactttgggaggcccaggcaggcggaacacctgaggtctggagttcaaggacagcctgaccaacatggagaaacccagtctttattgaaaatacaaaattagccgggggtgatggcacatgcctgtaatcccaagtactcggcaggctgaggcaggagaatcgcttgaacccgggaggcggaggttgcagtgagctgagatcacgccattgcactccggccagggcaaaaagagcaaaacttcatctcaaaaataaacaaacaagtaaataaataaataaagttaaaaaaaaagattggacatctctgctctaatgcatctttgtcaagggcatgggtttgggaggcacaggtcactgaaagaaataggcaggtccctggccctccactcccaaggcatctgttaggagctctccagggcaggccaaatgggtggccacttctgccgccaccctgcaccctccctgggctgcttccaggcctgagagagctggaaggagtgtcggctcctggtccacattgcagctttgtttggtgccctgaggctctagcacctaaggagcactcctttcttttgtaaagtgggagaaagagcctgtgaaagggaaggtggggaaagggaaccgtggctgggtgctctgttcctcccattcaccaggcaggaggaagtgggggctccagctgcgggtgtggccttgggatggagcagagactctttggagaactattccttcccctatgtgcccatcagacctcagctcaaccttgacctttctgggaagctttgcctgacttctcaagtccagtcgcctatcacaaggtgatcacaggacagtccaaactgggccttttcagaaagaaaggaagtgcccctcactattaccctgggacgaggggtgcacccctgcacagttccaggcaagcaggactggggccacctgacctgttccactctcaccaccacgcaccctgagcccgagagcagcctgcatggccagctcatgctctcggagcgcaccaggagggctcggggaactcacctgtgcctggacacctgcagcactagggcctcgattcacccagtgatcagctgtgcatgaaaaggctgatgttctgtctccgaggctggtggcgtaaaggactgcatttgaccctgaggggcccacaggatggggcggatagcagcaggatccagcaatgctgggtagagggcgagggtgcagggaagacggcccagtccttggacacatgccccccatcagcctgccagtgggagccccgtttcccattcactcacgaaccccaagaggtgggcggggatgatccatctcagttcaccagtaaagaaactgaggcccagagaggaggtgacttccccaagcatacgtgacaggtaccaagtggtgtcttaaagtcagcgtgggcaaaggaagacctcactgagtcagtgtcctggaaaattccttccagaagccaattcccagcaggtcccagaggcattttgccctccagggttggctatttttctggatgggatgaagcaggcagcttgcccttagggaccacgctggataaaaagtactctctgcactgtgcactcatctattgtggggaggccaagctgagccctgcctggtggagtaagggctccctcaccccctctcctatccccgctccagggctcagggaacagcagggggagtcactcgtgttagtaaattattatttccccacctgccatggtcatcatgattgctgccgttgcatggggggagttcacgggttcattgcagcctccaaggcctgtaaggaccgcctggctctccctcactctgggtgagaccttgggcagattctgaccctcagtcttctcatttgtgggaaatcttagcactcactcacatcttagggcagtgaggtggcggctgatgttaggtgaactcacgcctaaaagagcaggcatctattctggtctgctctcccaagccagtcctgcctctctccatcagcctgcggggcttcccgcctctttgaggccagggatgcagggtcctcgcaggcagccaagggccattcctgggcctccggcctcagtgacaagaggcttttttctgcctctgccgcctgctccctgacatcccacgcgcctgcctctaagcctgagatgcggcttctaagccggggcagacccagcctgctattctggggtcttctttcaactattttggcgaagaccaaatggcagcctcctttaaaatagctgctgcaggcccaggggtcgttccctgagaaccaggtcaggccaggcccgcacttcttcctagcagcccattcaagttaaatacggcccctggcatctgcagcttcgaggagggctcagctgaaattccgacgggcaaacacggggcggacaccaaaataaaacctggctggccctccgaggtgcctgtggcttctcagtttcacagacgtgcttacgtttttcatgaaatcacagggctagtcgcaggaggtggtgggagtgcctaagtcaatgaggagcagtggccagtcccccggccccacggtgggtcactccatgaagtctacttggaaatgtgggaacccaggagcccctcactgcagccgaattctctgggaggctgcagctcccggataaatgagttcacctccccttgatttccaggaccagatggctgctggctttgctcacctaaattggggtgggcggggggggtcctttaatagaatatacacataataactgaggaaactttttttttttttttgagatggagtgttgatcttgttgcccaagctggactgcaatggcacaatctcggctcactgcaacctccacctcccggattcaagcgattctcctgcctcagcctccctagtagctgggattacaggcatctgccatcacacccggctaattttttgtatttttagtagaaaaggggtttcaccatgttagccagtctggtctcgaactcctgacctcaggtgatccgccagtctcagcctcccaaagtgctaggatgacaggcgtgagctgccgcactcagctggaggaaacttttttgaaaaaaagcaagcagagccgggtgtggtggctcacgcctgtcatccccacgctttgggaggccaaggtgggcagattacttgacgtcaggagttcgagaccagcctgaccaacatagtgaaaccctgtctctactaaaaatacaagaattagctgagcatggtggcatgcgcctgtggtcccagttatttgggaggctgagggcacgagaatcacttgaaccctagaggtggaggttgctgtgagccgagatcacactgcggcattccagcgtgggcaatagagtaagaatccgtctaaaaacaaaaaaaaagcgagcagaaaggactcccatggataaagtgatgccacttcaaattctactaaagagatggcaccatggtccaaagatagcatattgccaagtgactcaggtgtgtgtccttactgcctggaagatgaagtgcttaggtggttttactgtcttacgcctcgctctgggctgcccccctccacattcccaccttgggaagccagtctctggacaagtgctcctcaatgcctcgggtgggtcccagcatcaggacgacaataagtggcagccatgaaccctccagagcgatgggagcggaagcctagtgggtgtgtgaggcctaggagccagcctggagtgggaacacgccaacctgcaaagccactctgggtctgtgagctcgagactgcgtcgcctccctctcttactggccttgtgatggcatcaggtctagagtctagggagtaccttgcccactttgaatcctggcgagtcattcaacaaatgttggctgtacttctgtggatgcaagtttggctccaggcagtgtggacaaagcagaaatgccaccatgtccaccgtggggaagctgacatcccaggggagaagcagacacagagctaggaattacctgtagggtgaggattaagaaagaggaagagagggctctacaggtagggtctgaaggagaccagtagccactgacctagtctaagggccagggaggtgtcctccaagaagtggcatctggtggacctacagccgggcttgagcggtgacagtgcttccaggcaggaagcacagcatgggcaaaggcctagaggagacacgagcagccttgcttagggaagcccaggcagcagccttgggagctgaatccaagaggctgcgagctagcagggctttaaaaagcctggctcggctggccttgggttggggcccagtcagctttgtgtcaaaagcagagatttctggttgctgcaaacacctcccaggcgaggcagaggcatgagtcgctagcaaaaattctccttgaaactagtcactggtgccaagaaatagagaatcacgttgcacatcaaccagaaagacagcggagacccgggtacagtgagccacagggaagtgaacctggtagttcagggcaaaagccattttaagaggctcacaaacaacctgggagcaggatctggacgcgcttgtgaatttctcctctcatcttttcctgtagtcccacccatcccagttggccggcatgactttttggtaactcattttcacagaatctttccaaagcagacaacgtttccatgagaacatcatctctctcttggaggttcgtatttcatcagtgagttttaggattcattgaatttcctcgttgctgttacaagtagagtgggcccgggccgaattgggaacaaatcagaccgactgctgctggcccaggaatgagtgtgagcatctgggccctggcctttagtggccaaggacgtgggccagcacgtcagcaggagtgagggtcactagcctggtgagtctgtgtggcggaagtcagtggaacctcggttgactggctgaggccacgccgggtgctgtacacacattgtgagctggcttgctgcatttttagaagcaaacacatggcctccttggtgggagacctctgaggggctccactttgctcatcgcttgctgtgtgaccataggcaagttacccaccttctctgagcctcacttcctcctacccttgcagtgaggcctcaacaagaatgtggacaagggaggcagggtcctgtgcatgggctggtggcatggtctgatctctatctacctggcaccttttggagccggtgggcatttgcaggcagcaggtcctgccctgggtcacagcagagggggccccccaggacccatggtggtccctcttcagcacagacgcatgtgctttggattgggggtaagcacgctctttgatatcctctgtcttgcccccggcccctaattgtgcaactctgcttcccaggacccagggcctgggtggaggcgggagggacctaggacagccatcaggtcagcctgttgtcaggggtgcgggggccagagccagaggatgtttggtttctcacgagccattgtagtcccaggggaggggctgttgggctctggggatgtggacacgccagaagcagtgaccgtggcactccgaaggggcccagactctgtccatcttgatcacccaggccaggaatgtggtggcagaaaggccgtcgagatgaaggccctgataggtcctggggcgggggcaggggatcttcctcttacaaaggatgtgggtcacggtgagtggtcttgccacaatgtgggaggacaagcaactcgaggtggctcctgagagatggtcctgaggcaatccgatcctgttgctgcctccttcaccctccgtggctccccagtgctggataagaaggtctgatgggtttggctggactctggctgcctctgcatagttccccacccaccacgaccatctggccacactgcactcctcagattccatttcttctctgcaccccctgcaaaggctgtccccaccttctctgatgccaccatttcaaaggcatctcatctttgaaaagctgcctggctctcgtcctccagggcccagcagggccacccccatcagcaccacccccatcagcgctctactccagcaggtgataactgctggtccatggtctgcttctcccatgacatcccaactcttcagtgtagggcctgtctggcatagccaagccctccataaatgtttatttgctgaattgacagctggatgaatgaatcatcctgcaaatacaactttttcccacttaataaatatattctaccattttcccacaatattagatgatctttgtaaacattgtgacttctgtcaagagagcggatataataggccatggcttatttaaccacactgctctgtttctaatattagatgatttccgagtttatttctattataaacaatgctgtgatgaacatctttgtgtgtaagtttgtttttctgtattttggatgtgattttctgaagcagaatctctggatttgggggctataaatttaaagtcctcaaaagtaaacaataatgtgttttatatttcaaagtagctagaagaggggacttgaaatgtttcttttttttttttttttttgagagagagtttcacttttgccacccaggctggagtgcaatggtgagatctcagctcactgcaacctccgcctcccaggttcaagcgattctcctgcctcagcttcccaagtagctgggattacaggcgcctgccaccacgcccagctaatttttgtatttttagtagagacggggtttcgctacattggccaggctggtctcgaactcctgacctcaggtgatccgcttgcctcggcctcccaaagtgctggaattacaggcgtgagccaccgcgcctggccgaaatgtttctaacacatagaaatgaccagtactcaaggtggtcagcaccccaaacaccctgacctgagcatcacgtgttctatgcacagggccaggcacagtggctcatgcctgtaatcccagcagatgggaggtggaggcaggaggatcacgagctcaagatttcaacaccagcctggacaacatagtgagaccttgtctctatagaaaaaaaaaattagctgggcatggtagcacactcctgtggtcccagctactcaggaggctgagagagaaggatcacttgagcccaggagtttgaggcctcagtgagctatgattacaccaatgcactccagcctgtgtgacagagcaagaccctgtctcaaaacacacacccacattctcacacacaggtgtgtgccacaaaaaaacccacaaacacatcctatgcatataacaaaatatcacatgtaccccataaatagtaaaatattatgtatcaatttaaaagtgtcagctgatgctgtttggagcacacaggaggctgcctgtttaaccaatcctcaccagcattggatacattttatgtgtgtgtgtgtgtttttcctactttgttttgtctttattaattggcaagcaggcaatgatacttaacttttagtttttaataagttttaataaacatttattttaggccaggtgtggtggctcacacctgtaatcccagcactctgggaggccgaggtgagcggatcaggaggtcaggagatcgagaccatcctagccaacatggtgaaaccccatctctactaaaaatacaaaaagtagctgggtgtggtggtgcgtgcctgtaatcccagctactcaggaggctgatgcagaagaatcgcttgaaccggggagtcagaggttgcagtgagctgagatcacaccattgcactccagcctgggcaacagagcgagactccgtctcaaaaacaaaacaaaacaaaacaaaaacatctattttagaataattttagatttctagaaaagttacaaagacagtgcagagttcctgtatatcccatgctgagtgtcccattattaacaccttgtgttagtgtggtgcacttattataattaatgaaccaatattgatccatcattattaactaaagtccatgctttacacagagcgcctcagtttttccttaatgtcctctttctattccaggatccagccaggacaccaatcgcgtgtagctctctcatcttcatgggctcttcttggctgtgacagtttatcggacttgcctggcttggatgacagctttctttctttctttctttctttctttctttctttctttctttctttctttctttctttctttctttctttctttctttttctctttctttttttccttccttccttccttttttccttccttccttccttctttctttctttcttctttcttttggagatgggggtttcactctgtcacccaggctggagtgcagtggtgcgatctcagctcactgcagccttgaactcccgggctgaagcaatcctttcacctcagcctccagagtaggtgggattacagacatgcaccaccacgccctgccaatttttaatttttaaattttctgtagagatgggtcctctccatgttgtccaggctggatggcaggtttgttttgtttgtttgttttttgtttttttgagacagtgtctcattctgtcacccaggctggaatgcagtggcgtgatctcggctcactgcaacctccacctcctgggtttaagtcatcttctcgcctcagcctcccgagtagctgggattacaggcatgtgccaccatgcccagctaattgttgtatttttagtagagatgaaattttgctgtgatggccaggctgatctcgaactcctgacctcaagggatccgcccacctcagcctcctaaagtgctgggattacaggcgtaagctactgcgcccagcctggatggcagttttgagacagtacttggtttccgttcctgcgctgaaggtaactgtggggctgaatgcggctccatgagttgctttgatgttcgggttttctcctccgtgtccctttatctcctgggggtcttggtagctttcctagaaatgtgagcggctgtagaggttgtcaacatgagccctttcctgtcctgagcagctcacacagttcatgccggtctgtggtcctttcactttgggcctgtcacctgtcactccacggtacttgctgatgacctttccaggagacgggtgctggcggtctcgtgggccaagccctggggatatttctattccttggttctgtgggagtcagggagggcctgaggggagcagggagtggaggaaccttgaggcagggaggtagtagctgcaggagcatctcagacaaacccattgagagcagcgagggcctctttttcagggtgggccacaagcaagatcccaacgaaaagtagcgtggcttctgtacctgcccatagagccacagccccagagttagcccctgactacactcagaacaaaatgcagagtgcctggctcagccctgcaaaggctgccctgcctgcctccgtcatcccagcccctctgcaggtccgaggcagcctccctgctggcctggctgcccagggcctgggctagaactcctgcgccccagggcctttgcaaatgacggacaccctccctgcagggaggctccttcttgccactggggtcttcgcttgatgtcacctctctaggcaggttttcctggtcaaattgccacctgtctcccctgctgtgtccctcttgtctgctcaggttttagacatgtagacatgtgacacactcgccaccacctggagtggctctgttttttttttttttgtttttttggttttttttgaggtggagtcttgctctgtcccccaggccggagtgcagtggcgcgatctcggctcactgcaagctccgcctcccaggttcacgccattctcctgcctcagcctcccgagtagctaggactactggcgcccgccaccgcgcccggctaattttttatatttgtagtagagacggggtttcaccgtgttagccaggatggtctcgatctcctgacgtcgtgatccgcccgcctcggcctcccaaagtgctgggattacaggcgtgagccacggcgccaggctggctctttgttgcttacattgtgtgagtgcctcactggtgtcagccgcacagacccaagggccggcccatcccacgtcctctccctgcaggggccggtgccaggctggcacagagatgaggtcagtgagcagagaaggacgctgggccggaagagtggatggcaccatgcaggtcttcctcaagatcagtgggatagcaccatctgctgctggaggcagccgcgctgcgtggccactgcccggctccatcctcatggacaggggagctgcggatggggtggggcatggaagggtggcctggagctgggccatgtcactccccaaggaccagggggtcacactccccttggaccaggactcaagtcctagcttcatccctactcagcagcctctcctgcaggacccagctatcagggtggccggctctccgagaggcccacctggtcggtctagagtagacaccagaccaggggttgctgccaatgtcctgcctgcacagagaccctaagaccttctcacctgagtctctcacactgccagctctgcaatgctccgtatgaggggtgtggggctgggaggggcaccgcccattttatgggaggaacgaggctcacaagggcaaagcactgtcccgctcatgaaaaggtaagagccaggttggaaactgggtctgtctgactgttcgacagctgctttaaccatggagactaagtgctgtgtgacctggggcagatggcttcacctctctgagctgttccctcattggtaaaatggggatgatagtgactgcacacatctcctgggataatcctgaggcctgagtgagagagcacacttccaggacccagtgaggcaagcgtcacatcacactgtggcttttagctctggcctgcgggactaggaccgtgctcctcatccagtgctctcccccctctacccaacccctcctgggtcatgacaaggctgcccctgggggaactgcatccctaagatcatggagggaagctgatttctgaaaggctgatccctgtctttgttcaggcataggaatccagggcctcagctctgggccccaaaacccgatcaccatccctgtggggtctccaggtgggtggagcatagctggcacctggccagcagggtttagagtctcacacctgtgccgggctgggtttgaagtcatgctctggggaaggagaactgcccggtcccctctgccagggagaagctgcatggctggagccgaagtctacacagggcctggctcagatgaaagtcctgccatgtgcccggtgagggcccctggatgagcctccttaaccgagtgccccaggaaaggctactagagatcagacctccaggaaggcggcagatcagcaacacattgcacccactgtgcctgccaacactatgggaggagctgagggcccaggcagggggactgagcactagcattcgggcgtcgaccaccacttccagtatccagggctgggttagcttggccaagcatgtgtggcccgagcacagagcctggtgcacagctactctcagagactgctagccctacaggcttccctcaccctcaggactgtggttctttttttttattattatttgagacggagtttcgctcttgttgtccaggctggagtgtaatggtgtgatctcagctcactgcaacctccgcttcccaggttcaagcgattctcctgcctcagcctcccaagtagctaggattacaggtgcttgccgctgctcctggccaattttttgtatttttagtagagacagggttttaccatgttgaccaggctggtctcaaactcctgacctcgggtgatccacctgccttggcctcccaaagtgctgggattataggtgtgagccactgcgccaggtcagggctgtgcttctgagggagatgctggcctggccaatgccccttacatggccccaccctggggggaggttgggagtgacaggtgagggcaccagcccaaaaaacctgccgccacccagggaggagcctctgatgacagccactcagtgtcatgctggaaaagcctctggcggaggccaaaaggcttgggctggggaagctctcatggctgggcctggagtgggaccagcagcagtctgacctccagcaggtggtctctggctgaactggcagtaaataacatcactcccacagtggggtcggaggacatccaattcaccaagcattctcctgtattcttgatatttgaagaagctgccagcaaaaaaacaaacaaaaatgaaacaaacaaaaaaaccacttgacagccccgggaggcacacaggtgggtggatgaggaattgtgatgccccctctaaggagagctgtggcactgacagtatcccttttctcttttctcctcaggaatagaagccctgcgttttgtctggcactggctgtctggagtaaaaactacatttcccagacttccctgcagcttggagtggccatgtgactgaaggctggccaatggaaggtatgcaacagtagtgggtgtggcttctaggagatgacgttggaggaaggaaaccaacccatcgtttttgctactgctgagtggaatgtgggtgggatagctggagcctaagcagccattttgtaccatgaagtcaaagctacatgacacatatgaaggaaaaagatggagggacctgggtccttgatgaatctgagcaacctcatcaccctggacttcctttacatgagaaacaccagtttttatcttgttcagggtgcatgtatcttaagtttgctggcctgcatagctaggctgaattccactataactcatagagggaaaacagatactctgggaggttcaactgggaccaagacaaactgtggactcaaacccactgggttctgaaagcaagcctttcctgtgcaccttgaggtgggctgcaggtcgggtgagcattgagaggacccaccctgctgctgtggggtccgggatgccccagatgaggccttggcgagcctcaagcggaccgtgaccctccactcccactctggcctgtctttctcatacacaaggcctgaggtgtccccagacagtgatgcccatatttcagtggcaatgccttccccggaacccccactctgtagagaatgtgtgtatgttgggggtgacagtcactatgcctggtgcacagtggcctctcagacccagcctcctgtctaagctcatctctcccagctagggacttcaggctttacccctgggcctcagtctcccgacctgtaaaatgggaatcataatggccatccttgcagggtcactgggtgaattcagtggatgatgggtgaaaagcacccagccattgcagagcactttgtacgctaactcagtcggcattagcaacccatggggatgcccctttaaatcgggggttcctaaattctagggcatccaaactacctggagggcttgaaacacactgattactgggcatcatcatcagggttctggttcagcagatctggggtggggcctgaaatgcaaatttcaagaaccactggtttaaatcaagaaccctaagacaagccgagcgcagtggttcacgcctgtaatcccagcactttgggatgccgaggcgggtggatgacttgaagtcaggagttcgagaccagcctggacaacatggcgaaaccccgtctctaccatgggcctgtaatcccagctactcgggaggctgaggcatgagaatcgcttgaacccaggaggcggaggctgcagtgaagtgagatggtgccactgcactccagcctgagtgacagtctcgctctatgtctcacacacacacacacacacacacacacacacacacacacacacaccctaagacgaaaaacatggaatcaaggaatcaagatcccgttaagaccacctgggcccaagaccagccgggcagctgggtttgaatttggctccagttcttggaagctgtgtggcctcgggaaagcctttcttctctgactcacctatcatatggggagaattagaactcaactcagagagctgaggtggagtcaaagcaacatggcgccaggtgggaaaggcacccactaaatgctccccttctccctctccccccaacattgtcatcatcatcatcatcatcattttgtatagctctgctgtccatccttcctccagtggcaaggatgagcgcctgctgcataccctacccaggccccaggcccactgcctcctcttccgtgccaagcctggcccttgtgcctggggagggggccctctgccttccgtgtgccattggggcatgccgggatgcccaggcacggtctgtcctgactcctccctgaccgcctgaccagggtgaatcagcagtcgccacaagcatgtcaccggcagagaggcgccattgcccaccaggtggaaagatggatgaatggaaagacccggcgaggtgtcctcagccaactctgctacacctgaagcttgtccctgaggtcgctgccatctgctggtaggcctcagtactgcatgcaggggtgccctcccagaccacctgggaccacccagcccccacctcctataccccaaattgtccccaagggtggggagggcctgcccaaccccattctcctagaaagacctgcagaccacgtggctgtgccagcagattcattgaggtatcattcatatgtgatatcattcacataccatacaatccacctgtttaaggagtacaattcattatttgtattcacagtgtgatggtgaccatcaccaccatctattccagaacattttcatcatcccaaaagaaaccccataccaatgagcagtctctccactttccccatcagcccctggaagccactaatctacttcccatctctatgggtttgcctattctggacatttcataggaatggaatcgtaagtgtgtccctttggtctggcttccttcacttagcacctggccctccaagttcatgccttgagggggtgtaagacgtttcagcacttcattccttttgtctgtgaacaccgtttcatcctaggccatagcactgtatacatatagcatcgtatatgctatctacagtagacagtggatacgttgtatttatccattaatcacttggtgggcatttgggttgttgccacgcattggctatgatgaataatgctgctagaaacattagtatacgggtttttgtgtggacgtgagtttgcacttctctggggcatatacctaggagtggaattgctgggtcatgtgtaactctctgttctgcagtttcagaactgccacactattttcccacttctcacttcttggcgacttcctgttcttgctcccctccttgggctccatgtaatataaactttggagcctgagagatcttggaatcagccctgacatgtccttcactggctgtgtgaccttgagacaattgcttcatatctctaagcctcagttttctcatctgcaaaaggtgaatcatgacagaatgtagcagacactggcgttgttccacccataacccttcaggcctcacccttctgcacaaagaggccccagggcttcccatcacaagcccttggatttcttgtctgaggggagcaggccagaagttcagggagtgtctgtccctgggagtagtcctcaaccaaaggcagacttgagttggtggaaataaatagcccaggtgcctcacctgcatgtgggagactgatggggacagcagtgagtggacaattaactagataattacagattatgttgggttctttgaaggaaaataacaaggcactgtaagaacaaaatgagaaggggccccagttggagtagggtggtcgtggtaggtctctctgaagaggtgacacctttagaagtaaagattatgaagggactcaactagtgaagagtggagggaagattagtctcaacagacagcatgtgcaaaggtcctggggcaggggagagtttgggattgacagagatatcagagcgctttatctggcctcacagcctgtgaagggagcttttagcctggggcccaggttgacctgactccagggcctgagatcctaaacactcctcatgaggcagccagttatttctctgtcctgtcttctctgcccttccttcagccctgcaatctgagcctttccatatcccagggccagcctgtcccctgtgaaactgaaagattctgatgcacaaggagaggtagctccacctctgtccatcctgcccagcagagtatctggcatttagctagctgtatgggtgcctgctgcattctctacccaggctccagacccactgatggatgcccatatgcttgctggatggatggtagatgagtggatggatggggggatgaatggatggaaagatgcatagatggatggaaggatgggagaatggatggatggaaggatgggagaatggatggatgggtggatggatggatggatgtggatggatggatggatggatgtggatggatggatggatggacagtagatgagaggatgaatgggtgaacagatggatggatggatggatggatggatgatggatggaaggacagaaggatggatggatgaaaagatggaagatggattgatagatgaatggatagtagatgagtaggtgaatgggtggacagatggatggatggatggatgatggatggatggatgaatgaaggatggatggaaagatagaaggatggatggatggatggacagtaggtgagtagatgaatgggtggacagatggatggatgaatgaaggatggatggaaggataaaaggatggatggatggatggaatggatgaaaagatggaagatggatggatggatgaaggcatagtagatgagtagataaatggtggacagatggatggatggatgaatgaatgatggatggaaggaaggatagaaggatggattgaagatggatggttgaaaagatggaagatggatggatggatggatggatggatggatagatggatgatggatggataaaagataagtggatggagggatgatgaattacagtgcctttctcttgaactgtacaaaacacagataaatgtatttgtttatcagtgataataaatgaatttttaaaatttctgtcttcaaaccagcctgctcaaggcatgagagctcccaggatctcccagcccaccaccaacactccctgtgtcctctaaacttttccaatcattccccaccttctgggcccaggtcagcagcccctccagcaagagtgctgcagaaagggcacctagtggaagtgtgttctgtttctctgcactgtgcctcccctgctgctggctagagagcagggccaggctttctcttgcatcctctcatggctgtgtatgcagctattatttacagaccttttaccatctatgtggcctcagcagctctcaatgaccactgtgggagccccacttgacagatggggacactgaggctggggaggggcagcggccagttctgggccacgtggctgaaaatgctgtcatgatcaaataacagaagtgactaaggccacatctgaatcagcaggtctgaaaacagcacatgtgctggctttttacccacccagaagcctcttctcccatggtccccttccttgtgtggacacacagccggccaggcactcaggcacaagtgtaggctgcccctggtattccagccgttgcagccaagtggggacagaggtcagctccaggggctatatctgtcacagccctggaatgctgaggcacggtggccctccgatgggtgggcgctaattataggcctgctggttcacctttctgagtccttccacccctgggaggcaggaggcctctgaacccactgaggagttcaaagacccgctccgagcagctgaagctcgggcacccacagccgtcctaccctccccattgaagtactgactccatccgacgcagagaaggtcaagcgggctccagggctgggatgcagggggccgggtagtgtgggtccttagtctcttggcttcacccaggcaaggctgtcttcccctgtggggcaagcggggagtggaccagaccccggtcaagcgctccctctgcccatgtccaccctggagagcactgtgcaggccgactgggcaggcaggggacctactggccactccaagaggaccttttcttcctttttttccttcatccagcaatggtgattggatgctgccagtgctctcaacgagcactttccatggggagggcacgaagatgaaggacagaaccactgcaatcaaggtgctgcaagagtgtcaccattttaagtgtgcaattgagtgcgttgaggacttccacaacctgtaaccatcaccattatctactttcagtacctttccatcttcccaaactgagactgtctcaccatcaaacactaactccccattcccctcccccagctcccagcacccaccgttctactttgagtctctctggatttgactacttcaggaatctcatctaagtaaaattgtatcatattttttcactcaacacaatgtcctcaaggttcacccatgttgtagcatgtgtcaatgtccttcctttttttttttttttttctgaggcagagtctaattctgttgcccaggctggagggcaatggcatgatctcggcttactgcaacctctgcctcctgggttcaagcaattctcgtgcttcagcctcccaagtagctgagactacagatgcacgccaccaccccggctaatttttgtgggttctttgtttgttttttgtttttgtttttgtttttttgagatggagtttcgctcttgttgcccaggctgcagtccaatggcgtgatcttggctcactgcatcctctgcccccctggttctagcgattctcctgcctcagcctctcgagtagctgggattataggcacccaccaccacactcggctaattttttatttttagtagagacggggttttaccatgttgaccaggctggtctcaaactcctgacctcaggtgatccacctgcctcagcctctgaaagtgctgggattacaggcgtgagccacaacacctggcctgtgggttttgttttgttttgttttgagatggagtctccctctgtcgcccaggctggagtgcagtggtgtgatctcagctcacggcaacctctgcctcctgggttcaagtgattctcctgcctcagccttcttgagtagctgggactacgggtacttgccaccacgcccagctaatttttgtatttttagtagagacggggttttgccacgttggccaggtgatctgcccacctcggtgatctgcctgcctcgggtaacctcaggtgatctgcctgcctcggcctcccaaagtgctgggattccaggcgcgagccaccgcgcccagccatgtctgtcctttttaaggctgaatggcattccattgcatcgatggagcacattctatacatccatccctctgctgatggattcttggtgtgatggttaatactgtcaacttgattgggttgaaggatacaaagtattgatcctgggtttgtctgtgagggtgttgccaaaagagattaacatttgagtcagtgggctggggaaggcagatccacccttaatctagtgggcacaacctaaccagttgccagtgaatacaaagcaggcagaagaacgtgaaatggcgagattggcctagcctcccagcctacatctttctcccatgttggatgcttcctgccatcaaacatctgactccaagatcttcagttttgggactcagactggctctcctttctcctcaagcttgcagacggcctactgtgggaccttgtgattgtgtaagttagtacttaatcaactcccctttatatatatatacatatatatatacacacacacatattttttatatatatataggagatatatatataatatatatgatatatatatataataggatatatatatatatatctcctattagttctatccctctagagagccctgactaatacacttggcttgtttccacccccaggcaactgcgaatggtgctgttatgtacatgagtgtgcacacatctatccatgatcctgctttcatttctttggggatatgcccggaaatggaattgctggatcacatggtagctctctgtttagtgctttgaggagccaccgtaccatttttcatagactgcataatttttccattcctactcctgacaggttctggacccaaaatcccagagactcaataggcaaagacctgccccacctgctcagcctctttctctcccttccgattccctctgggtgacgcaaatgcaagtagggaggccactgtccctggagcccctggggcggcctttcctgactcagagggcatcttcccacagagccacaggtgtgcggtctccaggcactgcccgccctgagcacacgtggagcaggtgaaccatctaacagtgatgggtgctgggtcccaggaccctctcacccccatacccttttctttttcaggagaattctacctgcccccagcccctcctgtgtgtaaggaagcaggagttcccaccgtggcaccggaagcagcgggcaccctctgacccctcccagggagcccacgctctcagcctggggcccgccttctctccccttcccctcatccagcagaagcggggtcgctctccttttggaggccagcaggccccttgccctctgtgcctgatgctcaagctgtggtaacacagccccacacagggtaggtggctcaaacagacatttatcatctgcaggactctgggctggatgtccaagactggggtgtcggcagagttggctccttctcagggctatagggcagagtctgttcctttcttgtcctttagctgctggtgtttgctggcaaactttggcactccttggcttgtagcagcatcacccttgtccccacctttacgctctcatggcgtcctcctgtgtgcacggctgtgcccatgtgtctcttaaggaggatcctggtcacaatggattcaggggtcattctactcctatgttacctcatcttcaccagttgcatctgtaatgaccctattccaaataaggtcacatgctgagttactaggggttaggacttcaacagatgaactctggggaggagacataattcagcccatgaccccccaaacacacacacaaaatgaagtcccttggactctggtgtggggaagaaggtgaccatggcacagccatcagctgcgaaaaatccacattctcttgtcaaagctgttttacatgttaaacaagagcccccagtgtctcctacgccttcatcagggaccatctgttgatcctgcagcactgagtactgctgcttcccctgtgttgacacagccccgggcaagttccccttgccaggactcagggtcatcatctgcaaggagggagtgatggcagcccctgccccatctcactctagagaaacaacaaaacccacagcagagctcagctgcgtgctgctcctgttgactgccaggaatgttcgcagctgcaggggagccattccgggaaatctgacatgcgctgggggctgaaggaggcaccgagattttcacttgtgttgcacacgtgccagggaggagcccagcctccctgtgggtttggcgagtctgcactaaccaatcaggtggctctgagtctgggctctctgagtctgggctctgtgaccacaagctctctggccctggacactctgaccctgggctctctgagtctcagctctctgactctggcctctctgaccctaagttctctgaccctgggctctctgagtctgggctctctgacccctgggagggcatgggaacagagagcgatggtcctcacagtcccaggctcaggagagcctcctcacctggaccctgcccatcctgccaagtgccaggagaggttagtacactgcccatgctggctctcacctgggccggcccaggtgattccacccatgccattgttggggaacaggtgtgaggaggcacctagtccaaggcagggcccggccactgagtaattgcttctctgagcctcaccttcttaggtaaagacagggtgcacgggccccaagagcaggttgtaaggataaaggaagtttctgtgctgcctgacctgacacagttgctctaaagggtccctggagaagcacacagcttccagagggagaggctttttagagttttcaaagaaagtaaactctctctctctctctccacacacacacacacacacacacacacacacacacacacagacacacacacatcacacattcagacacacccagaaacacacacacacatacatgtcctcacacaggtaccactaacacaagatcacacatacccacatgcacactcacgctttcagaaatacacgatccttctctccacgcacacacacacgatgcacacacatgcacaaacatgcctttgcttgtttccaaccatccaaaaaaacgtaactttctaaaaccagggaactgaaatgcacctttagcccgatttctgggaatgccgtcttcctcttaaagcagcagctgacgcaggctgatgccagcgcggattctgctgtgctggaagcaagcacgttccagtaaaggcggcaagcgctcctcagcctgcatcacggtctaccaaacgacagagtagaataaaatactttaatgttgtgatgacacaaagccccacactgccccgctgctcctgggaggctcctcagtctgccagggctggcactcaggcccttccctgccggcttcctgccacacagacccacaaatgccctgcattgcaggcagccccctccgagctccgacttgggccctcttcagttcccactggaccctgatttgagctggctctggaaatagctgagaacccagacgcgggacgcaggggcaagggctcaaggaggagagtcagagtcaagaggctgccacgccaagatgtcgccaggagctctggcggtggccaccaggcccagctagtgcgcactggcctccagctgggagcccagtctcgaagcctgaacgtgagagggctccaggttatccgggctctgcttctgccgccgccgtcggggctggacccccttaccagggggtctgggcagcccactctgtagctgccgcaccatctcgtggtccctgtggtccagcacgcggggcaggaacagggaggacttctgtgtgcggcgggtcttgaagcccctgcggggccggcccttgccgttcacagacacgtaccacagtctctcggcgctgggctgccggcgggccccaggcgtactagacaccgtccggtacagccgggaggcatacgtattatagcccagctcgtggatccgctccacaaactcgcactcggcgctgtagtgctcctgcggggatgagatatcatggtcagtgccccggggagactgtggcagcgtcagggcccagggttgcctgatgcctccctcccctcctgtgaggctgttcggtccagtgccaaaccccagcgcactctcagccagtcacacctttgcctaggccctgccctctgcccagcatgtccttcctcccctgtgtgcctggtgaacttggccttctgcctaaaggtcaccttcactcaaagctgtgccagacaactcccagctcctgctctctgggttccaccagcctctgtcccccatctgagggcgctgacacagcaaagggatgtgtagggttgtctgtggagcagagaccaggccggccaacccaggtgccctggcagtctgctggcagtgtggaggtcagcaaggactgggcatttggacaaaggaagatgacaacacccagatctcttttaaagaaattgcagaggctgggcacggtggctcatgcctgtaatcccagcagtttgggaggccgaggcaggtgaatcacctgaggtcaggagttcgagaccagcctgggcaacatggcaaaaccccgtctctactaaaaatacaaaaaaattagccgggtgtggtggcgtgcgcccacaatcccagctacttgggaggcttaggcaggagaatcacttgaacccgggaggcagaggttgcagtgagcagagattgtgccactgcactccagtctgggcgacaagagcaaaactctgactcaaaaaaaaaaaaaaaaagaaaagaaaaaaaaagaaattgcagaaaagaaaaaagaagaaagaacacaaaaagcaggaagggaaggggacacagccaggtttgatgagcccagactctccattaaacgctgcgctcaggggccccagctggggtcattgacccctgagcaacactctcttaagctggaggatctcgccttgcaggttgaagaggttacaacacagagcaggggctggggcctggcatgaggcacatgatcaatcagtgccacagatactgctgttcttaggatgagagcagaagctggggtgtcccaccacaagcaggacagagaggacacctctttgtcatcagagattaatgggacccttgtcaggcccagggtgcagtgggggaagggcagaagggaccctgccctctcaaaggcacagtgaagctctgaactgaaggagcttacaccaacatccccaagacttggccgtgggagtttccctcaagggctgcctcatggggtcttcttagtctgtggcgtagggaagaggtgggtatgccttatgcagacccactaggcttcagtcccagctacaggcaagtggtaatgcctagggccacctccctcaggggatgactgacaggagctgctccctccaaaccagaaagggtggtgggaggtggaagcagcaggtgcaaggcagacagcaggatctctctttcctcctggggactggccgcagggaggagtcggaggccctcatggtctgtccccatctggggtgtggtgtcccgtggcagagagagagagtggaaatggcctccagaggctcccagactggaccgagcagcatctgacctcgcaggacctcagggaacaagatgcttcaagcaccccatcctgtttttcagcgacatgaaagcccagagcagggaagggtggaaggcttgacctggtggtaggggctgcctctccccataaccccaagcccccctgctctccagccctcttggaggcccagtgccccctgggccacagtctggatgttactatccaagaccggtctccatgtttatagatggggaaactgaggcccaggggtggtgccaggccctacattacaggggatagaacagtgtctgatctgtgcctgacccccacatagcctggggctcagcgactatctgggaatgagcgggtgggctcagggccgacttccccaccccacacactgggtacaccatgttagtgtctggctcccatggcagactgtgagaagctcagggcaggacccaagcttctcccaggtccctcgatcctgcagcaggtgagtcctctcagggccagagaggccaggaaataggctttctctttggggggccacttgaggggtgggtcactgaaggacaggtgcctgtgagcctcaggtggcagggggctcaggctctcccaaggtgggagattgggggcagtgtagatcaattgctgacacgtggtagggcacctggggtggccaagatgaccagggcagaaggtgttggctcaggggccagggccatagactccagagctactgcagttgggactcgctgtgacaacactttccaatgtgtgtcctgacactgccgccccaccagacctggttccacaggcccctcccccagggccgcttccaccccatgaagggtggggaggaagccgactccgaagctgctttgttgaggaggtgacttctaaagggagctgtaagggcggggcgggcactttctcatgggcattttctggaggagggcgttccaggcagtgaaggtgtggcctgagcagtacagatggcttggagagttgagggggcttccggaagccggaggaggctcaacctctggatgacagcccccctgggagcagatggcacctgggctgctgctctgtgggtggagctaaggtgcctgggggatgcctgcgcatcatgggagtcctcagaagccatgaactgggctgatttgcttttttaggaagcccctttaacatgcactagcagagtgcaacacatggtaagtgcccatgcctctctctattgatcgaaggacggaatgtcagatggatgggtggatggatggatggatggatgggtggatgggtggatgggtggatggctggttggatggatgggtggatggatggataggtggatggatggatgggtggatggctggatggatgggtggattgctggatggattggtggatgggttgatgggtggatgggtggatgggtggatgggtgaaaggatggaaggaaggagggagcatggacggatggacatgtgaatgggcagatggacagatgaacggttggaaggatggatggaaagaaggatgagagaaaggaaagaaggaaggaaggagaggtgtatggacagatgggtgaagagaataaaggaaggggaaagaaggaaggaagatggatggatggcttgacaaacagatggactggaggtaggagaggctggagcagtgatccaggtgggaagtgatgagcctgccttttaaggcgtgctctcagggatgaggcagagggaggtgaggtgtgtgggctgaagagatgcaggggcgtggtctgaggactagggatggactgaatagcaggaggggtctaccatgactcccagcccactctgggtgagagtgagtggctggtggggcgatgattaagatggggagtcggggagctgctgagttcggttcgagtgtctgagtcagcaggatgttgggggagggtggtctatacctcagaagggaggtcagggccagaccaggagtgtcagggtgcagtgctcactggcccacagtgagatgagctggcctgagggcaagcatgctgccggcaaagtccagggagccccgtggtgggacagcactcctaggcaagctggccgcacgcaggactgtggtatcaggtggcaggtggcaggtgacggagttggcatccaggctactatgcctcccaggttgtctgcagggcaatgggaacttctccactgggcactctggaaagttccacaccctccagccagactgcttggctaagcatccctggtggggctaggagcctctgtccacccttctcaaagccaggctgtgagttctcaggcacggaagccccaggtgggctctgaaccactgggaccccctcatgtcatgctttattctgtctctccaaatcctggctcccctatggcagaagctggcaccatgagggcccctgctcccagacacagcttccaggacactgactgatgaatggactgaatgtcagatggataggtgtatggatggatgggtgagtgggtgggtggatggatgggtgagtgggtgggtggataggtggatgggtgagtggatgagtggatgggtggataggtggatggatggatggatggatggatggataggtggatgggtggatgggtggatgggtaaatgggtggatgggtggatgggtggatggatggatggataggtggatggtggatgggtaaatggaaggatgggtggatgggtggatggatggatggataggtggatggatggatgggtggatgggtggatgagtggatggatggatgggtggatgggtggatgagtggatgggtgaatgggtggatgggtggatgggtgagtggatgggaggaaggagggagtagcctctggaccagagaaaatgaaggggcgcatcccggctttctggaccttcctttagcaaaacggctaaaaatctgtgatgaaatcatcagcttctgcgagagggagctgcgggatgtgtcctctgtgagcaggactgagcagagagctcactgcagggagattgtccttgggccgcgtcagccaggctactcatggatggaaaacctctcattgcccaaggaagtatcagccaaattgcatgtaatgactagttggaggtagcaaatttccctgtgacatgtattttactctgtgtattccccacccctaccccttatgaagaggggcgctgccatacccacagagtaaggagaccctttttggttacacggaggcccaggcagtagatagactgggtcccaagccagggctccaaggctcctgtgtgcccgggacatgggcgccatcccccttcccctcctaggcttcagctctcgcctttccacccttggagagagccggtggagctgggccagcgtcctcctctccatgctcccaggagagctctggctgccccaaggaacactcccaggttgtcttgggtccatttattttggtggaaatttggagaacaatcacttccctgctctcagctactctcaagggagggtggtagtgatgacaaggatgggggaaacctttgctaacctggcattctccagatcccaggtcccccagggccaggctccaggtcactcgcggagcagcctctaacagacacagccaaagatcactgggcgtggagccctgggccagggtctggtcctagcttgggtcccgtgtacccttggcaaagcattctactgcccacatcccccgtcccctggcttgatgtgcaggccagaccgctactccgtcagcgcccacccacgtgacagcctggactcaccgaagcatagagtcgtcccctcttgttcatggccaggtaccgcccggagaagagacccctgatggccacaatgcccacctccactgccgttatctccaaaatacctagaagaaatgagaggtgcctcactcccgccgcccccacggagggggcggctgaggcccagctggccctgcccaaagccacaccccgggctcagggctggggagggtagcacacaccccacaggtcggggagtgagtggaagttcaggaagggagaagtcaccggacaggaggtagagaagggaacatcagggaaggcttctcttcattcaaacttgggagggtaacaatgaaattaacattcccacctgctgacgctgcctgcaccctggctttcattcgagcctcacaacaccttgccagctgccatcatcatccgacagacaagcaagtggggaccactatggctgggtgactgtcaggcccctgcacatgtgcttgagcgggaaatcaagccctggcggcagccatgggagtctgagctctgggactgcacggtccccaatgcctgtgcctgccagcgggaaagctgggccctgatgagccaggctgataatataaaccactggcaataacacagccagggtgcctgccacccagatcatgctggcaatagacctggcgggagatcattgtactcgccgggggacctggaagggcaggaagccagtttagaccctggagcccgcagagggaagctggacgggtctcacccactccccagggataagaaagtttaaatctcccctcccgcctttccttctggatacacgagtgctgtggtgggggctgggggcgggggactacatcaaaggacgggttggggtcattgtctcccaatagaggctgcgaggggattggggcgactgcctgcaccctctccaaggcatgcctctcaggagcgccctcctggcacgcggtccgagcacagacgcggtcaccaccgggcttttgctccagcccaggggtgctgtggtgcaggctgcgagcctcccgccttcccagtgcgcaggctgggcggcatcggcggtgcctgaccggggaccagcgaagcacgagtctcgacgcaggacaggggcggctgcgggcgcgcgccctcccctccccgtgagcagcctacaccaagaagtttggatgctgtgcgactccgagggggagcctggctttggagagaaccggagtgtcttagtgagacgaattccgcgcactcggaccccctggtgacagctggtgcccaccgtgcggctccggaggcgcatgtccccaggacgccctctcagggctgcggctttcctggaggaagccgcggtttgctgaggccgccgccgccaccttcaagcggcggaaccgcttcctgcgcccggggccggagccgagcgccgcgcggagcacccgaggacagctgtggtcttgactgccctcccacgctccccacgcggtcctcccgggccctgagctccgctatcctgctcctcaaagggctcggcgcgggcctcaggtccctgtgaccagaggagcccaaccgtgtagtccggcagactcccgcggtgagcgcagcccgggccgcgggtcctgcgtgcgggggccggagtgtgtgtgtctgcacccccaggcccgggcggacaccgttccgcgctcgtgatccgcacgtcccgacggcgagggcctccaccctcctgtcgctgtgcggccagggcggaggcgggggaggtgcagattccagcgcggggaataactgtcggtggcggccgcggccagggaaccgagctccgcagggcaagagtcctccgcgcagaggcagcagcgggggcggccacctgggcagccgcgagcggggagggcggaggggacggcggggcgtccaggggtcggcaggaggaggagaagtcgtcaaaataataaagaggatgataaatgccttgtccggctccttttctccgacacattcaaagggcttaaacttgtcagagctgcccaaagcagcagagcctggagccccggggtcgcctagctcgcgtcccctcagaccagcgggccggaccggggacggactctgacagccgccggcgccctcttcggacgtgaacgcccatgcccccgagttctgctcgaaccccagcgcgcgctcttctcccggacgtgtaggttgaggagggcaccctggcattccccttctggcagcgggaggcagacggtcttttcccggacaccccgggcgcaccatgccttctcccgggccagacccctccccggcgccgcctcccccgcggggccccgcagcgcgccttctcccgggcccgacccctcccggcgccgcttcccccggggccccgcagcgtccggcactcactgtaggcgctgttctccaggctgccgttgacgcggccgctcgggtgcagctggaggtggtacttcgtggcgcagtagagcttgcggcgccggggcgccccgccaaggtgctcgtagacgccgccacggccgcccgcatcgcgccgcaaccgcgccccagggcccgctgcgggccagccgggctccagcaggctgagcagtagcagccagattaggcccatcgtggcatcgcgcccgccccgcggcggcggcggctgcaggcgagcgcggcgcccatggaaggggcggcagccggacagctgcgaggtgctcggagcgggatcccgcgcctggagatgctgactccggcttcgcgggaaaggtgggggaagaagggggaagggtgggcgagagagagaaagagagggagagtgggagagggagagggagagagggaacgcgagtccctttaatttccacccaggagcaatgaaatttccgttgctgcgcaaagcgctgaaagaaaggacggttcgccaacaaaaggccgacgtggtccccaggcggaggcgcgggaggggcgggaggccggcgggtggggagccccgcggggctcggggttcgggccgggcgccgtctgcatacactcgccgccagcgcaccgccgtcgagccgcggctccgctccgcagcgcgccccacgcccccgaaagccctcctggctctgaaaggtcccctacccgcccctcccccgccccctcccccagaccaattatgcctccgaaaattatagaccgaggccttgaggaggccgccccaggccctgtcaccccctcccgctccccatcaatccccctgcacaatggggccgccgccgatgactgatgtccgtgaaaacaacttgcggggaagtcgagctgacaaacgcccattaaaggcggcgcataatgaaggggaccgcggagggcggcggcagggaggctccggggcgcgggcacgcgtggggagctccgggtttgtgtctgcgcccggcgcttcctgcaggagcagtggcgctgtcctcagccttgcaaggcgcggggcaggccgggtctggagatgctatctccttttgcgcacaccaactgggcacccggagtggtggggttagctctcgtctggcaggcctcggaggatcccgtcccagtgacggtccagagaggggcctggggaggcgggaggagggacgcgagagccagagaagtgggcgccgacagagagccctagagagaaagagatgcagatagagacagacagaaacggaggaggaaaggacgggaaagacatggaaaatgtgaatgacagagatcgccaaaaagaggaggcaggggagatggaaagaagacagagccgcggagaacacccagagaaaagcacagggagtctggtagccacagcgggtgggtgatgacaagaggaacccggtagaagctgggaatgggtgtgggggagtcctggcctggaggatctgaatcagtgcagatgcccaggtggtcccctggactgtgtgggggtcaaggtgtatctcagggggcccagtgaagaggggcttcaaaaagtatcgggaaaagccatgtccccacccatttctcttgcttcctggtcctctgtcccccagggtcctggggccagcaggaagcaggggccagcacaggggatttgcttctctcaaccctgccccagaggagggcacgctgtggagtccaggggtctaggccacagctttggctccaagttgaccaggggctctggggtgagttgggtgggctgacattccccagcctgccatctgcatcagggtttggggtcaggcaagtgtgcagggcaccatgagctgtggcagtgagcacacacccctgggacgtgtccagctcccatggcccaatacacacagggcagtgtgtcctctgtgagcccactccagcgtgcacagggtccaggtggccatcctgaaggagggcgcccccaagccatccccgagcacctcagtcttagtcagggtctcctagccgctgccccagggccagcttgtgagagtccttgaacaggccagaggccagccactgaactactggagcctcagactcttgatggagactgtgttacaggggtcagaggctggtgacaggaaagccccaaaggacagcagcaagaggagagcttgtccagtgcagccctgtgcaggcctgggctgggatgtgtggtcacctgggctccctaagaggcatggaagaggcacaggaaggaggtcgctgctctaaatgccttagctctgctacctcctgacacctggccaagaagagaggagatgtagtggcgggggtggggggtgcacaagaaattcagagaggggtgcagtcagggggcacagtctgacagagagaggagagaggacacaataatgttttaagagagagagagcaagagcagcctgctggggccaggggacttccgatgccctttcctgtcaaggctccggctgcctccttggcaggaccccctctggaggactgggaggagccagaaaaatctgaccaaggcaatctgggtgtccatgcccctcctgctctacacctggggcccccagcagttcccagggaaactcccgggctctggtctccagccctgcccactgccaggttgccgtgtgcccgagaacccaagatgagggcaggggctgctgccctgaagcaggagtccaaaggtgacccctctataggagggaagctcaggggatgggcaagaggtttccagctcctagggagaacctgacacaccagccactcagtgcatactcctaaaatgaatgaatggttcggccacttcctgccacgaggccttggctgtgtagtgtcgctcctgagatactggtttctcatgtgtgtgatgccccaaaggtagggccggaaactgagtggcattacctctgcaaagcctctggcctcccatcagcgcagggcatgctccagccgcaggggaccacagtttatgacgcaaaccctgctgcctttgagagtgaaagagggcgcaatttgcagttataccaggacagccggtgccctgcctgaggtccctcctggtggccctggctcactgtctgctgttctggtaagcatgacttttccgaggcagccaagctctctgggccaagttttcctctctcctccggtcgctggcgacagccttcagcccggtccttccatctgcggtccaccctgcagtcacgggaagtggtctggagcccaaagctgccttctccagctgccccagcccctctgacaaatgccgtagtgttgggggaaccctggggatgctcacccacccgcgtggacctctagttcacttcccacatcttctgggctgcgcctccaggcccttgctcacccacctattgagttcttcctcctcatctaaacctgttgatctttccagcccaggaagccccccagacccccaccctgggactctgggaccctcaggcccagccaagggaggggaacctgattcctccacatctgcccggcaggggcagggggctgggccacaaagtcttgtgtgtggggtggggcagaggcacccacataatggcaacctcgcccctctccctcccattcggagccaggcggggggtgcaccatgcgctaatagcgaccctgttaattgcttccaaatggtcaactgtagtcatttgactaattggtctcttccagagcccaggctggacaccccaggcccagcagaagtgctcctaccagcatcccccgaacctctgcactgggaccctgtcccccagagcacccccagccctatctggtacctgagtctgcccctagcctcttcccctggagagagagctggggtggagagagggcagagaacagggtcctatggtgtggccgcaggtggctggccagggactgtcagatgtgatgctgactcccagccccaaactcactctaattatgttgcctgcccccccatcctcttaccccatccttgtccccaagagcagtgggagagagacccagcctgcctgtgtcactgggagaccatgggtccctgaaattctgggagcagccctgatcagccccacattacagatgagaaagggaggctcagagaggtgaagtgacttgcccggggtcacacagccaggagatgaggcgagaagactggaatgccccttctggctacgggacccaggacccgagcagtggggagagggaaaccattgcccctctaagtccctctggggcaaagctggcactttgcttctggcaaagttaggagcccccgcaggcaggggtgggatggaaggcacatctccccgcagtggggcctgcgcagcactttgaggctcatccacggtgtggcgtgtgccagtgtgtcctccccttttctgccctagtggcattccgtcgtgtgcacagaccacatgctgtttatttttcatccatggatggatgttcgccttatttcctggctacttggctattttggagccccaagctgagacataaaggaggattctctctgggtagaggagaggagggagcagagggccccctggcccagggacagacacctccagctgctctttttcttccccacaacaccgagggcagcctgtgcctgtcagtgcctggcatcgggctccaggcagagcagccaacagggcttgtagatgccatcttctccctgtgtcctcacaggttcgtccctctgtgtgtgcctgtgtcctcattacctcttcttataaggaccccagtcagattggactggggccattccacagacctcgctttactttaatcgcctttgaaagaccctagctccaattgcagccacattctgaggtcctagtgagtagggttccaacatacaaatcttgggggacacagttccgcccaaaacaagtgcaaatgatgaggtacacccccagtcctgtggatgaggtggggtggagggaagggaagaaattcacatccccacctcctcccaccatgaagtcaactgcagctgggcgaggccaggcttgatggggagctgtggcagctttgatggggagctgtggtggcaaacccacactcaagcaatcaccctgtgtccctgccttgcacccccctacccctctccaccctttgcccaggccagtccctccacctgggggccctttcaccctttccatctagaagctcctgccattcctgcagacctggccccggcccctggaggggcccacaccccaggcagagcgagtctcttcctctggcctccctggcctttgctccttccatgctgccctgatacctaggcctgtttctcgtcagcagcagctcaggcagggcagcttgctctagagggcaggcaggctttgtttacctctcccctgtgctgacctgtgcgagatgtggccaggacacttggacagtgggcaggaggcagggatggtgaggtggggatagagggaggagtgccgggctacccactcccagtctaggatgttcctcctccacacctgcatgttctgtgttctccttaaaccatcacggtgctgctttgaggctcctgtgtctgctaggaaaaaggggctgcgctgctggggccttcattcagccgcctacaactgggggaggctgaggagtgctacaaatacaatcacaggagccagcatcgatggactgatgggccctggtatgcatggtctatcttgggggtggtggcacatgggtccaggaccacccagattccattttctgctctattccttaccctgcataagcgctcctacagctgtcagcctctgatatcaattccaagttactggattttttttgaggccgggtctcactctgtcatccagggtggagtgcagtggctagagtttggctcactacaacctccacctcccaggctcaagtgatcctcctgcctcagcctcccaagtagctgagactacaggcatgtgccaccatatccagctgatttttgtattttttgtagagatggggtctcactatgtttcccagactggtctcaaactcctgagctcaagcgatcctcccatctcagcctcccaaagcactaggacaaccagcatgagccactgtgcccaacccctattctaagtttaaaggacaagcaggactttttctcaagtcccagagtagcgcaccccagtcccaacaccaggactgagcgtgcaccccacttctagcatcaggactgagcgtgctctgacctgtttccctgagctgaggaaggggccgaagagctgagataactcccaagaaatttccagggagggattttctggggccaagtcctggcctggcccggccgggcctgtgtgagctcagggtcctgcagccccggtgactggccatcaatgcccaagctgcagggactctcgaggaagtccgaaagacgccactgcctctctacaggctgttctcaggtggccaggaggactgcatcgcagaggcggcgggcagtgcctggggaccagcttcctgcctctggctctgactcagacctggtggccttgcccagcccagccccaccctctcactaaatcaaagccatgcccttcagatgtggtttcccaagcctcccttggtttcatgactgcgagggaccttctgcagccacctgggctggtacgtggatgggaccctgtgactggaagccccaaccctgcaaaggcagtgagtgtgcaacgttggggggcatggccggccacacactttccttaatgggaaacattgctcacttccagacttccagaggctggcaccagggactcgattgtcactgagtaagctgtatgcagcccctgtgcccaccatggcaagacccctgccgtcacccacctgacggctgccctggccctgcctcaggaggctccctcgcctccagccacatgggggtgagtcaccgtgagtgtgctgcgtccttctgttttctgaggcagggctgcagcccctcatctctggggtgaagcccatgctctttgcttggatttgggcatggtctgggccctgtccatctcttcagctcctcctggcccacccttggccttgagcagctgctgtgacccggacattcccagtgagcaccggctcctccccactctggggtctctgcacggactgttaccactgcctgcagctactgctccctctcctcctccaaacctttggcttgtttagattcctcctgtccttccagatgcagctaagagagtctctcctcggggttggaggggtccttaaacccccttgccctggctgggccagggtcctcctcccggctccctcagcctcctgcactgcacagtcaccttcctcatcaagaggcgtctgtgaggccacccccagccctcggctgtgagctctggagcaggtggacggagtctgctttcctcctggcccctccccagggcttggcccagagtccctgagatgcttcaggaacaattgcatgaaacctctgtggcatccctgacctgaaaatgtccgtcatttgagtgaaaacatggagagagaaaggtccttacatagatcccgacaaagagggagagggtggccggggacaagcagcctcatcccctctcaccccctggcagggtggcatgacccacttggagacctttcagtagggatgccggaggctttctgcaaaatttgatttggtgaactccagaaaaatgatagactagaaaatcgcccatgaaagaactcctcggaagcacagagctaattccaggcacttctcaaacttgaacgagttcaaccaatagataaaaccatcagggcaactaaaaagaccgagaatgggccttgagcctgtctctgcagagatgggggtgaggggacgtgcaaaccagggccatcatcacagggggcactgggccgtgactatgacagtgtccatcacaatgccttttgcttgaggaatgccacacctgacactctgacactttatcttacagagtctataaagaaatatgcacaagcagcatcattcagcaggatttcagaccagaaagaaccctcccgtcagagactggtggccatacaagggtgcgctgtgaagctttcgagacagcagacagccggagtcgtgatcagggtggccaggaagggaaacaacacggtagcaaccagagtgccctcccatgtgtgagttgctgggttagaatccagattctgccatgtatgacctgtgaggacttgggcatagtaacctctctgggcctcgatgtcctcatctgtaaaatgggaacgtgccacagtgctctcagaaggccaacatgaatccatatgggtgaagagctgggacagtgtccggcgagcaggacacaccagatcagtgcttgctgctgttgttggtattcacacatgtgatttttttttttttagacagagtatagctctgttgcccaggctggagtgcagtggcatgatctctgctcactgcaacctccgcctcccagattagagcagttcttctgcctcagtctcccgagtagctgggattacaggcatgcaccaccacgcctagataatttttgtatttttagtagaggatgggtttctccatgttggtcaggctggtctcgaactccttaccccaggtgatccacccgcctcagcctcccaaagttctgggattacaggtgtaagccactgtgcccagcccacacatgtgatttatacacagggcccttctgcaagataggcaagcagtggtaggaatgaccacctctgggaagtaaggatacaaagaggtgagagggagaacttttctctttgagcctttggtactaattttgctattgacttgatttttactgcaaatagggattcctttggtgacgaataagccagttggtgtgcagggtgttcactgcaaggcccagacaggactacaagagaccaggactgtcctcagtatgtgatctctctctcctctggcgtcagctctacccaggaacggatgtgaaggctgaagcccaggcaagggctcatagtgtggggaccgtgcagctggattcatgtccagtggaatttgacaccatggccgtcatcatcatgttttgccgtcatcagcacagacctctgagcagaaatgccagaacaatgtggggccaccctggagatttattttatttattttttaaattaaattaaaattgtttttaagagacggggtcttgctatgttgcacaggttgatcttgaacttctgggctcaagcaatcctcctgtcttggcctcagagtgttgggattacagacctaagccaccgcgcccggcctggagatgtattttaaactgacatcttgggagaaataaaagccttccttttccctgtgtgtcggtagcgtaagtagtgaactgggaaggatttctcggggcccctgccctgagctcctagaccttctctcccacgccatgttacacaacaaaatctgactctgaaagatcaattgggtccagcttggggtctgatgggcagacgggcttaagcaaagcccccacttgacttcaagagaggagcttggggcccacatagacatcgaggcctgcacaacgtagctaattggccctaacatttttctttcttgaattttaaatccttttagcaacagattatacaacaaaggctgaactcattggggccgtcattaggctggcggaaaacgctggcttggctgttccttggcgaatctccttaccgggttatttagaggtgccgtgtgtctctcttggggacatgcacacaaatgtaaagaatgtctctgagccacaatgacattttcattagccgtggctcacagaggagcctttcctggcagttccaatccggaaggttcttatcctgctctctggctttcttgctctgggtgaaaggcaggcaccgtaatccaagccaaacaccccgacctttgacccccacatggtgcttgctgtcagggtgggggttcttctggggtgcatgtctgaggcctgactgggctgcacactgtcccagagtgccctgcctttggccaggacaattcacctcagccccttttgtcccaacagcttttgatcttgcctgcctgtcacccagggaaagagcctgcctaggccctgtcccacacctgcctgcaaactgacagccatggctcccccagccccactgcagcagccttaaccctttctctgcctgacctgcagggcctgcacctacctgtctccagggtgctggggcctcaggctttggccaaaccagaacaggactagaaaagaattcttctgagggtccaaggcctcgtcctaccgcccctactgtgagtgtgggactgacaaaggagtttggagagcatgagtcccctagaatggagctcccaggaaaagccaaagagaaagccccaggccactgggcctggacttcgccccacggcaaggtccccgcccactggctaggcaggtgcttttgtgaaactgacattttctcagctgcacctctaccgctgctgatgagcttttcaatacactctttcttgtattgagacagagccatgttttcataacttggcactacagcaaagaaagacatggggtccttgctgctcagtcctggtgcccggcccagtgtctggggtgcccaccttgcccagcgtgtgctgggcatgcaggggcacttccctagggccaaaacctgggagctttcctccaggccaagacgcaagtctctttgtttttacggtagctttgttgaaatgtaatttacataccatgaaattcacccgttgaaggcatgcaatttagaaggttttattcatagagttgtatgaattctctatttcccaaggccatttttttaaatataagggtaatctatgttcactgtggaaaatacaaacaattcagaaaatataccatgaaaagtgcacatcctgttaatccatttattcagaaactgtttctttttttcttctttctttcttttttttttttttttttgagacagagtctcaatcttgtcgcccaggctaaagtgcaatggtgtgatctcactgcagcctccacctcctgggttcaagcaattctcctgcctcagcctcctgagtagcgggattacaggcgcccgccaccacatccagctaacttttgtatttttagtagagacagggttttaccatgttggccagggtggtctcaaactcctgatctcaggtgatccacccacctcggcctcccaaagtgctgggattacaggcatgagtcactgcgcccagcctcattatctgtttcttaagcacctactatatgccagggtctgccctaggcgctttggaaacatcaacaacaacaacaaaaaacagacaaaagtccctgcctcgtggggcttcagttccagcgtggggaggtggacaataaatattatacattaggccattatgtagcaggctagcagggcctaacaatttccagtgtggattccttcagcccattccccgacgcgttgcaagcacacacctgcatctaacacacaggctgctccgccatttgctctgtcgggagcagaacgtcgtggacactttgtgcgacagtgcccaggccactgctccatccctttcacagctaaagtgggactccactgtcctccagttaattcagtgactcctgtgggggttgccgcatggattctatttaatatcagtgcaaactagggtggcactgaatattcttgttctcttatgtgtgtgcacttggaaagtgccagagagggcaggaggcagatcccatatacactccaacatattatcttccccccctttcctttccctctccctgccttctgtctccccctttccctctcttcctttcccccagccccccatgtacagcagctgcagcttcccaggatccttttctgcctgggaccacgagctgggggctgcacgagccctgcgtcattttccggccctcctagatgagcagtgggctctgaaggagctgagcagcctgagagaggacatctagtgctcaggaggaggaggaggaggatgccacctcaaaacgccctcaaaagggccagaaccccagacttggaactggaactgtccatctttgtcccgggatgtaaccccatctttggcccctggaatggggaaagaacaggaaagccacagaagccagagccccagggacccaccctggagtcccatgtacccagaggtgccagtccatctgggaagatgccccaggaggggagtttcctcaccacaaacctcttgcaaaaatgccctaaaaatgtcagaacctactttccttcccaaaagagagttcgttgagagccgttgagcatctgtgtctataaatcttccactgggatggctgtgcagggtgccaccctctcaaggtggcctcaggagaatgtgttcaagcccctggaggtccactgtatgaccgaagtctgacagatagccccgcggctcttacacacacccagggccactgacgcccacctagggccaccgatacctacatagaggccactgacacccacctggaggccactgatgcccacttggggaccactgatgttcacatggagccactgacacctacctggaggccacttagacccacctggggccactgatgcccacctggagaccccacttgcagtagggctcccccaggctgccgcctggccacctcctcagaaggtgcatggtgtgagcaccaagggaccctgccttcttcatgatgagcaccccaggctccagtggcatccaaatgtctgtcaagattctccaggcaagcccgtggtctgccaactatggaaattactgccttaggccatctgtgagacgaaagtacagtctcataactcctccactaactttttttttgagatggagcttcggtcttgttgcccgggctggagtgcagtggcatgacctcagctcactgtaacctctacctcccaggttcaggcgattctcctgcctcagcctcccgagtagctgagattacaggcatgcaccatcacacctggctaatttttgtatttttagtagagaataggttgcaccatcttggccaagctggtctcgaactcctaacctcagcctcccaaagtgcagcctctcaaagaacgcctgcctcagcctcccaaagtactgggattacaggcgtgagccgccgcgtcccgtctcctccactaacatgtgtcgtccattcattcattcactcattcattcattcagcaatattttgtgttcccatttcacacccagccatgaactgaggtcacgaggatgcaatgcacagcacatccttctaggcattttataaatattgactcatttaatccttataacccaggggtaaggacttttaatagccccatttcagagatgagaaaacaaaggcacagagaggcagagcaacttgcctgcaattctcagcagctgaggggcagagccaggattgacagcagggagctgagttcctgaccaccaggctctgccacctctctctgaactacttatcacccagctttaaggacaattacgaagactgtgtgttggatggggaagaggtcatgataagataagggaaaaaagtagcagtggacattgtatatataaacaggagacaaagtatacacatatttttatataaaaaaagatgacatgcatatatcacctggggcatgtcctggtggggagcagacacacagcataagacaccagagtgattagcgtggaggaatggggcgggcagtgactgaccccattgtctgacaacaaaaataactcatttccccatgaatgggtttcctaaaagtgtcacttcacaattcctttcggattctccaggcttactcaggtgcttgccatgggagtgaaggcagcccattatccagggacagagggacagcattcccgcctgtcctgtgctttgatgctcagaatgcatcacctgaaagaaaaacggcatttctctgggcaggctggaacgtccggagggtaaccagacccgtgtaaagaaatgctgtggcctccatgtgacaaggcaggcgggagctcagcggctcaggccagctcctggtcggccctgggtaattctgtctaggcatttcccggagcctcagaaactcctgaagcaccaaggctcctgggacccgggccatggggcaactgaccttgcaccaagacagggatgactccacaccctgctaagcgaatgcgtatgaaaatgcttcctgatgggctggcagcttcaggacgtgaaggggattaaggcaacggtccctacagatgggaaatcaaacagatattctagcagatccaacctacaaaggatgctgcagccaccagcactgtttacaacgggtttgaagagtctggggacacttctgtcccagctgctggtgcacggtgcagaaaggaagatttgaaggcggccttgcccccctgaatgagtacccgcacagtccttgacaaggtgaccatggcacagagcttcagaagtcccaccccggcctcaccctgacctgtcctgtgacctctctgtgcctcagtttccccaccacacttacttcatgggtttttgtgatgataaaatctttagaactgctcaagcatgtattaaatattcaaataactcaacgtagactggaactcaaagggcagagaggctgagccaccggcccaggttatcagttgtagctctgtatctgtgtgggccattcattgattcggtgtcccagcaagagtgagcaacactggacccccagttactgggctgcagcaggagctcccccagagagctcatggcagctaaaaacgtcccagcacacatcttgccagtaagaaaatatctgcgaagaatacatggattcattgctattttttactcaaatttatttgaaagccaactctgaaccttcatcgtcagtaaagaccagcattacttactctaattcaaatgtaactgtaaaaataaatttgaccaaatagtattttcaaatgccaactaaatgccaggctgagacacgggcacctgctcttgttcgggtaaggggcgagcagcaggtgttggggaggggtcacaggtggaccttggttagaaaacttgaaagaggccgggtgcggtggctcatacctgcaattctagcgcttcgggaggatgaggagggcggattacctgaggtcaggagttcgagaccagcctggccaacatggtgaatccccgtctctactaaaaatacaaaaattagccgggcatggtggtgtgcacctgtaatcccagctactagggatgctgaggcaggagaatcgcttgaacccaggaggctgaggttgcagtgagctgagatcatgccactgcactccagcctggacgacagagcgagactccatgtcaaaaaaaaaaaaaacttgaaaaagaagagactggggtgccctggctgcacgatgcctcacccacaccccttggctcccctgcacgcagatcagtctttggtccccgtgggcccgtgtggctgcaggctgggcctctcatcccatttagagtagtgggagagggcctcatcgcaccagcagatgccagttggctcaggcctccggtgctggggacatctgcttctcttggactttggatcttctggggtgtgaggggacccgggccacccttccctctctgacagaggatctctgctctctcggccaagctgcctgcaggcccccggcccagtcagcttcgccttctggcggcaatgtgccaggccctgggcctacaggctgggattgggagagtagaaagccagacaagcgtccgagctgcgggctgggatccctgaggacatgagcctgggttctgctgctgccctgctgcaaagcaaagggtgagggggcacttgagctgggctggggcctcctgcagctgctcccacctcccttctcaggagttttctccctcacccccttacccggttccttatttatagtagacatcagaggcccagagaggtcaggagacttggaaagttcacacagcaggcaataagacccaagaggctcaacccctcacctccaggctgggttctttagatttaacgatcacagctccaatgatctggactgtggggagatcacactggatcccccaacaccaggttcagaggtggagttggccacagacggctgaacaacacgctcagtctcatgggcaggaagtgggtgtaggattcgaactcaggcctgctctcacacctctgtcctccacccgtgggctcacccccatccgtcagccttttgctggcatccacaccaaagcatcacagccacccaccctgggctgctgggcaggagggggatcagtggagcccactgcttcccacctcagagcactctgcattccagccttcccacccccatttttctggctttaaaaagatgctgcggtcttcaagaaaccgtttatcttcaaagctggggtagagaaaaggctccagaggggccgagtgtgtgttgtgagcggctgggaggacatcacttaaggcccttaaatgacgactaattggaacccgggcggctactttcaaggggccaagtggagctgcattgtgagctcggcaggcggaggatgccgacgcggtcgcggttaggggagggcggtcggggtggcggtcggaaccgcatcctcttcccaggctggggaagcccgatctggcacggccgagggccccacagccctgctgagtggtgtttacagccccaagtcccgcttcctggctttggtttgagaaacggagagaacccctgggtccggcccactgggctgggctctccggccggccctgctgggatggagattagaatcagatcaattttgtctcactgtcctggggctgctgtcactaagtcccacaaagtgaggggcctaaaacagcagaaatgcatccacccactgtgctgggggctgcaagtctgagactcgggtgccagcagggccgcacactggggagactccttccaagaaatttccaagggttttttttattattattattttttgagatagagtctcgctctgtcgcccacgctggagtgcagtggtgcaatctcagctcactgcaacatcctactccctggttcaagcgattctcctgcctcagcctccctagtagctgggattacaggcacgcgctaccgcacccagctaatttttgtatttttagtagagatggggtttcaccctgttggccaggatggtctcaatctcctgaactcgtgatccgcccgcctcgacctcccaaagtgctgggattacagacgtgagccaccgcgcccggccacggggtttcttggctctaggccgcatcactccaatctctgtctctgtctacccgtggccttttccccttgcacgccagtgtctctatttttccttcccataggcactggtcactggagcagagaccgccctcccccagcatgccctcatcttaattcataacatccacaaatcccttccttccaaataaggtcccattcccaggtactgggagttgggactgggacatgggttttgtggggagacgattagacctgcattctctcatctggctcccatggtgcccgtctcctcccccaaattgtggcggtgattctctcccacacaacggccctgcagaggaggctcgcgagcctcgtcggcacagttttccttttacagatggagaaaccaaggcacagaggccctgctgtcagccgctagcacaggcagctcggctatatgagaagggacgaggatccccttccacagatggggacaatgaatcactgggggcttcaggaacccgctgtccagcagccacggctgtcgggctccaagcctgggcactgcccaccaccccacgcgactgccccaccccaggaaggctcgtggcttcagcggattgtagactggacagacgtgggggtgtttagtgcctgagttaggctgagttgtgaattcatgaggtataacaacagggaccaggggccaaaatatgtgatctggtcttcagtcaggcagaacctgatacggagccttggacaagacacttcccctctctgggcctcagtttacccaactggaaaagtagggagcctctaggtcagcactgttcaataaccatggctgtgtgtggtgattgaggacttgaaatttggctggtgtgactgaggaactgaatctttcattttaccatatcttaatgaactaaattttagttttaaaaacagatgctctaggtgggcatggtggctcacacctgtaattccttcgctttcggaggctgaggcgacaggatcttttgagcccaggagtttgagaccagcctgaaaccctgtctctagaaaaaatacaaaaacattagccgagtgtggtgatgtgggcctgtggtcccagctactcaggaggctgaggtgggaggatcacccaaacctgggaagtcaaggctgcagtgagccgagctgtgatcacatccctgcaccccagcctggataacagagtgagaccctgtctctaaataaatatatatatatatatatatatatatatatatatatataataaaaacggatgctcaatttagttactggaaaatttttatgtaggtttggaacaacttgggtttgtgaatctactttttcaaccacagatttatgaaatttatatctgagatctaggatatatatctgagcagatatatctgaagaaaatttagcatctgaattgggatgttttatagcactggatttcgaagacttagtacccaaaaaagaatgtaaaatagctcattagggtttttttattgatgacattctgaaatgatcgcgttttgcatgtattgggttaattaaaatattattcaaattaatttcacctatttcttttcacttatttaaatgtggtttttagaaaatggagaaatgacatattctaattggaatggtctagatccatgatttgcatttcagatgttgcaggagttaaggatttattgtgttttccaggcaggcttttgcagcctggtgcacacagtaggtgtatcctgtcttccaggtgcatacagtaggcatccagcaattctcagagagagctctggtggctgtctgcaggaggttggagggggtgatgccgtggtcaggtccaggcagtgctgctcttctcacccggcccaacaacacctgtacttgtgtttccagagtgtgtttagcggggtcactaaatgatttatcacccaacccaggacagtggaagagggtgcgaggagcccatgcactgactggggctctcctgagcagaccaggatgtaaggtcctctgtgactaagccatgtcagccatcaaaccacaaccactatgtccccaccccagcgggagcagtcttggaccccactcccacctgatgtcctccagaaatgactcaattctttgaaccattgtgacaaagaacatggttcatggtctcagttatctcttgctgcataacaaaccaccccaaaggagagtggctaacaaaccacaatttagcatttagaaaaccaaaccaaagcaaaactatttacagttggctttctgtatccatgggttctgtatccatggactcaaccaacttggatcaaaaatatttttttaaaaaaggatgattgcatctctactgagcatgaacagactttctttttttaatacatgattaatgtatatttattagagagcaaattcacgaaactctccacactgaatacagattgattatggtgacttagcagagttgtccatttggggcctagtgaggagtagtagagatttctccttgtcttcttagaggatgtttcagaaggaaatttgtaaaaagcggtagtgcctacaagagcctggccttggatgttctcattggaggtgagttggtatgtcagagtttttgatctgtctgagtagagaaaaaggaactggagagtgatagaaagattgatggaatgagggagatcagtggagcagcagacatgcccagtctttggcatggtaaggatgcctgtatccagaactagctacataactagctacattttcatggctcaatgcaaaatgaaattgtggggcctcttgttaaaaaacaatcaagtgggccggacacggtggctcacgcctgaaatcccagcactttgggaggctgaggcgggcggatcacgaggtcaggagatggagaccatcctggctaacacggtgaaaccccatctctactaaaaatacaaaaaattagccaggcatggtggcgggcgcctgtagtcccagctactcgggaggctgaggcaggagaagggcatgaacccggggggcggagcttgcagtgagctgagatcgtgccactgcactccagcctgggcgacagagtgagactctgtctcagaaaaaaagaaatccttgtcacaagtggggcgcagtggctcacgcctacaatcccagcactttgggaggctgaggcaggtggatcacttgaggtcaggagtttgaaaccagcctgggcaatatggtgaaaccttgtctctactaaaaatacaaaaattagccgggcatggtggtgcacgcctgtaatcccagctactccggaggctgaggcgggataatcacttgaacccaggaggtggaggttgcagtgagctcagattgtgccactgcatgccagcctgggcaccagagcaagactccatctcaaaaaaaaaaaaaaatcttcgtcacagaaacagacctgggggacaagtcttgaatgggctgggccagaaccaggccctctctgtggaatatctcattcaatccctaaacagcccaggcaggctggcttggccacgttatctactttaagatagagggaggctgagcacgtggtccgaggtccctagtccaaggctgcaccaggactgcctgagcctgcatctcgtgttcatcactgggccctcgtcccacaccaatgaacagcaagcaggtgaggaggtgacttcaaaacacaggttgggccaggcatggtagctcacgcctgtaatcccaccactttgggaagccgaagtgggcagatctcttgaggtcaggagttcgagacaagcctggccaacatggtgaaaccctgtctctactaaaaatacaaaaattagccggggtggtgacacacacctgtaatcccaggtactctggaggctgaggcacgagaatcccttgaaccgaggaggcagaggttgcagtgagccgagatcacaccactgcactccagcctgggtgatggagcaagactgtctcaaaaaaaaaaaaaaattccagagggtaaccgctataaaacctctccactcgtgctacataggtgtttctctaagcactgtatgagcatccaatgttcaccctcatggtgcccggttgagattggtgctccattctacagatggggaaactgaggcaccgagaatcaggatagttgacttaagagcccatggcaaagggagtccatctctgtttccacgtgggcctcacacctcttagaggcaagagtggcagtgaagggagctgtggtccccagctgtcctgcttcactgctggcctccctccagcttctgcctcctgaccagctccctgggttgcccagacccctccaggctgactcacctggccctgggcttggggccaagtctctctctgcctagaaacttctggccagagcagcctgcaagcgcataccctgggaagcctcaggaactaacggcaggtgggagccagcggccgacccccaagccctgaggcagccaccctgctcaatgtcatccttaagagtccaggggcacaggccagtcctcccgccgaaatggaatagtcctcctgggagagaggccccctttcagcatgcacaccacgcccccagcagccctcgcgggcagcatcgccttgccactgccccagctctgctttgctgtgactcccgcttaagatatcaaagctgcggggccacaatgccccactgaaagctgagtcacccaggttttgtgacaccaccaaatccctcctgctgtctcgctctgagcccagggctcctagtgccagatgaaaaggaaatccccagccacgggtgggacagggaggcctggcggggccggtgccacataaaggggccttgttccgaaatcaaaagggcctgaacaaagagcagagagaagaaagggctggggctgggtggggggcagctgcagtctggcgcaccttgaatggctcggtgtgccaggtcggcccacctctcctggctggcaaagcagcccctcctccaccacctccctggcagccctgggctttttccagaacccctgctgcaggaggaagggagggacaaggttggggtcacacatggagccaagtagcagagcctgggacccacaggctgaccacagccagcaccctcccagcaacagcagcagcaacaaccaccagcaccaccacaacacaacagcatcatcaacaagagcaacagaaacaaccaccaccatgacagcagcaacaaccacaaaagcagcaataactaccacaacgacagcatcatcaacaacagcagcatcaacaacagcatcatcaacagcatcatcaacaacagcagcatcaacaacagcgtcaacaacaagagtaacaaccacaacagtagcaaccacaaaagcagcaacaaccacaacagtatcatcaacagcatcagcagcaaccacaacaacagcaacagcaacaaccaccaccactaccacaacaagagcaacaactactacaacagcaacaaccaccacaacagaaacggcaacaaccaccaccaccacaacagcaacaaccaccacaacagcaacaaccaccacaacagcaacaactaccaccaacagcaacagcatcatcagcaacagcaacaaccaccacaaaacaacagcaacaaccacaacagcaacagcatcatcaacagcaacagcaacaacaacaacggcagcaacaataatagcaacagcatattcaacaacagcaacaaccacatcaacagcaacaaccacaaccacctcaaaaacaacagcaacaacgacagcagcaataacagcaacagaagtgacaacattagcagcaataacaaaagcagcagtgacagtaacaccagcagggacagcagcaccctgaaaacagcagtcatagcggcacccccactcccaccagcagcagccacggcaacaacccaggttcctcgtccatgaaataagcgtgctcacagtggtcctggccctgcaaggctgttgtcaaggttaaatgtgttaattcacatagagctcttggatgagtgagggcagagagcagccagcacttaggaagctttcaccgtgccccaggttctattttaaacaccgaactcgagctgcttccttcagagagggatatgattgtcatctctcccatttcacagatgagggcactgaaacctggagaggtgcaggagactgccctctgctggagagtcgggcagtcaaaatccgaaccacaggcaatttgatttcagaacctgcacctggaaccaagtggccaggctgcctcccaagctgatgaaccaggagagtgcagtgtgcaaaggaggctgtgaggctgtgctcacaggcagaccctgagtctctgcccagtgcacaccagtgctgcactcccgggaccaacaggaaatatctgcctggacttttaatagggcattccaatttgacctgtggtgcagaaagaagccacaaagaaatctgcactgggaaattgttcatccattggctgttaacttgaaaacgctgaaaacccaatgctggccaaataaagccggtctgagggctacagctggcttggggacttcagtctgggacttccaatgaaacaaggacagaacccagggcccagagccaggctgccctggtctagatcccagctctgccaggtgccagaaatgaaacttctgtgcctcagttcctcaatctgcagaatggggatattgacatttaaaggtaacctaaggcttaacaggacagatgtcagcacaaggagccgtagctccagggcttttgtcctagggaccccagaccccgtgcccctgagggcacttgcagatgggccaagggccccacagtccactcttcctggcttctgaggaggtatgagcttggcaccttcctcagtttacctgcttccactgagctaggggtgcctccatccctatgttctgactcttgcatgggcaggtacagcctagagcccaggtctccccatctcaatgtgcagattttgctggggtgggggcggctccgtgacctcttttagcagcaaaaccagctttttatccgacactttcaggcagacttcaccaactcagccccaccactccccacagcccaggcatctttttttgttttgtaaattgcctttcagaaagccaccctggcaggctttgatgtggccctttgataatttagcctcatcaataggcaggccctgcccaggaaggctgactttgaagagggagccttctcccaaggcaggaaaggcaggggctcctgtctcaagcgtagggggagcaaaggagtgggcaggggaaggggttaactggctatgaagcaatttacacagtgactctgtcagcacttgggtgaggccagggctctgacgttcccaggtcatggagtgggtggtggctgaggatggaaccttacagaggaaatccagccgaggcctttggagatgtgaaggtttggtttgcatttcagctctggcacttttcagctatatgcccatggctggtccctcattcttcatgagcctcagtttccccattttaaaaatgaggaggggggtgggggaggaaaatggcaccattgtagtgaagatttaatgagatgatgcacatgacagtttggcacagtgccaggtacacagcaggtgctcagaatgagctggaaagatggtgatgatgataatgataatgatgtgtgatgatgattatgatgatgaagatgatgatcatggagacagtgttgtcaaagaagatgatgatggtggtagtgattataatgaagatgataatgtcaatgaaggtgacaaagaagaagataatgaagatgctgatggtgtggtgaagatggtgtgatgatgaagataatgatgtcagtgaagatagtgaagagtttatgctcccttgtgatgtgaggatgatgttannnnnnnnnnnnnnnnnnnnnnnnnnnnnnnnnnnnnnnnnnnnnnnnnnnnnnnnnnnnnnnnnnnnnnnnnnnnnnnnnnnnnnnnnnnnnnnnnnnngatgatgatgatgatgatgatgatgatgatggtgaagatgatgatgatgatggtgaagatggtgatgatgaagatggtgatgacggttatagtgaagaagatgaagacagtggtggtggtggtgatgatgatgaagaagttggtgaagatgcttatagatatggtgaagatgatggtgatgaggatgttagtggagaagaaaaagatggtgaagttggtaaaaatggtgatgatgatggtgaagatggtgaggatgaagatggtgatgacgatgatagtgaagaagacgaagatggtggtggtgatgatgaagatgattaagaagttaatgaagatgattataaatatggtgaagatgatggcgatgaggatgttagtgaagaagataaagatggtgaagatgatgaagatagtgaaaatgatgatgatgacggtgaagatggtgatgatgaagacggtgatgataatagtgaagaagatgaagatgatggtgatgatggtgctgctgctgaagatctaatccaattctctctttagaggtgcagaaaatggagaaagtaacaacgcaattaggggagagacagacctggcacccgaggctccttatgctcattacagtgctctctcctctgcccttgttaccaccttgaattgaagcaactggtctagtccttgcatgaactcctgggattcatgggtgcccagaattagatgactcaggcataacacctcagatgtgtctaatctgtcagttgcctccttccccatatctgtctcccccttccttctttagtaacagcagctcttgtactttggtgtgaccatatgactgaaatctggccaatgagataggagcagaagttcttggatgggatttttaagagaatccctttttgccttcactccagcttccttccccctgcctgggatgccaataggacggctggagctggagcagctaccttggatcatgcagccatgagaaaggaagtcacatgcttccttgggagcagacaggtagaaagggccagatgaccatagaacatcacaccagtgctgagtgctcacctgtgctgcagaaacaaagcctctgccctgtggagcatttgcactggttgagagagacaggacataaaacaataggtaagcaaatgtagtcaagtcaggcattgtaaagccaagtacaaggatggagaatgatcagattgttctgcttttgatggggagtggggaggcagtccatgcagagggaagaagggccttggaaatgtgtctgaggaacagcgaggggtcagggatctggggtcatgtgaacattggggtctacagtgggcaggatagtagcttcccaaaagacacatccatgccccaattcctgaaacctgtgagtattacttcatatggcaaaagagtgaatactacctcactggggaaattcaggataagttaagaaccttgagagaggcttatcctgaagtacccaggcgggccctaaatgaaatcacatgtattctttttttaattttttttgaaacacagtctcactcactctgtcgcccaggctggagtgcagtggtgccatctcggctcactgaaaactccgcctcccaggttcaagcgattctcgtgcctcagcctcccaagtagctgggactacaggcgagtgccaccatgcctggctaatttttgtgtctttagtagagatgggttttaccatgttggccaggctggtctcaaactcctggcctcaagtgatccacctgcctcaagctcccaaagtgctgggattacagggatgagtcaccatgcccagcctcacatgtattcttataagagagacacacaaaggagaagacacagaggggagaaggaggccagaagacagaagcagagattggagtgacacacacagccaccctaagctgcaaaaaacaaggattctcttttggagccttcagaaggagtgtggccctgtagacatcttgattttggatttctgcattttggattctctctcagcattgtgagggaataaattcctgctgttttgcacacccagtttgaaatcatttgttacagcagtccttggaagctaatacggaggcaagttgtggcatgggggccagaggctgggaggggttcagtcaggcagggcttcctaaggtgccctggggactctggaccttattctggatgtgaggagaaatcactggaggaccaagagaagagcatgatggcatctgatgtgcattttaaaggacaggtctggctgctgggtttctggaagggtgctaagaaaccagctaggaaatgtctgtggtcatccagttataagaaggtgatgcctggcttagagcagtcctattcaggggtcaccccatgcacaattggtcagttacattcagtgttatgagtggttttggaaagagatgagcatggttgggtccttctaataagctaaactgaccagacatgatttcagtgggaagtaagaggccatgtggcctctggggcagagacacagttgtttgtaaatacttagaaaactgggtgtgatatgttcatatttttaaacatttcacttccttttcagtcaatgatttttttgaatgacaaagtggaacccccaagttgtttttacacaaatttacagagaggtcagtaagctgtagtaagttgaggcagaggagaagaaaagaagaggtaagcctaggaaaattcaacccacagtctaccatagggcaacaaaagaatctggctcagctgaccctgtagcttaaatccgaggaaatacacaaggtatgggcaccaacaagagctccacaggtacaaagcccagctcttaggacacaaaagcccagcaggtaaatactctagtccattattttatcaaaggcctttgtagctgggtgagaaggcaaatctaccacaattgaaatgagtttggataaaagaccatttattctcaaaatccctgccccttctccctctacactgttgtatacaccacattgcctcttctctgctctttaactaattcctggcttcaggtgagcatatacccaaggagagcagagtatccagaagaccttggactttaaggtgaaagaagactttcctttgggccacccaagaggagcagtaaaataaaaacccatcaaggcaactgggttatctatctaaggggttgagcagagcagggggactcaggaataagcagcaggacaggaacttggaaaatagttccagacagagcaggatatctcattccagtgtgtattagtctgttttcatactgctataaaaaactgtccaagactgggtaatttataaaggaaacaggtttaactgactcacagttcagcatggctggggaggcctcaggaaacttccaatcatggcagaaggtgaaggggaagcaaggcacctttttcacaaggcaacaggaaggagaagtgccaaccataggtggaatagatcttgtgagaactcactatcacaagaacagcatgggggaactgccccatgagccaattacctccacctagtctctcctttgacacatggggattatggcgattataattcaagatgagatttgggtggagacataaagcctaaccatatcacagtataagactgaacctggaggcctctactgtacctcagaaatatgatactgtgctcactatagttgggggaacttttaagggcaccaaaacgctgccacgtcacccagatttctctcagctttgctccaagccctatgcatccaagatcaccacttctataatgcataacttccctcttcttatgctcctttagctcccagaaggcaaaagcagagagctgtcacacatgctgagcatctattatgtgccaggctctgtgccaggggttttatgtgttttatatcacttaattctcactgtacctttgtcatataggaactattgtgatcctccttttgcagatgaagaaactgaagcttagagaagtaaaaacttgtccagactcacataagtctgttcttacagtcttggaattcatccacttattctccaagtatttgttgaatgctgcttgatgcctggcactgttccaaacacagtgtatagtgtatatcttagtgaacagaacagacacaaacccctgcctcctgagggaggtttctggatgctggaaacatccagatttcttttcttttcttttcttttccttccttccttccttccttccttccttccttccttccttccttccttccttccttcctttctttctttctttctttctttctttctttctttctttctttctttttctttcttcctttctttcagatgggctctctctaagttgctcaggctggcctcgaactcctgagctcaagtgattctcctgcctcagcctcctgagtagctgagaccacaggcatgcaccaccatgcccaacctaacatcctgattcttcagcacaagtgtgttcagtttgaaaatcatcaaactgcaccctcatgatctgtgtatttattgtatatatgttgtacttaaaaatttttttaaatccctgccttcatggaggttatgtttggtggaagaattggggggtttgggagaacaataaccagtatgtggtaaactgaatcatgaccctcaaagatacccaggtcctcttctatagagcctgtgaaagtgatcttatatggcaaaggaaactttgcagatgtggtgaaatcaaacgtatggagatgggggagattatcctggattagtcagtgggccctaaatgggaccacacatttccttataagagggaggcagagagaaatttgactacacaacaggaagtagaaggtgggatgatggaagcaagagattggagtgatgtggggaagaggccacaagccaaggaactggggtggcctccaaaagctggaggaggcagagaaacaggttttcacctggaacctgcagaagaaaccagtcctgtgcacaccttggctttagcccagggagaccaacttcagacttctggcctccagaacttgaagacaatgaatctgtactgttttaagccaacaaccaaatttgtggtaatttggtacagcagcaacaagaagctaatacacaagttaattaaatacattacacagcattacatattatcttggtcacattcgtttctcatggttctgttctgtcaatttatttttatttatttttttattttttttgacagagtcttattctgtcgccaggctggaatacagtggcatgatctcggctcactgcaatctctgcctcctgggtttaagcaattctcctgcttcaacctctcatgtagctgggactacaggggcacaccaccatgcccagctaatttttgtatttttagtagagatggggtttcatcatgttggccaggatggtctcaatctcttgacctcgtgatccacccgcctcggtctcccaaagtgctgggattacaggtgtgagccaccacacccagccaacttttttactgcataaaaattttcatgggccaggcttggtggctcatgcctgtaatcccagctctttgagaggtcaaggcgggcaaatcacttgaggtcaggaattcaagaccagcctggctaacatggtgaaaccccgcctctattaaaaatacaaaagttagctgggcatggtggtgagcacccgtaatcctagctactcaggaggctgaggcatgagaatcatttgaacccaggaggtggaggctgcagtgagcaaagattgcaccactgcactccagcctgggccagtgagactctgtctcaaaaaaaaaaaattcaaaatagaaagttagagattaaaaaaaagaaagattgggaggcaggtcgagtgtgagtttaggtcaccctttcaaaggaaggagctgaacaagatagaggggaaccacagctcgagtgaagagaaaaattctgacagttttttaattgtggtaaaatactcatagcttaaaatttaccatcctcatcatttttaagtgcacagttcagtggcattaagtacattcacaatattgtgcaaccatcaccaccatccatctctagaactttctcatcttcccaaactgaaagtctgtccccttaaacaccaactccccatcccctccccgagtcctgggcacccaccattcaactttctgtctctataaatttgactactctgggtacatcatataagtggaatcatacagttttttttaactgactttcaggtttctctcaaatgagataaataataatgtatattttaaaaagaggctgggggtacagtggcttatgcttgtaatcccagcactttgggaggctgaggtgggaaaatcacttgagtccaggaagccgaggctgcagtgagccatgatcatgccactgctcttcagcctgggtgacagagcaagaccctgtctcaaaaaaaacaaaacaaaataaaataaaatccaattaagatggacaaatagaggattctagagagcggggagcactagtggatttgtgatcctgggtaggaggcaggctagtatttgacatcaagtgcagagatgagagcctgacgtctgtgcagagtaaccaagaaagggatgcatgtggggacaggtgtaggagcttggggatcagagtggtggtggtggcttgtgatcgttctttctgatggcacctgcaattctcagtgaagcagaggacaaggtgatcagctgaggatgaggacagcggaggaggcagcagagattcatgcagaggagagaacccagttatccattagaagactgaggaaagaacagaatccaagaattagggtgaacctggtagtggctaagcatagcctctcctgttttccaagcattgttaatcttttgtctcctgttttccaagctccctgggagctgtatcctccaaagtcctcataagaatagaaattcaaaggagagccatcctcagggcatatggtggtcttcagatcaacttttgctgaatcttcagcacagttggggcactgtacatttgtggctgagtgtaagcagcacacatcatttgaggctgacttgcagcaggttctccaactcttggcaggttcctcaccagcctgctctccctcctgaaagcctcagtctccaagggggtctaagcagacaacaaccaccttggtcagaaaagagacggtcctaatgctagtggatggttctagaaactagaaatcccctccttggcaggtcacaggagtgcctgaagggagccagagggtggagagactccaaactgcttcctgctctccaccctccatgccccatggagtcctccagacgtccagccaggtggacatctggggtttgtggttctacaacagctctaatccttgctactttgtgcacctctaagagacacggcatcaaagcctgcactggtcatgctgcctgttaaaaggggaacctcccttttgcacactaactaaagtcaaaacttacctttttgtcttctgttggagtcaaagaggcaatgaggctgaggctgtattccatttcctgcctccaggcttttgggcacccggcccctctacctgggaaccccgccttcctttctgcctggaggactccttctcaaccttcaggagctggctcccttgcctctgtgaagggtcagggggtccccaagatcaccctcagtttcaataattcactagaagggctcacagaactaaaacaaaaggtgttacatttgtggcttattactgtgaagggctacacactgaaatcaacaaaagtaagagggacatggggcagcatcctggaaggagcaggcatcagctcctggttggtctcttgctgtgaagtcgcatgaacagtatttaatcctgctggcaacaatgtgtggcaacacagatggagaactgccaaccaggaagttctccagagccacggagtgcagggcttcatgggggtccatctcacagacatgcagagtccacatgactgatcttagccattcatcctccagcctctccagagctcaaacagatccaagaggctgaaggtctcaggtaaacaaagacattgtcaccaggcagtatatttcaagaactcagagttccttctagcccaggaccagccctttctttggaacatgcaggattttggcaatcccaaacatttccattttatgtgcctttccttgcttcattgcagtggcttatatcttcagtgtgatttgaacagaaccagtgagagcaggcatccatgccttgtgcctaatcttaaaagaagtgctcagtttttcactattaagtatgctgttatctgtggggtttttgtagaagccccttattatatatgaatactgaattttgttaaatttttctactgcatctaatgagttgatcacatgatttttctcatttatttttattaatatagtaagttactttaattggttttcaaatattaagccaaccttgcattcctagaataaattccattaggtcatgatgtatcatcattttgtctatattgctaggcttgatgtattattattttcttcaggattattgcatttatgttcataagggacagtgttttgtactaaccttttcctgtaatgcatttccagagttatgcttgccacataaaatgaattgagaattgtttctcctcctttattttctgagagtgtttacataggattaatattaattcttccttcaatttttgatagactgcaccagtacaaatatattgtggaggagactttaataacaaatgcatttctttaatagatacaaggctattttgtattttctatttctcttcttgagtctattttagtaatttatgtccttcaaagaatgtgtatgtttatgttgtcaagtttattggcctaaagttgtctacaatgtgcccttattattcttttaatatttgtaggatctatatgatgccccttctttcattctttgtaatctgtattatttctctttcttgataaatctagataggagattgtaattttaaaaaactctttacagaacctatttttcttttgtcattatcctctattttttaaattttattccaatcttcatgatttctttctttttaaacttattttaagcttaattattcatctttttctagtttcttatggtagaagtataaataattaaatttatatatttgcttttttctaatgtaagtatttaaaactatagctccttccagaagtttttgtgttttcattatcattcaactaaaaatattttataatttcctttgcaatttcttctttgatctacatattagttaaaagttttttgcttaattcagcaatcaaaaaagccaccaaacaacccaattcaaaaatgggtgaaagacttgaataggcatttttccaaagaagatacacaaattgtcagaaagtacatgggaatctgttcaacatctttcatcaatagggagatgaaaatcaaagccaccgtgagatactccttcatgccctcaggatggctgttatttttagaaaagaaacagaaaaggtgtgttgacaaggatgtggagaagttggaaccctggtacattcctggtagaaactggaacccttgtatgttgctggtagaaatgtaaaatgatgcagccactgaagaaaacaatttgatggttccttagaaagttaaacacagaatagccatatgatccagaaattttattcctaggtatatgcccaaaagaattgaggccaggtgtggtggctcacccctgtaatcccagcactctcccagcactctgggaggctgaagggggaggatcacttgagcccaggagtttgagaccagcctggcaacatagtgagaccccatctctttaaaaagtaaaaaaaaaaaatagccacagctcactgcagccttaaccttctgggctctggtgatcctcccacctcagcctcccaggtagccgggactacaagcatgcaccatcatgcctggctaatttttgtattttttgtagagatgagttttcaccatgttgcctaggctggtcttgagctcctgggctcatgaaatctgcctgcctcagcctctcaaagtgttgggattacagcactcaggtggctgaggtgggaggatcacttgagtctggaagtcaagtctacagtgagctatggctgtgccactgcactccaagctgggcaacagagcaagaccctgtctcaaaaaaaaaaaattagaagcagggactcaaacagatatttgcatgccagtgttcataacaaaattattcacagtagccaaaaggtggaaacaactcaagtatccatcagcagctgaacagataaacaaaatgtactacagtagtcctcccttatccatggttttgctttccatggtttcagctccctgtgttcaactcaggtacaaaaatattaaatggagaactccagaaacaaacctttcataagttttaaattgcacgccattctgagtagtctgataaaatctcacaccattctgccccatcccacccgggacatgagtcatctctttgtccatcatatcctcattgcctgccccttagtcacttagtatctgactctgttatgagatggaaaaatgtaatatatatagggtatgatagtatctgtggtttcaggcatcccactggggatcttgaaatgtatcccccataggtaaaatgggactactgtatctacctacaatggaatattattcagccttaaaaaggaatgaaactctgatacatgctaccatatggatgaaacttaaaaatatgatgctggccgggtgcagtggctcacacctgtaatcccagcactttgggacgccgaggtgggcggatcatgaggtcaagagatcgagaccatcctgcccaacatggtgaaactccgtctctactaaaactataaaaattagctggacgtgttggcacgtgcctgtggtcccagctactccggaggctgaggcaggagaatcgcttgaacccaggagatggaggctgcagtgagccgagatcgcgccactgcactccagcctggtgagagagtgagactccgtctaaaaaaaaattttttttaaacccatatatttgtatatatatatatgatgctaagtccaatacgccaaacacaaaaggacaaattgtatgatttcatttatgtgaggtacctagaatatgcaaatttattcagacagaaagtgaaatacacactattaggttactaagggcttgagggaggaggagggaatggaaatcattgactagtggtttacagagttactctttgggatgatgaaaaagttctggaaatgggcagtggtgatggttgtacaacactgcgaatgtactgaaagccactaagttgtacacttaaaaataattagttgactaataactagttaactaatatttagttaattaaaaataattaattaataaaataaatagttgataattttttgatatctttttattaccaattttaaatttcattccactgtggggagaaaacatactctatatgatttcagtcctttgatatacattaagacttgttttattgcccagaatatgagctatgagctatgttagtgaatgttccctgtgcccctgaaagaagtgtgtgttctcgtcaatttcaatagcatgtcctataaatgccacttaggtgaagttggttgatagcattgtttaaatcttgtacactattttttcctagtttttattgatttttgttaatgatttagtgaagtttcagtttctcaactacagtgtaaatttatatgtttctctctttggttttctcagatcttgctttatgtattttgaagctgtgttgttcgatgtatacaattttaggattgttatggtttcctcatgacaatccttataacaatttctgaagaaataaccccttatgcctctgataatactccttgccttgatgtcgactatatcaatatagtaatactagctttcctgtgtttatcatttgcttatgtctttttccattatttcatttttgacctgtctttatatttaaagtacatctcttataaagaacacataattgattctcattcttatatccaggctgacaacctttccccattaatatgagtagttagaccaactgaatttaatgtagttattaatatggttgattttaaatctaccatctttctagttgtttccatttaccctatctgttctttttacttttttctcctttcctttattttaaattaattgaattttattagtattctattttgtctttgtgcattttttttagctataaaactttgttttagtttctctggttgctgtaggtattatagtgtgtattgttaacttttcacgatacaccttgaattaatattataccacttcacatgtattgtaagacctttacaacaattatgctttttttttttttttgacagagtctcactctgtcacccaggctggagtgcagtggcacgatctcagctcacttgcaacctctgcttcccaggttcaagcaattctggtgcctcagcctcccaagtggttgggattacaggagtgtgccaccacgcctggctattaacaatatacttctatttattcattcaccttgccctttgtgccattatataatacattttatttctgtgtatgttataaacccataatatactgtgattatttttgcttcatatcagagataccatcaattatcttgttcttgtttgggtaatttccgttgagctgatttcaagttcatgacattttcttctacactgttaaatctgtttttaggaccatccagtgaatttttgatcttgtcatttcagacattgtacttttcagatctgggaatttccatttacttcttttttagttttcatatatctgctgtgattcttcatctctgtattcattatgtgcattttcttctttaaggcctggagcatatttataatacagttgacccttgaacaactcaggttttacctgtgcaggtccatttataagtggatttttaaaaataaaagttacagcaagtgcacctgcctctcctgctcccccttctacctcgtccactacttctacttctgtcacccttgagagagcaagaccaactcttcctcttcctcttcctccttctcctcagcttactcaacatgaagacaatgacgatgaagacctctatgatgatccacttccacttaatgaataatcaacatattttttcttcctcatgcttgcctgcctgcttacctctctccctccctccctccttctctctttctctttctctctctttctttcttttgagatggagtctcactctgtcccccaggctggagtgcagtggccctatcatagttcactgcagcctcaaactcctgcactcaagctatcctcccatctcagcctcctgactacaggtgtgtgccaccacacccgactaatttctaaattttttatagagatagggtcttgttatgttgaccaggctgccttatggttttcttaataacattttcttttctctagcttactttattgtaagaatacagtgtataacacgtaaaacttacaaaatatgtgttaatcaactatttgttattggtaagcttctggtcaacaacaggcagttaagttttgagggattcaaaagttaaacatggatttttgactgtatggggtgttggcacctctaacgctcacgttgttttaaagtctgctaaatcatctgtgtcatctctgcgtttgtttctattaattactttttctcttctgagtatgggtcacattttttctgcctctttgaatgtctagtaatttttctactgtacgttagacattgcaaatgctatgttgttttagtctggattttattgtcttcctttaaagaatcttgagaatttttctccccttaacaggctgttaatttattggtgaaacagtttgattgaagattattttcattccttgttattgtgggcctagaagagcccttgttctagagctgcaatggcaagaatgctgctttaggttgggtttggctgccttgtgcctcagtttagaaatttccctcaagtataaagccagaatgaaggcggggcttattcccatatgtctttccccatgaaggaaaacagccctgtattttctgttgtctgatgccttcaaaagttattttaaatattgcacccagttgaatagttgtttatgatgaaagggtgatcttaatactcagtacaatatggttggaaccaaaattactttgcttcacatagttttttttttagctttttattttgaaataattttcaactgaaagaaaagtggcagtaaatagtcccaagacttccttacccagcttcctttaatgttagtatctcaagcagccaaatataattgtcgaaactaagaaattaacatgggttcaacactatcaactaaactacagacctgattcaggtttcataaatttcatcgctatgtccttttcccgttccaggatccagtccaggacatcatattgtatttacttgtcatatcctcctagcctcctcagtctgagacacttcctcagccttgtcttatctttcgtgactttgacgcttttgaagagtgatggtaagttatttagcagaattttcctcaatttgggtttatctgatgttatctcatgataaggtggaggttatgcatttttgcaagaataccctagaagcaatgcccatgtcactgtatctcattagtggcaaagttaacctagatcacttggttaaggtggtgtcttccttactacttttcctgttgtaattaataactttaggagcaatactttcagactatgcaaatatcctctttctcctcaaacttgtacccactaattttagcctcaaccagcagatattacctgtaacaattattgagaagtgaggccagctggactttctgggtcgagtggggacttagggaactttcctgtcttaaaagaggattgtaaaatgcaccaattagccctctgtaaaacgcaccagtcagcgctctgtaaaactcaccagtcagcgctctgtaaaacacaccaatcagtgctctgcaaaatgcaccaatcagcaggattctaaaagtagccaatcactgggaggactgaaaaaagggcattctgataggacagaaacagaacatgggcggggccaatagggaaataaaagctggccacctcagccagcaggggcaactcactcgggtccccttggatgtggtggaagctttgtccttttgctcttcacaataaaccttgctgctacttactctttgggtccgggacatctttaagagctgtagcacccaccacgaaggtctgctgcttcattcttgaagtcagcgagaccacgaacccaccagcgggaaccaactctggacacattatgactgtgatgactttgttgttctaatggtgattttctattttccaaattctttctacatttattaattggattctttggtaaggaagagctgtcgcttcttctcatttatccctttactccccagttctaaggtaccagatccatttcttcccatgcagcaggggaggcttttgtattatacgaacttgcagttcttgtcttttctacagactggcccacgggtcacccacagcgacacaccttcaggcttcctacacaaatcctccgatgttctcacggtgtaaaagctgagactgtgatcacaagtacaattttgtttaatctgagagaatgttttcttctttaaaaaatatacacacaaggggatggggtaataccaggaagaaaaaatagccacgtgtagttttggaggaaaatgtgagctctacctctgagctggactccatgttgccctctggagaggatcctgtttacagtgcgtctctcctgcttctggccccaccccgcttcaagtcttgtttgttggtcctcgtggttaaatgactgcagaaatgcccctaattattttcctccccaactcaacactcctggttgcagcaattcctagcaagaggcaaagtctatttccctgtcccttgaatcagggttggttttgtaacttgctttggccaaaaaaatgtgactgcagtggctgggtgcagtggctcatgcctgtaatcacagcactttgagaggcggaggagggaagattgcttgagtccaagagttcgagaccagcctggacaacacagtgaaaccctgtctctacaaaaaaacacaaaaaattagtttgtgttgccatggtagcatgcacctgcagtcccacctactcagaaggctaaggtgagaggattgcttgagctgggaaggcgaaggttgcagtgagccatgattacaccactgcactccagcctgagcaacagagagagactctgtctcaaaaaagaaaaaaaaaatagaattgtggcagcagagaccagccaccaattctgagcctaggccctaagaggacccaggactcttaccaggggctggcctgctggaggaagagagacagtggcccagtggtccaccgtgactccagctgagagctgcccaatcttcaggcatggaagtgagggcatcctaaaccagccagcccacctgctgtctgcagacatacgatgagtccagccaagatcccccgagcttcatccagataagcaggactgcccggctgacccctgggcttgtgaatagaagaagcactcctcatgtgaagtcaccgagtttggagtggtttgctgtgcagtgataactacttggtactgtccttcctgagccactctcactctaaacccagatcccgcaacacctccagcagatccccaggactcttgggatgcagtgcacggagcattcgcttggtccagcccattataggagggatgacaccaagagggatcaggtgacctgcccaaagggaggcagcaaggtacaggcatattgtggggctagaaccctggactccagcttcctagtcgagtgctttttccaggaccctttctgcttttactttgacaacttcttccccagagctcagctctcactcctcagaccaagtagctccaaatccttgggctcacctgcacagacccaaggctgaccttggcaatccagaactcctgcccatctgggacaggtgtcaaaaacgagggctcctcttgcttcacctggatagtggccacctctacctctctctcatctttctcctgcaggaaacggccgtggtcctgccagcccccgcttttggaggggcctccgacactctgggcaaacctagtttctgaggactcattgccccagaagcattggctaagtgaaagattaatgaacagaggttcataggatctggaaaggcttctaactggaatgatctgaaactaaaaattaatgacaatggcagccgcaatgtaatagctgtgtggtttattgaggtcttactgcatccccgatggagctgagtgtgtctcatgctgtgtgtcatttcatgcatgcaacaactgtatgatacaactactattatccctgttttacggggaagaaactcagagaaatgcagaaattgtccatcatcacactggatcacccccttggagaagcttccctgaccaccctagcaaggacacaagccccaccactgcctgcccctgagcactggtcacattggacatctcacccacgcattggtttactgtccggctttcccttgtgggacacacagccacatgagcccagtctgtcccgctcacagctgtatccaaggcctggagcatggcaacaggcaaacagagacccgtggagggaatggtcggggaatattggggttgtaagaatggccctcgtggaggggagcaaggtgtcaatcagctgatgacatagtgcatatttgatgaccccttggtgggtgcaggttgctggggacctggtgctatcgaagattacagatgggctggcaggggccctttctctcttatggaatcaagcacggcccgcaaaggttgctactgagccggcctgcagtggccccgaccaagcagtggccccggctgcagccagggcctttggaaacctcatcaaaatgaagagtggcctcgtgcgtgctgaccggggggctggtggcccacggagacggcattcccagagactacaaggagccggtggccctttcttcaaccgccaaacaacagccaatctcggccccacaaagacgggcgcatgaatcacttctgcagagactgcatttcctttgaggggctgtcactggcaccgggcggtaagaaaacattttgtcatgcacatcagctgcctttctctgggccttgggtggcccagggccactcccccacccaaggggacggctgtcccggtcagtgctcatccatcaagctcataatgaggtggcaaattgctgtcttggagagacactcaaaagccaactacttcagcctgtccatggaggtgtcaacggccgggccccaggagatagctccctccaggaggccttctatgggggcagaggtgggagttttactgatcactaaagaagttgcagcacccaccagcaactccctggtcccctgggggtcaggctgccctggccccacttactgcccattgcagccagaggctgacatctgtccccacccctgggatccccataaccctgaatccttgttggcttcagagtcagctgagaagacctcctcttcctcctcccccaagttccaggcctcagggacagccaaggagagcagcagcagcgccttccctggcctttgacctgaagacatctatgatgatgatgatgatggtggtggtggtggtggctacagggtgggcagcagcttccttcactcataactgaggcttccacactctattagccctcatgaccacccaggagggatgtagacctgtgcccccatttcacagataagaaagggagaggtcatgtgagctccccacatcaccgcaccagtgggagagccagcccactccagagcccaggcagccgcacactcgctctcagacaacatccacccaggccacgaagagaccagtgtcccgccagaccactcgctccccagccctgaccctcggggactcacttccctgctcgtctgtgtggtgtgaccgcccacctgtgtcccccagcaggttcatttgggctctttgcagctctctgtacgtgggatcccgctggatgtgctcctctgtggccgctctgtggcttctctccatccaggccattcgggaaggtctatctgagctgccgcgtggtttgacactttactaggcccactgctgtgtcatatgtcccagcatggatgcttccaagtccacggccctgtcatttctcaaggccaggaagggctcccagctctgaggcccaggcactggtgagcacctgctgcagttgggccttctgagcccccaagagccccctgaggcttcctccttccccagtgaggtttggtggggtggggtggggcacagagaggtgcagccacggcaggacagcctctgggacccacccaatgcagcgccctgcctttgcacacgcggaaaccctttggccctcaaagaagcagcttccatcctggctccctccggcttccaggccctcactgcggctttggacctgggttcacagggcaggtgggtgcagagggcctcccgccacctgcagagccacaagtagccgcacacggccggggcctcaagtgtccaccttgatttaggtcaatgctgccttctttcccccacccctcctttcatcccaccacccccttaaatggtgggccaggctatggtgccctggaggccactgttccttttgctccaagttttcagctctgtgggctgtggggcaggtgactcaggccaagcagatgcgttgcatcctgctgggaaaactcgattttgtagacatttgccaggattgccactgaacatttgggggggtggggtgggtgcagtgggggacagaaatggcaggagtaggggccgtgcagtggccaggctgtgggggaggaaaggcagggagcacggtggcctctgccacctctaggaatgggcagagagccccagggaggcccctttgacctgcagtgtgacctcgggaaggcccctccgcatctctggtcttgggtgaaatcattgaaaatacaaggaaatagagagaaggccatgctaggtgcgttctgagggctggaggtgccgtgggacccatccacgtggtctctccttccctgagctcacaccacagggagggagggaaccagtgcccagtctggtttctggggaggggagaagcgagaggaagaaagtaaagcagaggtgagcaggaggcagctggagcagcgtaggagggggacgtggaagcagcgttagggcgggagggtgacctctgagcagagggtggagaagagcccagccatgcccgggagtggggatgcaggagagactgtaggcagaggcagctgctggaggtgaagcccagggctggctgggcaccttcccatggtggagaccgagctcgtgcccagcacagaatggtggatggggtgatggggggaggctcagccaggagggtccctgggactgcagaggcagccgctggggcatggatgtgagtgggtggcgggtgcacagggactgaaaagagcctggcctttgggggtcagagccccgggttggcatccgtttcctctctcactggggtggagatactggcaaggacggggtgatggcctgagctctggacatcaggagcaaggtgctgtcagcccagagaggggtggcttcctactcacggtcacacagccggtgagtcacaaagctgggttctcagcccctctctttggcttgggcccagtcatgagacagctgtgggagccccgcatacaacaggctcccgtggagggagaacccaaggcacccgacaaggtgggcgtattgaagagaagaaaccaggggccagaaccgactcaagcctccgtcctgagagcagcaccctggagtggaatcccacgggcctgcaagagacaagccgggccgtgcttcctgccagcacctggcctgctgcagcccacctttctgtccacctgcggggctcgactccaccacagccacctcctccaggaagtctgcccagatcccccctcccctgctggtgtcccagtaagctcctgctgtttacctgcccatctcccctgctggcccacaactctcggtgttttatctccatttccctttggctgcacccaggagatgtgacttcgaactaagtaagtggatgtgtggaaggcgggggtgtcacaaaagggctcaccccaggatccctgaggtcaaccctgaccccctgattcttatgtttaccatgagaactgacccctgaaaactctatttcctagacatttgccaggactgccactgagcatgcaatggcgggtgggggcggaggtgcagcaggagaaatggcaggagtaggggcttgcagtggccaggctgtgggggaggaaaagcatggagcacggtggcctctggcacctctgggaacaggcaatgccccagggaggcccctcaccccatgctcacaattccatctgcagctcaaaggctcaacgcatcatgtgatcacaagcttgacctcctcctctttgtgcctcagtttctccatctggaaaaacgggtagcttttgccagtctttccgagcttcagaattccaagggcagaatttcagaaagatggccaccagaggctccttggggcctacatatgtccttgtgcttctttagcttaacattctgacagttctcaaactcctctgctcacttaaagggcctttctggagtgtgtcgtggtctatcagcttttttccacccttagtggagtataaaataatgttgtatcttacaacaattggtgataccttatattctataaaatatggtgatgccaaccgtttcccatttctaatagtgccttatcttcatttaatcctagcaacaaccccaggaggtagttactattattatcccattttacagagaaggataagagaagtcaacgcctcacctaaggccacacagcaatttacccacggagactggacagtgtcagacagcctgggcaaggtgctggggcagcctcctgggatgtcgaggttttcacagggccttaatgaatggtgcagtttctggtggaaagacatttgctccctgtgacattctggacagaagcgtggcttagcaacagtgcagaggcaggacaagggagacatttaggagccagggaggctctcggtgggctgaagcttaaacggaatgtctggagttttgatcatcaggggtgttaggcccagattgtacagggctttgaatccctgtgcaagaaagaggtcctttgggaggcaatagggagccattgaaggctttagagtaggagcattgcaaggctggagcaatgtctgcatagcctctatgcattcagcctaaaaccaagctcctttggccggcatgcaaggcctgctacaaccaggcctttgtcagtcaccccaccagtgccctccaccccatgccttcccccacacactgctttagccacactgacactttctctgttcctgagctgacaaatgtgttcttcccacaggtctccccaggctcaatgtccctcgccttcgcctcccaccatcgcccagcttcactgtctttaacacaccgaccacaatccgaaaccatcctgttgtctgtgtcgtcattacctgcctctcaccaagcacagattcactcaggatggggctatcctgttcaccagtctatgcacagcgcatgccacagagagggctttgaaatgagtcaatcaatcaacggatgggcttattcctcccacagggcatgtgtgtgtctattttatgatcacgtgggtagcagctggctgcgaaggggatgagcttggacatcccaccaccgttttcttccctctgcttgttcctgctgccacagcccatggggtcagatgatcaggtgtggtcctagccaggtcccgagcgtgtctgagtaacagggagcgaggaatagatcaacacaggcttagccacaggcggctgtaccaggcattcacgttcggcccccttccccattctgatgctccatcagcatttccatggcagggaagcagaggctgagaggagatgtttcctgagcttttctaagcactgagcacgggctgaggccttgccctgtgtaacactttggccttttccgtggttcctcgcaacagccttgtgctgcagcagtggctggtggtttcatgagttccatttatcggatgagactcagcgagacctcaaggcttgtcctcagccgccaggccagggactcagctggatggcatccgggccagtgactcccactggctctttgcccgggccccactgctccagctgccccatgcgtgacctggtcccaaaaccttgtccagcctggtgtgtaaacaggcttccctcacggctgaggccagtttgatgtgcctggcacagggcctgacaccagcatgtgctccgccagcagcagcgtggtgacatcatcatcgtcatcgtcaccatcctcaactggggagtttgcatctgactcaaagtcgaactcgccctctggaagcgggagctgtttacggggaacagaagagcaaagcccaggtcctgagctgccaccccttgtatggggacagggacccaggcccttgtgggcacccagggagtctctggcccaccccactcatgggggccgtgcacctttggaatcccttgtgccttgccccttcttccgtccaccggcagagctaggtcccacataaaaaagggcttgaggtgggcgagcgcctgcctttgtcatccagtgccattaaggccggaatttctcatgggaaaaggagcattttggctgcatgaaaggtgggggggtgcagcacggcctgggttccagggacgcccgacctggagccgtttgaagtccacccgttatctgccgctggggctgtttggcttctgtgggggcataaacagggtgattgaagtaggcggttgtgtctttccggacgacaaaagtccccttgctaattgccacatcaaatgatcgggaaccccccagtggaagccctcaaattaccgtgaatactcactgctgcctcaaggccgccgcggagcccccaccccgggcagccgccccgcgcaccagctcgggttgcacgcgggggaggcacaggaaggcctccgaggatttgttctgcttggctgccggctcgctatgccagcccccagcccggccgcagccccctttgtctctggccgccagagccagcacacaggccagccgcacgaagtcccccgcggtagagggaggtcttctctctgtggccacgcttcgggacagggtccccgctcagccccagcctccgcaccttcaaggaaactatcacagagctgaggtcaccttgtgcccatacacaccaaaagcatccaagcacacagtttctttggtctctttgttgtccctgcctggtgggaagacgtggacacccactggtcagcacccctcactgtcccacgcctgtaacaggcacccagtgggcccggctcctttatcaatccggggatgcacttctctgcgcgctccccgtgctggccgaacccttcacacctgttgccttgttcaactccatcagtcattaccccatttaatagaggaaaaactgagccttggggaggtcaagtgtctcaccccaggaccccaggacatgctccccacctgtgctctctggttgctcttgggcaggcaggggagagaccctggtcactcagtggtgaaaactaatcctgccctaccaccacctgggtgatttcagggttgtgcggccactgctcctgaggagcacacggcccccagtggccctgtcccaggctggccacctcctgaggcctagcatagattacccactggggtggccctgactacccccaggccagcttcatacccacctggcatccaatgacaggcaacacctgcctcagtcctcactcaccaactctcagcatgatgggagatgataaaacgacagaaatgggtacgatgggatccctggagcacaggacacgaaacagagccacccggcccctctgaaggagagcaggtgttagccaggtcaggggtggagggaggaaggccaggaagccagggtgtgccaaggtgccatggcagcagagtggggcctgcagccgcagaggatggggacgaggctgtgaatgggctacagcagcggtggcattttctgcctccagcagacgttttctgagtagccgctcatgcaggtggcctctgccgtgccctggctggcctgggctgcctggggaggaacacatggggggccctcatgctgcctgtcagcagtcggagcaaggcagggacaatctctgggtgcctcagttttctcatatgtagaaatacacataataataggagtcatctcgcagaattgttttagagaatcagtgacttcattgacacacacggcgcagcagggcctatcacacagcaagtgctcaataaatgttaaatattattactctatacaatacaaaaacaatcaatgcgctagaatcaaaggaatgcccactacaaccacatttttttgccaaagggtacaaagttttagttacatagaataaattctggaggtctttgtacagcatggtgactgtacaaagttagttaataataacgtgtcatataattgaaaatcaccacactcacaagtgataacttgagacgatggggatgttaatcagctagattgtggcaatctttccatgatgtatacatgtatcaaaacatcacactgtgcgtcataaatatggacaatttgtactcatcaattatgtgtcagtaaaaaaatgcagaaaaaaaaaaagagctttaaaccactacattttggctgggggtggtggctcatgcctgtaatcccagcactttgggaggccaaagcgggtggatcatctgaggtcaggagtttgagatcagcttggccaatgtggggaaaccccgtctctactaaaaatgcaaaaattatctgggtgtggtggctaccgcctgtaatcccagctacttaggaggctgaggcaggagaatcacttgaacccaggaggtggaggttgcagtgggccgagattgtgccattgcactccagcctgggcgacaagagcaaaactccatctcaaaaaaaaaaaaaaaaaaaaaaaaagagagaaaaagaaaaaaaaagccactacatttttttgcctccctaaatgacagatattttttgaaaaatcataatgtccagaattagcaaaaaatcagggaaacaggctctctcatgtgctgcttcttagaggcagtgaaataaatgaaacaacgtttaccttttatttgcaaagcctcctttatatataattggctgtttaaagccaaggtcagagtagagtgttctggagtttgtaaaatctgtggaaggaaatagatgacaactattgcacaaaagctgagagagtaaatatgttacataattctcccgccatgtgtgaaactgcacggcattctggaatggtagatggtaacacagaaacttcaaagcaaatgctaaatgaggggtgtctaatcttttgacttccctcagccacattggaagaagaattgtcttgggccacacatagaatacactaacactaacaatagctgataagcttaaaaaatgcaaacaaatctaataatcttttaagaaagtttatgaatttgtgttaggccacattcaaagctgtcctgggccacatgcagcccaagggccatgaattggacaacattgtactcaacaaataaccagagaaagaaagccaggaggtaaagccaatcagcaaatggaggagatgaaatggagtcatactcaattgatccaaaagaatgcagagaaagaggaaagacagggaccaagaatgcaagacagagagaaatggagagcaccatgggagatgctggctcagccacggcaggaaccacatctaatggaatggcccaggtacaaggcagaaacagacagggggtgaaaaggtgaggcccaatcacacgtagcctgtagctaatccaccttaaatatggagacagagaggtgaaaagcacagagagggaaaattatatgccatgccccacctatctgggcccaccacatccacctggacccgtctcacctacctgaaccaatgcatcacgtccacctgaaccaatcgtttctacctaggcccatcacatctacctaagtccatcacattcacctgaacctatcacatccacctggcccattatgcctacctggtcccgtcttattcactgaacccattatatcctcctgggcccgtcacatctacctaaacctatctcacccacctagacccatcacacccacctggacccatcacacccacctggacccatcacacccacctggacccaccatacccccctggactcaccataccctcctggaaccatcattcccaactaggcccatcatgcctacccagaccaacacactcacctggacccatcatgcccacctggatccatcacgcccacctggatccatcacgcccacctggacccatcacgctcacctggatccatcacactcacctggacccctcacgcccacctggatccatcacgcccacctggacccatcacgcccacctggacccatcatgcccacctgaacccatcacgcccacctggatccatcacgcccacctggacccatcatgcccacctggatccatcgcacccacctggacccatcatgcccacctgggatcaattacacccaccgggacccatcacacccacctgaacccatcatgcccacctgaactcatcacgcccacctggacccatcacgcccatctggatcaattacacccaccgggacccatcacacccacctgaacccatcacacccacctgaacccatcatgcccacctggacccatcacgcccacctggacccatcacgcccacctggacccatcacgcccacctggacccatcacgcccacctagacccatcacacccacctggacccatcacacccacctggatccatcaaacccacctggacccatcacatccacctggatccatcaaacccacctggacccatcacatccacctggacctatcacatttatctgggcccatcatactcacctggacctatcacacccacctggactcaccacatccacctggacccatcacacccgcatggacccatcacatccacctggacccatcacacttacctggggccatcctgcccacctgtacccatcacactcacctgaaccccagtctttgtgtatcaggtttgtttggaacgcatgttgaaatacgcctacctggctcacatgtcaaccagagccaggctttttgcccattttttaaatggtgcagtgcaggggatttctagggtgatgaaactcttctatatgatgctggatttgaaattacacatttggcaaaatgcatggaactgtgcaacaccaagagtaaaccctaatgtcaaccgtggactttagagaataacaatgtgttgatattggatcatcaattgtagcaaatgtgccacaccaaggcaagatgttaacgacaggagaaactgtgggtggaaccctatgtaatagctcatcagttattctgtaaatcaaaaattgtactaaaaatagcctattaattattaaaaaaccaactgaccaaccaaaaggaagtggtgcaaggcgtccaagaagcggaagaggctgtagcttgacctggaagacgagagcagaggcagcgttctggtaggtgacaggcgcgtgttccacctgctggagctgccggttttctgattcttcgccaagttctccttcggctgccccacgtacttcaacacttatcacttaatagcattaattatcacaactcctccctatttacacgtagcttatcaacaaacaacttgggagtccaataaagcttcatggctggattgagcttccagaaccttccagtcccacaatagacagcagctccaggccccatttcaccaggccctgggctccagtcccccaaagacaggaggcaagaggttaaacgcagggctcggatgctgtgtgaggttgggccagttactcagcttgcctgtgctcacgttgattttgaaagttacacttaaaaacagcccccagatcacaggagagagtgtggccagcacattgggaaaacttcatgataggtttcctttttcttagcagctcctgtgccctggctgagggagggaaggtagagggtggagaaccttctcagagagatcagaaggggccagcatattcccagctgtattcatcagcttgggccgctggaacagagtgcagcttccacaacacaaatggattccccaacagtcctggaggctgcaggcccagctcaaggtgtggcaggactggctcctcctgagacctctctctctttggcttacaggccccctgtgtgtgtctgtgtcctcatctcctcctcttacaaggacatcagtcctacagcattaggacccaccccagaggcctcattttagcttaattacctctttataaacccatctccaaatacaatcacattcagaggcactgtgggtcagaatcccaacaaacttttggggggacacgattcagctcataacctcagcaaatttctaaaacacccacagacctggtcccaccatgaagatggccaggcgcagctgagacgtgaactcgggagctggtaaaggcgggtggaggagggtctcctgtgaggcttcgtcctggggtggagtgggggctgctgcagagaagaaaggatgatgcagctgtatcctaggtccagccctgggctgccccagcttccacgcggccctgatggctttctggccctgcgtctgcatctgtagaatgggtgaacgctcctccagaccccattggttttttaagggtacatgaggccgaggacatgggcagctcctggaaccctgagaggaggtgggatcctttatataactggcatctgagaaaccccacaacagagaggcaggagacctgagttcccgtcgcagacaagcctacctgcttccaaacctccctcctgccgaggcagttctgagaaccaacgctggtatcaggacagcagccatgggatgcttcccacactcccgcctttgaaccccacaaccctgtgggagaggcccccccaagcacccacttttatggaggagaagtgaggctcagaggttaaatgtccctcccgggctcaccctgcgctgggatcagaacccagatgtcgggctccactgtgatttgccaggaagatcttggatgggagggaggactccccggagtggcccatggggaccgctcatgagtctccctggctccctggggacagtttcaggtccacagcccggcaggctgaggtgcaaatggtttctttgcggtgcctgaggagttgccggcatttggagtctccgtgcgtgtgtctggttttgtttgccttggaactacaaaggactcaccagttattttgagttaactcggttattttgcttcaactgcagggaacttttacatccaccacaaccgtgtcccagcagccaggagggcccttcgtcctgcagagggctccggcggcttcaccaccaggcaatggaaagaacttatttttaggaaaacgagaagctacctaccacttagcgaggaatccgggttaattgtgaagctgttctcagtttctttatttagctatttattaaactggctcaaactagaattaatggctgtgccagcctcgcggctcctcatgtgcctgttcagggcagccacagcaatttgggcctgattaaaggctccgccaacccccctccccactcacacacacagctcgaagcccccagctcaggaatgcgcggcccacagctcgcaggcccggctgcagggaagagttgtttttgcctcaaatccacaccctgggcttccacccgcacaagcatgttgctgagcctgtccaggggcaccagccttggccatccaccccagaaaggcggccccagacccttgcaccctgctctgggtcccctggccccagatccctcttggcgtcaccccactggtgactttaggcagtttctgcaatttgaataatctcatgtatctatttgcctgctcctttaggcagtttctgcaatttgaataatctcaatctcatgtatctatttgcctgctccaccagaatataaggtccaggaggctaggtccctcacccctccattcaccccgaagctccagcttctagaacatggccagatgcacggcaggtcctcacccctccattcaccccgaagctccagcttctagaacatggccagatgcacggcaggtcctcacccctccattcaccccgaagctccagcttctagaacatggccagatatacggcaggtgctccatcaggagatgctgagtttctcattcttgtttgaaaacagaaggcttcagaggccagccccgggggagcctcagccctgaagagcaacgcacagtggaaattagagagacactgcctggtggttccactgcttgatggctccggatccagcctgggggctgcaggggtctctactgaggcttgacgttagggatgaccccagatcccagagcctcccaagctgaagagaaacgggaagaggcatgggcactcctgtcccccaaggaagcctgttgggcagtgttgtcacctgcacatccaggcaagaatgacagcctcgccactgcacggccccaggatgatgatggccagaaagtcagataatgtcaagtgttcgtgccaatgtggagaaatcggagccctcttatctggccggtgggaaggctgcatgatgtggctgctttagaaaacggtctctcttttcctcaaaaggttaaacctggacctaccataggacccagcaattctgctcccaaccgtatacccaagagaaacaaaaacacgtgtccacacaaaaatgtgtaaaggaatgctcatggcagcattattcgtaatagccaagaagcagaaatgagccaaatgttcatcaactgacagagggataaataaaatgtccagaataggcaaatatatagagacagaaggtagattaatggttacttagagccaagagagatggaagaaaggggggaggttcatagctaaagggcttctttttgaagtgacaaaaatgttctctgggtgcggtggctcaaacctgcaatcccagcactctgagaggccgaggcgggtggatcacctgaggttgggagtttgagaccagcctgaccatgaccaacatggagaaaccccatctctactaaaaatacaaaaatttagccgggtgtggtggcgcctgcctgtaatcccagctactcaggaggctgaggtaggagaatggcttgaactcgggaggcagaggttgcggtgagccaagattgcactattgcactccagcctgggcaacaagagcaaaactctatctcaaaaataaataaataaataaaaaacataaaaaaagaaaccttctcaaattggctgtgatgatggttgcacaactcttttaaatggaccaaaaccagtacgttgtgtactttagatgggcgaactgtatggtgtgtggattatatctcaataaaactgttaccagaagagaatgagcctctcccagcccgtctgctcccaataggtatccagcagaggtgtttagcctcccacatcaaagggctgtgctgagatggtcactgtagcttcaatcagggctctgagctggactctacacaaatgcctttggatggtttgaacaagtgaggagactgtggggtcttcacatagtggagtgtcgaacagcaacgagagcatgcagcccgcacccaccccggagaacagggctgcatccgacacacctgggtgaacaagccacacatgacacacaggcaagcaattcctgtctacgaagcacagaaccaggcaagatccagagggtgttagaagcaggattgtggctagccctggaagaaggtgctgggtggtgatgacatctcttgggtgttgatggcgtttgtgtctttttttttttttgagacagagtttcacccttgtcacccaggctggagtgcagtggtgtgatctcggcttactgcaacctccgcctcctgggtttaagtgattctcttgcctcagccttccaagtagctgggattacaggtgactggatcacacccagctaatttttgtattttcagtagagacagggtttcaccatgttggccaggctggtctcaaactcctgacctcaggtgatccaaccacctcggcttcccaaagtgctggaattacaggcatgagccaccgcgcccggcctgtgtttgtgtcttgatccctaacaatgacctatgagtagcttggtgagtcctattgatccgaatgctggctatgtgggtgggcttattcgagaaaaagctgcacactttcctgtatgtacatcatatgccaataatttttttttagttaaggctaaaaaaaaaagcacagagggctgcagggttggggcatagtagtatgtgggttgtggggtcaaatgttccccactccctcggccagattgaagccccggctctcctggctgactttggtttggttacaattctcacctgtgcaacagggatgatattaacacctgcctgagagggctattctggggaccgagggaagtcctgccggtaagagggaagccagggcccgacacagcaggaagaggacccagtcctgccgacacgctgattttagccccgtgagcccatttcaaacttctgatctccacatcatgagaaggcacttgtgctgtcttcggccagtccatttggggtcatttattatagcagccacagtaaacacatacgatgggtctctcatcctgccagtgcaggcctcagacatagcctagagctgtgtcctctacctctggccccctctcccaagccccaatctcctcgtggacctttgaggtgctgggcaaagtgcaaagcccccacttttgtctctggctgggcaggtgcccaccagtggagggagggctggaggaggtttcaagctggaagccccagggctctgcccaaggagtcacctgaggcctcagctgctctagccccgggcacatccctcccacagagggaggaaaggctggttcctgtctggaaaggtccccattgggccccctcagcctgtctgaacacagaagggcacagcctcagccctataggcagagttgaccaggacacttgcaaacaccctaccccatcctcactccaccaacacacctgccatgcccagcctgtgctatggggttgggggaacagaggtgagcaaacttcaacagggtctctcccccagagaacccagagttcagcaggaaagacagatgttcatccaatcatcacatctgtaaagcaatgtcagttcaaggagaggcacctgggggccaaagggggtcaggaagatctggaaagacctacccgaggagatgctaattgcactgatattggcagtggggatgtgcaggcatgatgatggaggaggttgagcagggccttgagacccgtgggagggggcctgggggaagaggccacagtggcagggcagccaggactctgaacccagtggaaggctctggaaggctgtaagcagagggactggggatcccatccactttcgtaaagaccactctggctgccctgtggagactggctgggccagtggcagtggcggccccagggcgggtggctgccatgcatccccagcagctgccgcttcttgcaggaagcaggacctggcacacccacctgtggccacatcccaggcctgtgaccctagctgcattctgggagctggctctgagagaccaccctcctgctggcccagggggaggtgggggtgggacgttcagggggagaaagagcccactagcagctccaaaaggtgccagctctgtaggctccagcttcccggggccaggaccccaggctgtgccgcctcccctgcccccatcataaacgcatctcagctcctcttggcccgttcactgacctgcaaccaggtgtgaattgggcctggccagggacaaaatggctttgatgagccaaatggtgggaccctttttgttggggggaggggctttggaatctccacagttcacccaggcatggtgtcctgcagagacccaagaaggggccgggaagatttcttttacgagcctccctcctccccgggcagctgcccccactgctggccaggcctctttggagagcaaggaggctgggctgccccaggcctggccccttcctgggcacagagatgagcatctgccatgccagcccacgtcactttcctggagggcaggcctttgagaaaaaagggacagacgctttcaaagggactaaaatggttgttttttaaaataacaaacgaaccctatgcatctcaaggcctttttggaagccttaagagaagcggggagtggagaatgctgggccccttgccaggggcagggatggccctgcccagggtcagctgcccatgctcaggggggcagtggctgcccgtcagcccccagtcccttgttcacgcacacagactcatgggcagctagtggggaaggtcaggtcccagtacctggttcccgctcccaacagacactttattcagtggcagccgggatggccaagtcctttcccaggcatcccccagccacggattctgtgagcggggggcaggaccagctcttcctcacttcacagctggggaagctgagtctccagccactggggacagaagctgggaaaccctgggtctttccctgcccccttatcagacctgctccttccctttcttgaggaattcccatcgacctcatggctcctacagagagcagggtgggctacactgggtggttccacctgaaatgacagccccaccagcctccaggctgcctgtctggccgggctcctgcctcctccccaattgtcctcagggactgacaagctcctgctctgtgcaggcgctgccctgggcctgtagaccttacacagctcagcagggctcaggccggagagcccccaggccttctctgaacccccactccaaaagacccccagtcactgtccgggtgcccccgctttgcgaccctccctgccttggtcaccccctcttgctcgggcgtgcgcttatttacttatgtttctatgaatggcgagctctgtgaggcacatagtaggtgctcagtaaatatccctctaaggattggatgagggaaccctgggcagagcccagcagcaaggtaaagtgagagacaggatgcactgagcttcagttcccagctgcactgcacgtcaggagaacctgccaggaggctctgcccgggaggtggcctggctggccccaccacccgcccctgtggggtctcgcacccagcactgcccttccctgctctgtccagtgaggtgatgccatatacctgctcacctcaccagattgagacggactctggatttgaaagtgctcagacgctctcatgggctgtatgacaacgtcggggtcccagggtgatgacagaggactgccatttagggttttcagggaaggctaccctaacaccagctccttgcaggctgcccttggcctggtgtcctgaccacactctgttcccaccaggccccctgcctgagtaccatcaggagccgatgccccaccccatctgggtgccactggccatggccctcttggctgtggggtgcaccagtgcagttcctgagccccacagcccactcaaacccacaccaccacccagaagctgagaggctcagacaaatgatacggccatcctgggaccagtgctggttccaaggccaggagggattggcagggaagatcaccatgggtgaccaccggtcacgtgtgtgggaaacgctgggctctgtccaccctgatgagatgggaagacgctgacacgtgaaggagttctttattccaattagaatttccctggacccagccgtctgggacagagccctgggtgccccaggagaagaggccccaggtcccacaccacctctaggccagagctgcccccgcttggctgagtaggttagcagcacagggctctggaaagtgctctggtctcacctgccactggatccaggcaatgtggcctggggcacaggaccaagcctgctcagcgctcagcctctgtgtggccaggcgaggcctcccagctcctctccaagtccgtttcctgggctcagccctgctcaccagcattcaccccacagccccactgggggactggcagcgggaagttcttctcaggtgcttgtggtcatggccgtcagtgccagccgggcccatgcttggtgcccacccttccaagcccatcagagccgcccctggccaggctgctgctggggacgggacaggagaagatggccaagctggcttcctctagtgcctgccagctgcctgtccaccctcccacacgaagacctctgtacctcacaggcctctgctcaggaatcccctaaaccatcacccacctacagccccctctgctggacaccttggaccctcacgttaacctcaggcccccgtgtcggacgggcttccagggtctcacttcccctccctgacttgtgtgtgtcttcaaagacattccacccctgccgcaagcatgaccgggctagagacccccatccctgcttccatccactgacccaaggcactgagcactgactatgtgccagccccagtcagaagtgccggagatgcaggcggtcattggacaaagctcctgtgctcctggatcaggcatttcctgaactccacgcggagctgtttagcttaaccagtgtcacctttagtgacaacactacaggtccttcagggggccatccgtatgtgcccattttcagggtgccacaaagacctcatgagcatgagccttgcctgctgacagacctgggttgaaagatgagctccccactacaagctgagctccccactacaagctgagggactgggcaagttataaagttgcacgacagtgtcagtgaaaatggatgccacatcaaccaggtgtacgtgctgctccagccccctgagtgataagactgtttagtcatccccaaaccctacagggtaggtcctgttgcctcctgagtggtagggaaaaggaaatggaggcgtggggagaagtgtgttggtcacggccatgcctccactctctgagccccagctccagccccgacagcctgagggcaaggtgccctcagtgccccgcagctgctgcactgaaatcccacagaccaggcagtatgaacagcaggcatttatccctcgcagttctgccggcctcaagtctaagatcgaggggttggcagtgccacatgccctctgaagtcgctaggggaggacccactctacctcttccagcttctggggctccagctgctccttcgctgtggccgcctcccaccagcccctgcctccgtggtcacacggtcacctcccctctatgtcttctctttttttttttttttttgcctcttataaggatcccatcattggatttagggcccacctgggtaacccaggatgatctcgtctcaagatccttaccttaattatatctgcacagacccttatttccaataaagccatcttctgaggtagctgtggcttaggggccgccaatcaaccctctaccaggccgctgaggcatggggctagggcaggggcgtctctagctcaggtctgggggggtctatgggtgatcctggcagacacagattttcatcatgccgagaggtgtccacacagccctgtgagctgcgctcccctggctggcaccccaggctgactgtctcagggcagacttgcctatggacccagtgtggaattccagccaccacgggatgctgggtgtggtctctgcgggatgcttggtggcccaaagaaatcatctgttcccatgagctgtggccgccagggctgtcccgccaccacggagccagctcagagggcacacggccccgagacagattggcattctggctacatcttggggagcagccttggcatcggaggggctctgaggcaggaacctggtgcacccacggtgggggacaatagctgcctctggccgggggagcccaaggaaggaagctcaggcagcccagctcctttccagtgatgctgagtgcctagctcgggccagacacaggagcagggagctggcggggatgctgccacccacagggccctgggagttggtcaagggactgggtggcaaaggccagcacgccgtggcccctctggaggggaaggagcctggagacagagaagcacgtcaccacccccattccaggtgcagagacaaagggaacagaacgaacgagaccagggtccatccttcagagagccaggggccagggcctgagccctgcttggccagcacttgctaagtggccggaggccggcggcttcctctctctgtgcctctgcgtccagtcatatctgaagctggagctggtggtctgatagaatgcagggcactgcacgtaggctgcacacgccacacgggctgtcaccagcactgcctgcaccagcgtggggccgtgactggaacagcgctgggcagagtctgtgttcagtaaccatccttggctgctgttatcaaggaggcactaaaagaattcctgggatccccagagaaggagtaaatgcctgcatttgttggggagggaataaggagggtggagaagaaatcagggacagctgaagggtgagcgacatgccagggtatcgggcggtgccagtgaacagagagagcagaggcccaactgcaaattccttaggagaccagcttgcctgggggcggccccactggggctttgacgttcacagaggagttcggaccttcgtactgcaggaagaaatgtttagggtgggaagcaagattagactggcacttggaaatgccacaggcgattctgtgaacagagcgagtctgattaagataaaataggagaattacagggacccctgagtctgggtgtaaggtcgcatccaaattctccctcaaggtccctgcacggccccaggcagcatccctggtcttttcatattggtcttctcaccagcctttgctgctcctgctccaaatcctcctggcttgagagtccccaccttggtctcctggacccctctaaccagggcccctgctctctggtattgcagttactctcacctccaggcttggctgtgcaggagcgcagaggtgagaggtcattgcagtgcattggcttgggcagagtcgggacttgttgttcagggccgcagggaccagctgccccctccccgggcacctacagccccacaattggggacctcgccagccaccgaggtctttcttctcggcactgcccccacccccaccctggctgtccagtcttcaagcaaatgtttttgattttacaggaagtagagcaaggacctaatctgagtttaatttttgaagcaaggcctttgatttaatacttattcatttaagtaattaatgcctccgagtccagagtcagaagccatctcagtttagcccctctctttccttacacgcaaaagcagacctcacagcacttggtacctccaaaccattaatttataccaacggggacattccaaggcctggagcagttactgaacacgactgtgcagccttctctgccatattaatgtactcttgtccccaaagacctgggacaggagtggctgcctacttagcaaggactctgctcacaagcccggtcctcttgtgggtatagaatattctgggttatgagacatgtttttgaacccagacttgatgcattcagtcaataaacatatatgaagtgctgtctcccatgcactaggtgcaccctggagaagcaactcttatccccaaagagaaaacacacaggcagcaaatctgtaggaatgagggcagagtggggaggacagagtggggagggcagagtggggaaggcagaatggggagggcagagtggggagggcagagtggggagggcagagtggggaaggcagaatggggagggcagagtggggagggctgaggggggagggcagaagggggagggcagagtggggagggctgaggggggaggccactccgggacagggatggtcactgccacatagtgggaagatgttctgtggggaccttgaagagtggggagatggagagtgatcgggagggaagggtgatacagaggtgcgggcagaaggcaacagccaggaagaaagaggggtgtcgaggtggacggtgggattccagagagcttttcttattgagttactgggggaagtttgtttttctttttttctttttctttttcagaacacaggatggatgtgcctgtctcctctgggaagctctcctctccttcatcgtgttatactcgtgttcactctactctcatcctgtgtagggcaggcaaacagggccgtgactctggcccctcagagcccctggtttgatagtctgtgtacagcgtggggtatgtgatagcaattgcacctcttattttataaatgggtaaactgagtcctggagacagggctgtccctagatggatgtgggttccctgagtttagcccatctctttccttacacgcaaaagcagacctcacatcacttggtatctccaaaccattaatttataccaacggggacattccaaggcctggagcagttactgaacacgactgtgcagccttctctgccatattaatatactcagaaattaatcaatatacttaattaatatattaattaattaatatacttaattaatataattaatgtactcaaaaattaaactcagattaggtccttgctctacttcctgtaaaatcaaaaacatttgcttgaagactggacaggacagccggggtgggggtggaggcagtgccgagaagaaagacctcagtggctggcgacgtccccaattgtggggctgtaggtgctcggggagtgggcagctggtccctgcggccctgaacgaaaagtcccgactcttcccaagccagtgtactgcccccccacttgcaggaggctccactgtcggccctttgcctggggatttggggatactattcagagtctgaattcaaaattcaatcaaattcggctggggtggtggctcacgcctgtaatcccagcactttgggaggccgaggcgggcggatcacgaggtcaggagatcgagaccatcccggctaaaacggtgaaaccccgtctctactaaaaatacaaaaaattagccgggcgtagtggcgggcgcctgtagtcccagctacttgggaggctgaggcaggagaatggcgtgaacccgggaggcggagcttgcagtgagccgagatcccgccactgcactccagcctgggcaacagagcgagactctgtctcaaaaaaaaaaaaaaaaaaagaatatttgtgaaatggctgaagaagaagtgtctagtgccacgctcccctctcggaaacaggggctccactggccgtcgccagctgcgtctcaagttaggcaggtgtctctatcatttcagggctctagccgaggcccaacattgagctgcattgtcagtgaaccctctcaaactggggatgatttctgtgcacacctacatgatcccagcatctggagcttttatcagatttcttcagatcctcagtggctccccaaaaccctggcttcttgctcacagggttggaaagaatttatgcaccttaggacctccaagtggaaacctgaagtctgcaggaacacagagaatcagaaattttctctgagagaggtcaggtaggcttcctggaggaagaggcatttgagcaggactgcctatggcctcctgctctgggcacagagggtttatgatccctgtaacaaaatgcagataaagcacctcctgctaaaaatatatattcaggccaatggaataatttattcatctcaacccacaaacatcgattcaaacctgggctggacgctggttctgcctgttcatagctggtggttttgggtgagtcacttaacttctctgtgcctttgtttcttcatcacaagatggaataattatgcagcctgcctcagaggactgtcgagcgaattaaatgaactctcagatatttctgacaactggaccctcggtattcggcctagaaacctgattggtctctagcgaacttcttactctaggccaggtcctgtgcccaaacctggggagccctggttgagcaccacccagacctggcctccaggagctcagagtacagtaagggagacaaatagcagacagtgctcctgcatccaggtgcaagtggccatagggcggcatggagcagcgcccggaggtgcccccagccaggcccagctttcgcctgccgatgcaggctctgagccacattagccaagaaagagaggaggggagggaccactgaggacaggagatggaccttgctccttcttgctgtccagcagacacacacacagacatacgtgcacaccatgcacgcaaaaaggcatacacatgtgcctctgcacacatccccacacagcccaaaatatacacatgtgcacacactggcgcacacatgtaccttgcaggcaaacacacatgtacatatacatacacacgcatacaatacctactgacacaaaggtacacatatgtccatgagcacaggctcacacatgagcatacacagtgctacaaatatacacactcctgcacacatgggagcatataacacacatattcacatgtatgcacacatgcacacacaaggcaaagacatacacaaacacacaagagcatatgccatgcataccaagattcacacaggtacatatgcacacacatgcacctgcacgcatgatcacacacgtggacacatgatcacacatgtgcatgcaccctacaagaaggcatcttctgccctctgcaccaggacgacagaattaccttcagtgccataaacccaagaacatcaaaggtgggaaagaccaggtcagtgtgctcaggttgtaaacagaaacaaaaaccccgcaaaacagcgccatcttgtggtggcagtgggaccaggctgaaggcagctggcatccttcttccttagggaggggtttttcctagaacctggcttccaaggtgggctgagtcaactgtaactctcaggcagtaccaaagccaccccttttattcgggggaggtcgggatgctctggaccagcggctttccctacctccacggcccctgtgctgggtcctggccagccaagggtgaccagggccctgagtctggctctgctggggactctgggagcctccttctgtcctgggctttactcacctcattcaagaaatgaggttattacactgatgctcgagagcccagatccatgtgtgtctagagccacgccccttagcctggggcatccatgaatagactgggctgcccccatatcaaaccggaaagcaaagcctcctgggtatctctggcttagagacccgctgggaaattgccaccagggtctcccttgctggaagcttcggagtgacatgagatctcaggccctgcttggaccttctgacccctcaactttatcttaagagcccaggggatctgggcagtgcccccagagctcccatcagcacccagcacccctcacctccccgagaatccccttcccctatgaaagcctcagctctgagacatagactgttccccacctggtcctcagccttcctccctggcccccagcctgcagggacaagggctcgtaaccattcagtgaacagaaaaccaagacactttcctagtggaaatcgaggcacgggatttctccccacctgcccattcagatcactcgcctggcagggcacaggtaaggacccagctctgagacaggccactggggccagatcctggttctgcactccctgaatgggtcccctgaggcaagtcacctcccctctcagtgtccttctctgtaaaatgggaattacaatagaatttatctccgagttgttttagggaacaaaggaaatataatccatgcaaagtgcctggtccacaggaagcgctttcgcattgtcagtgttggaggtgatgtttgctttgcagggctgttcaatcccctgcccacttctaaacacatttaactttggggaggggcctcttggggaggacaaaagaaggaggctggggcttccgctgccctctgcagacctggtgtgcgatgacgctgcagcgggggaccgcggttttaaaggcatcatcggtagaaacggcctcacgcatttccataattcactctgcatcaattaatctttcactgtcgataggaacctgcggctgaattccctccccgggaggactcgccattctcaagctctgaggggttttcttctcggctggcatcatgctaatttccctcgagtacccctggaaagaggttttagaacaagacgtggtgcttggcaggaatttgacatctgaaacaactgtcgctcagggaggagggggttgtgacatttgctaattgccaatcgagcactaatgtgagcattgagatgcttggaaaaatgcttcttcctgctgaggctggatggagctggctcacgggccactgatacacctgcagggcatcatcctttgccattgataaatacccttcatggatctaaggagggaaataatagggaaatttccttttggaaaaccagagagcattggctggggatggggggcccaggttctgaagccatcactgccaaaaaccagctgagccaccaagggtgagaccctgctcttcctcagtgtctgtgcgatgagggccatggcccttgccgtcctctgcctttccctgaccgcagaccctggcttctgctggagctctcccttgtgtaaggatgcatggagcaaattttaggggccttagagccctacgtccaaacctcctccagcagagtcccaaagggcccctgcctaccttcgcctgcctgccaaggggtgctggcagaaagcaggcaggcggtgcaccctcaccctctcccacaatgggcatgggccatgcctgcttcctgcatggcaaacccctgcttccaagagaagcctgaggcctgtgctgagagggcccagcccctcctagcatctctgggtcatttccctctcctcaggcctggcaacctctaagttcagctcctgggagctggggtcccccagaaaggagctctccccattgccagcgagaagcagctctagctcattctgtaggctaataagagggacagctcgagaaatgaatgtgagaatgggactgtgtgggaaccccctggagaatccacggggcaaatatctttatgttccaacccgatttcctcttgtggaatctcgactataaaatcagcaacacagctgtactaataacaaaaaaaagcatcaatgttcaaccacctatgctgtgccaggctcagtgctaagcacttcattctatgaaatcttctggaatcttctcaatagccccacaaagggggctctgacacagcccctattttatgcaaaccaaggctctgaaaggctcaagtcttcccaaggtgatttagggcacgcttgctgaaataataaccaagacatttatttggggttaaaatcctgatattccagactgaaatagctgcccctcacatcctcctccagccctgcacccatggccccgagccccactgtgggtgaaagagcaggagggccctccctgtgaaacagcgtcggccgcttggcaggggtattgctctgccctgagttcacgctgataacgcgcccaagggcaatcacatcgtaacagcccggaattgttctcagtctagaacggacaataaaccgcccgggcagaatgtctcctcatcattctgccgccagccaacgggctccaagagttgtcatcttgaatttgtgcccaactcaaggtgccggcccaggctgggtcacggggccacagggcgctttccaggaaggcacgcagaaggcattccagcacgagaaggtgaagcagcgcggaggttattgacttgacatgggtcattttgccccggcgtaccccacgggatactgctatcctatatctccggcagggcattctctgggcaaacaagcccacagccataaatggtggcctttgcacacccggaatcgctgcctcatggtgtttggatcactgacccggtttgtttatttattgagagtatttttagctcgcccgcggttacccccggggtcaccaattttcctttttaatcttctctttgaatagaaaggaaatggacagtaaggtgcctgtcactcgaacgctggggtaagtctggggcagtgcatacgccaccgaggtcacactcacgtcagggacgacactgccacagccagcaaatctcactcagccagccctcgagggcaccagtgtgtgagccgaccccgggcctggccagagaagagggtcgcggtgtccgtgcagggattcaccgagagtccagaccccagaggggcaagcggtcagcaccacagtctcgccccgcagcgctgaccgcagggtctatggaacccattggcccccctgcaagagctccagagggtgatcccccacatcctgtggagagatcaagtgtattccagagaagattcccaggtcgcttccggtttcctcccagtttcttggtgtccttggactactggctctgccatctaccaccctcatgcctcagttttcccatctctaaagtgggggctaacaagagcgtctactccataagtttgtccagagaggtgagtggggcgaagtgcgcctgtgtgcagtgaagcgcgcctgtccgcggtggagcgcacctgtccgcggtggagcgctcatgtgtgcggtggagcgcgcctgtgcgtggtaagtggtggtgattgttgctaccatcgctgttcccatcagttcccgccacatgcatctgtcaagggcccccaggaagcagatgacccacccccaggggtgggcgagatcaggaagccaggaaaggatggttggtgaagccccttgttattgtctgaggccagaaggaggcagttacagaacccagcaagagagggagctgtccatggagccggatgggagctgtcgtggctgtgcgtaggggaggcacacactgccccctgcggctgggcaggaaggaagccagcccctctctccttcccagctctgatcggttgctggcaacccccactggccgcttcaagtggggactccaaagccaggaagctggggaaccagctggtctcctgcggcagagaaacagggtgaggagtcggggctggacctggaggggcaggcggagagtgactagcagagtgagtgtccagtccctccctgtccgggtgcctttctgtcagccacactccaggttctgcagggaagaaaggctctgagttggggtctggagaggcccgagcctggcacctgtggccaggctgggtcattatcccctgaagggaagcagggctgggctgaaggtggggagcctccctgacctgcctaagcaaggctttgtgcaccttgtgtcaataaatccaagagcaggaacgtatgtcatcaagcggctggcggtgccatctggccaaagcaggaggcagcctctgggacagtcacatggacgatgaggccagacagggctgcacccctccctcggaaaccagaaagcactgactgcctttcagccagacatccctcagtgatgctgaacaacaattaggaatcaaatccccaaatgtcctcctggcctctttccaacagggaagagccgcccggccttccctttttgcaggactggggctgtgtccttgcttttgtgctaataatccaggagtgctttaggctgtcagagctgggtacaaattgcatttttgcaaatcgaagaatgattccccacccatacttcatttcagggacacacggatcggtcttggagctagacactctgacaggaatccaggccaggggctccttccctgggggccgtggtcctcaccctctcagccttgggggtctctttgggaatccgttgaaagctacaaaatctctactccaaacagggaaatgaggttgtgtgcagacacgctgcatttgctatcatttcaagggtctgccgacctcaggttctgagcccaggcctgggtggggccggaggaaggccctctgggctctgcgagagtgagacatcagtgtgccttcctctgtcttcaccgcccaccaccaaaaattgccacgtcctatagatccaagctcctgaatatcaggtggctctgcactcctgtccccactcgccatctcacttgggttattaaaccagcctctaactagtccctccacctgctgtgaccacccccagggcccccaccccaaatctatcatcttcatggcagtaagagggactcttcctgagcaccacactcagcttgtcccttcgtgctgcaaaccctgcagccctttaccacgtgggggcccctcgttacccgcagaggccatctcactgtctgggaaagttcagacctacggatgcagcgtgatagctggcatgctccctgcccctgccggctcaagcagacactgtggctctgcctaccatctccaatccctcgcccggccaagccatccctcggggctcagctaaagtgtcacttgaattgtgcattcttgcagcaagcactgggcatttatgtgtggctttacagctctgggtgccagtgtggacagcctcggagctgccgtcagcagagttgtcaaaaattgcactgcccccaaagatccggccgggccccgtggagccagtcaggtggaacttgttcctggacagttgacacctgcagtttcaggatttggatgtggttcacttgttaacattccgtgtcagcttggccaggctgtagtgcctggagtttggtcaaacactagtctaggtgctgctgggagggtatttggtcgacgtggctgacatctgcagtccattcactttaagtcaaagagattattctctatcatgtaggtgggcctcgtcccaccagttgaaggccttacaagcaaacaaacaggttttctggagaagaaggaattgtgcctcaggtcagtaacgtagaaactctgctgggtttccaccctgctggccggccttacagattaggaatttgccagtccccatggcggtgagtcaatcccttaaaatcagtctctctctctctctctctgtctctcatcccctatgagtctattgcttctgtttattgattctttcctctggggaatctggactgatatgcttacctaaagcgaatgccaccggaaacacaggcctttgggtgtgaaaatctttgggttgctttaaaccttgtaagaaagaaccttctgttacgtggtgccttcctaagctggcttgtcctcaactgccaggcttcacttgactccagggccctgtctgtgccagccagggagccctgttggtgaataacacagacctggtccctgtccccaggaacacaccatctgtggggtcttcctgccatcagcacccagacacccacccagccggggtctgggcacccttttcctcccacacctcccttccatcactgcctggcactgaggcatgtagtcaatatcaatatctgttgaatgacaaatccattagcatagggtactcagacatctaaaaaatacatattctaaatatccgttcatttctttggttatcccaagcaagtgttttctgaccaatgatgtagccagccaacagtcacctggctgtgggtaacctcatgcctccaaacagggggctcaggggtctaatagacccttaaggagtctagggacttgaatgggtgagtctcacacagactggcagagaagctggcttgggtcagtaacactcccttctcagcctttgtcttgcttgttttacttatttaatccctacaccctaatccagttccttgcctcccataacagcccttctaatgggaattgtatgccttttagtgggcatgcggtcttgctaaatgaacattattggccgggcgcagtggctcacgcctgtaatcccagcactttgggaggccaaggcaggtggatcacctgaggtcgggggtttgagaccagcctgaccaacatggagaaatcccatttccactaaaaatacaacaattagccaggtgtggcggtgcatacctgtaatcccagctactcgggaggctgaggcaggagaatcgcttgaacccgggagacggaggttgcggtgagctgagatcgcgccattgcactccagcctgggcaacaagagcgaaactctgtctcaaaaaaaaaaaaaaattgaacattgttgtttgggaggcatggattttttgttggtagatttagtgtggtgcaactgatatgcaatcaactgcacgttcttaaagtgctcaattccatcagttgttacatgaatatacctacaaagccaccaccatgatcaaaataatgaacatatccatcaccccaaaaagcctcctcatgcccctttgtagttcctccctcccacccctccccaccccaccagtcaaccactggtctgctttctaccactgtaagtttgcattttctagatttttatataattgactcataccacatgtgctcttttttgtccagcttttgcattcagcttattatcctgagactcttctatgtggttgcttgtagcagtcattcattcctttttgttgctaagtagtatttcatgatgtggatgtgaaaccaccatttgtttatgcattttcctgccatttgagttgcttccagtttttagctattatcagcaaagctgttataaacatttttttgacatatggttttatttctcttgagtaaatgcccaggagtggaatggctagattgtatggtagatgtgtgcttaactttccaagaaactgcccaactaggttgcaaagtggttgaaccattttgcatttccataagcagtaaatggagtttcagtttctcctcaacatgcttgcttctgaattctagtcattctactggctaaaattctactagtgtaatatctcgttgtggtcttagcatgtatttccctaatgcctaatgacattgagcatcttttcatgggcttatttgccatacatatcttctttgttgaatttgtctcaaatccttcgcccatttaaaaaattagattgtttgtttccctgtttttgagaattgagagttcttgatgcattccggatacgagctcttcatcagatatatgacttgtaaatattttctccccgtctgaggtttatctttatattctcttaacagaacaatgtctttgaacgagcaagcatttacagttttgcctaagttcagttcagtaattattttcttgtatgggtcatgcttttgatgtctgtcatagtctgttttgtgctgctataccagaataccacagactgggtaatttataaagaaaagacatttatttctcatggttctgaaggctgggaagtccaagactgaggggctgcatctggtgagggtcttcttgctgcattataacataaaggaagaacaaggggaaggagagagagagagctcaagagggggctaaactcattctttataaggaacacaccctgctgataacaaacccactgccatgatactggcattaatctattaatgagggtggtgaccccatgaccccaacacctcccattaagccccacttcccaatactgctgcactgggatctagtttccagcacatgaacttcaggggacacattcaagtcacggcagtgccatagcgcagtcatatttgcctaacccaaagtcataaaaatgttctcttattttcttcttgaagttttatgttgtaggttttatatttaggtctatgatccatttgagttaatctctgtatgtgatgcaaagtatgcatttagcttctttttgtttttttgctttgcttcattttagcacatggatatccaatggttctagcaccgtttgttgaaaagactattctttctctaccaaactgcggtagcatcaattgtttaaaataagttctccaagtgtttcagtctggttctggactctccattctgctcattgatgtacttgtctgtatttatgtccatacacacctcgactatcgatttaatttgcttttcttttttctagtttctcaaagtagaaacttgggtcattgattggagacctttcttcttttctaatatagaccattagtgttatctagatttccccctaaatactgcttaaacggcatcccacaatttttggcatgccgttctttttttcatttttgttcagtttcaactactttctaatttcctttatgatttcttctctgacccatgcattagctaaaagtgtatctgtgtcctaaatctggtagggatttttcagttgtttttctcttattaatttcttttaatttcctttgctcaaaaggcatgctttgtatgacttgcagggtctgagggagtgggatcctggcagtccctgtggcctttcttggaaagcgcagggccagagctcagcaaaggagtagattctgtggcagaaacctctggagaggagcacgacacggcagacatgctgtggaccaggtggcagctgccaagcagatggaacctgcacctgcccaatttggccaaagaagcccccatactctccgtgaaaaagtcttccagaagctattgtgtccatgaccaagtctctctcacacacacacacactcacacacacacacacacacacacaaaagatcattcttgagtctgatttgaaaactaaggtcaaattctgcagaggtatttgagtggtaagataacaccctaatatatatatatatatatatatatatatatatattttttttttttttttctttttcttggtgggaggtggggacagaatctcactctgtcacccaggctggagtgcaatgacacactctcagctcactgcaacctctgcctcccgggttcaagtgattctcctgcctcagcctcccaagtatctgggattacaggcacctgccatcatgcctggctaatttttctattttttgcagagaaggggtttcaccatgttggccaggctggtcttgaactcctgacctcaggtgatccgccacctcggcctctcaaggtgctgggactacagacgtgagccactgtgccccggtctgtatatttttaattgaagtgaataggactttgttatagatttcaatccattcttcactttcaatcgagtgttgtttttacataaacttatacctttggaatgactgtagaattattaaaaagttgctaggatagtgctaacagtccccacgtgctctttgcctccatattaacctcttacatagccatataaacatttagaaaatgaagagaccaacatcagtacaatgctgtagctgaattccagactttattcccgagggctgcattctaaagatgcatccacgttacaggcatggggcccctgactgtgcacctgctatgcagtgcctgctcactctgctgggggtggacactggctgaggccccctccccattctggttacagagctgacacattagagcttcgcctgccttccagccgaggagagagcaggggaagtggcctagatatctttttgctatattgatttcccactgctcttttctgaaaggtgttaatgacctctaaggccatgatagcctagactggccggtggatgcagttccaccaggacagccccaggccatctgtggccacgtggcttgaactgtggcaagtccagttgaagacatgctgtgagtgtaacatgcacatgggatcttgaagactttgtatgaaaataaggccgggcatggcggctcacgcctgtagtaccaacactgtggcaggctgaggcgggtggatcacttgaggccaggagttcaagaccagcttgaccaacatggcgaaaccctgtctctacttaaaatacaaaaaattagcctggcgtggtggcacatgcctgtagtcccagctacttaggaagctgaggcaggagaatcactggaacccgggaggtagaggttgcaatgaaccaagatcacagcactgcactccagcctgggtgacagagtgagactctgttgaaagaatgagaaagaaagaaagagagagagagagagagagagagaaagaaagagaaggagagaacgagaaagagagaaagaggaagaaagagaaagggagggaggaaaagaaagaaagaaaagaaagaagaaagaaaagaaagagaaagaaaaagaaagaaagagaaagaaagaaagagaaagggagggagggagagagagaaagaaagaaaaagaaagaaagaaagagaaaggaagaaagaaagagaaagggagggagggagagaaagaaagaaaaagaaagaaagagaaaggaagaaagaaagaaagagaaagggagggagggagagaaagaaagaaagagaaagaagaaaagaaaagaaggaagaaagaagaaagaaagagagaaagaaaaggaaagaaagaaaataataaacatggacaatatctcacaaatacttagatatcgatttcatgttgaaatgttaatatattgggtttattgggttaaacaaaatatagggttaaaattaagttcacctgtttccttttacttttttattgtggctagtagaaatttttaaattacctatgtgaccagccccaggaaggggaaggtttgaaaggcccccttgccctggtctaaccccaaccaacctttgctatcctgcctgagttgcggccaccagcacacccctaccatcctgcacccagacggcaaacacaaatgctggagtgaccaccgagggctgggattagactacaggccagctccccagggctgcggaagcagaatgagtgcccagctggccagccggggtcagtgaccagcagtgtatggccccggccaccactggggtgcctgctagctgctgctgagtcataggaacaagaaatttcttggccaaactacaaggaaactgcttccccacggctggtgtccctattttgacagtggtcaataggtcacctgccggtcacgtccccaggaaacccagacttggaagctgtcacagatgcctggattacctccactgccagaaaagggtgtgtgttggagggggtgtctttcacaatatatttttaattttgactacttcagaaaagaacaaagcaggccagttgtggtggctcatgcctgtaatcccaacaatttgagaggctgaggcaggcagatcacttgaggccaggagttgaagaccagcctggccaacacagtgaaactccatctgtactaaaaataccaaaaattagctgggtatggtggtgtgcacctgtcgtcccagctcctcaggagtctgaggcacgagaatcacttgaacctgagagccagaggttgcagtgagatgagatcgtgtcactgcactccagcctgggcaacagagcaagagtctgtcagaaagaaggaaggaaaaaaggaagggagggagggagggaggggcaaaaagtaggaatcatctatattcctcacccagaattaatcatttttaagctaatattttaatagcttacttacttccttagtcttttaaaatatgtatttattatcttgaaaccatagaatgaatagataagaatatgttgccctgaaaaaaaaaacgaagagaaaatggtattactaatcacgctaaagctccttccgccttcccccaactctcatccactcccccttcccagggaaatcccctctgtgtattccaggcaatgcgcttcattcctttaaacatagctattggcacctgacttgtttgggggtcaggttctttctttctttctttctttctttctctttctttctttctttctttctttctttctttcttttctttcttttcttttcttttctttctttccttctttctttctctttctttgtttctttctttctctctttctttcttgctttctttctttctttttttttttttatttgagaccaggtcttgccataacatccaggctggagtgcagtggcatgacctcagctcactgcaacctccgtctcctgggttcaagacgattctcctgcctcagcctcccaatagctgggattacaggcatgtgccaccacacctggctaattttttgtatttttagtagagacggccatgctttgccatgagggccaagctggtcttgaatgcctgacctcaggtggtcgcccagcttagcctcctaaagtgctgggattccaggcatgagccaccgcgcccggccttttcttttcatttataagacggcatcacatcgtgtgtattgttttcagcttgttcttcttgaggcaatgggcctggtgtaccctgaggtcacactcctcccacccccaccccatcgctgctccggacagtcgtctgggacaagcttttcagagggcaacgaagctgtgtctaccagtgtttaaatgagcacaccctctgagctggccttcatggtcttggagttaaccccactaataccttcccacctctgcgcagaggcagaggctcaagggtgctgctgccacgttgttgatagaaaaacaatagcaacgaatgtgacaaattatgacaactgatggaacagactttcacgaaaccatgaaaaagaacaagcaaaatctatctgagcagagccagagatctctcgataagtcaggcaagacagagagagggcacagctgggcgcgccaggcctggctgtgtgctccccgggatggctgtgcctggagcgtgtttgaggacccgtgagagcgctgaacatggacccttgaggaagtggtgtgaagggaaactacttccccatggcttgtgtccctattttgacagtggtcaataggtcaccggttggtcacgtccccaggaaacccagacttgggagctgtcacagatgcctggattacctccactgccagaaaagggtgtgtgttggagggggtgtctttcacaatatatttttaattttgactacttcagaaaagaacaaagcaggccagttgtggtggctcacgcctgtaatcccaacagcttgagaggctgaggcgggcagatcacttgaggccaggagttgaagaccagcctggccaacatagtgaaactccgtctctactaaaaataccaaaaattacctgtgtatgctggtgtgcacctgtcgtccctgctactcgggagtctgaggcacgagaatcacttgaacctgggaggcagaggttgcagtgagctgagatcatgtcactgcactccagcctgggcaacagagcgagtctgtcagaaagaaggaaggaaaaaaggaagggagggaggaccttgtctctggaaatgtggtccgggggttcaggtgcaaggaagggagaatttcacacttcccgaagcatgtgattttcttccgtctaaccacacaggaatggtttgcttttacttaaggacaactaagcacatctctgaggaatgccgccagccccagggctgggcacgggaggctggatggggtggccttcatggtctctggcttcaccctaggaacagaactggcagcccagaggcccctcgaggccctgctcactgccagggcggttggccatgacaatttgaatgtggacatgtggaggccacatgccagctccaggctcagtccggctgctccagaaagcccagcctccagacatgctatatcctcaggcttcctccagggaagcccaggaggtcaggcccaggtgacccgtgggcagcccccggaaggggcttctttttctcttttcctctgatggacaaggaagtagaatgtgcaagagttaatgctcggccaggcgcagaggctcacgcctgtaatcccagcactttgggaggctgaggcgggcggatcaggaggtcaggagatcgagaccatcctggctaacaccgtgaaaccccgtctctacttaaaaaatacaaaaaaaattagctgggcatggtgatgggtgcctgtagtcccagttacatgggaggctgaggcaggagaatggcgtgaacccaggaggcggagcttgcagtgagtggagatgcaccactgcactccagcctgggagacagagcgagacactgtctcagaaaacaacaacaacaacaaaacaacaacaacaacaacaacaaaataacaaagagttaatgctgaagcagatctctgaattccgaggagcttggggagcagcccagctccaccctgtattaatgaggggcctggggcaagtctctagcctcaatttcctcctctgcaaaatggggacagtaaccacctcacaggacacaaaaaggacctaggactcgtcactggtggtcattgccaggcttgtcctttgggggacttcacgtccccaatcacctcactccctctcaccttgtccccctacctttgaaaaaaaaatataaagacaagagccaggcaaagagtctcacaggggctgtgagctcaggaccgcacgtcatcccactcatctgaatctctagggctgggagccggcaatcttcctaggcatattgatttgagaagcttcctcccaggatgtatggtcaaaccacaaagcgcacacgggacatggtgggtgataacccacaccaggcagagccacgacccttgccccatgctgcctggcaagaactgacccagcaccctctagaaccctctagaacccagggcttggggtcccagtggagcagcaacatcagccccgctccccacaccaagctgctcccacagcctctggcttccatggggatctctcacctttgtagctttggctggagtctgctctcagcatccaagggtgctgcccacaacctcgtcccaatttttcatggagaccactgtccctccccaggtgctggtgggcagtatgggcccccccatccacacagtgtccccaggttccagtggacggtgtgatctccccaattctcacagtgtccccaggtcccagtggacagtgtggcctcccccatccccacagtgtccccacttcctgctggatggtgtggcctccccatttccagtgtccccaagtcccagtggatagtgtggcctccccatttccacagtgtccccaggtcctggtggacggtgtggcctccccatttccacagtgtccccaggtcccggtggatggtgtggcctccccatttccacagtgtccccaggtcccagtggacagcgtggcctcccccatccccacagtgtccccagttcctggtggatgatgtggcctccccatttccacagtgttcccagatcccggtggacggtgtggcctccccatttccacagtgtccccaggtcccagtggatggtgtggcctcccccatccccacagtgtcctctgggcaggcctgggtcaggctgcattcctgaccctgaggtgtggaactctctctccctgagcttttgcagaaacgtgggggcaacttgctctccttctgcaggactcaaaggtgggagatgctggcctagagcagccagaggcttcctaccgggtgacggggagagggtgcctgccccagagtgaggccagcagagaccagactcacagaacaacagagaccagccactcactcagctgtgagccagatgcacatagtctgtttgaggtgatttcttcactggctaccaagaaaaaacaaataaaaatacatacaaagcccactgggctgagtcctccacctggagaaagcactgcaaatgtcaccagtgttcaagggtcctcctcccccatccagcccccatcccaccaccttctgctgtgcgtcccacaaccctgttccctaggggagtggtgggcacagaaagccctcgggtctgtcctcttatcttttgcaagcctagctggcctctgctccaccccaggcctggttctggagcgcgcgtgtagaaatggggctggctgctacggcgggcttatctgggcctgcagggccgccttatctcccacagcttctcattgccagtcactggtttatgcttttatgagtgcagtttgctccttctagggaagcactgagcgatctctgaaggtgcctggccatgggggcacagggttccttcctcctaaagcgctggtcccatgccagccctggctctgcagctgctgtgggtatcttgcatgggtgagtgcctgagtggaggctgtggtggtctcaaggggcttttgccagaagtgatcagaagaggagccttcaggagggaaaccccaggtggcccccacaccttcttttgtttgcccatttgatctgccccacaccggacacactttgatctcaccagcccagtctctaaggtcctgcctgagagggtgggccaagtcctgcactggaagctgggaggctggaatcagatcttcacactgtgcctccactgtcctctgagcctcagtttcctcacctgtaacatgagcagaaagtttgcagccacctcgcctggcaggatggccatggggaaccacaggaggggagggggcagcgtcgagggtcccatggccagccagcatgggccaacccatgtgtcacagttcatagaaggtcttaggagcctggtccctccccctccccctccccccaggatgtttgtagggtgaggcaaccggcaggtgcctggttaagccctggggtctggagagcggtttctaactccaggcccctgtgagctgccaagacctccacctcctccctagggcccccgggggtctgtttgctctgtctgcttttgagaatcagattataatgggagcctgggtcagtttctggatttgtggcctcaggacctcccagaaggagcagagctgaaggccaagagcctggctcctgtcctgtcctgtcacttactgccctgtgaccacaggcaggtcactgcacctctctgagtcacagctttctcatcttccaagcggggagagtccttgaaacaggctgcaaccattagattcattcattcaacaaatatttgctgagcatctactatgtgccaggcatgtgtgctggggacacaatagagatctaaacagacaacaaacaagatattacttttaatgacaaaactgttttgccattcattttaatggcaaaaacttttaacagccattacttttaatggcagaaactgcaattattttcgcaccaacctaacacataagtaaaatgtatggtgatgacacaaagcaggaaggttcagtagggaatggagacaggcacgtctggggtggaggtggaaactcaattttcaatcgtgtggctaggaaaggcctctccaaggcaggcgacaactgagtcaagacccaaaagagatgggagagtgagatgtggagattctggggtccagacacaatcacggcatgagctgaggccctgggacaggagctggtgtgtgcagagaatggcaaggaggccagagggacagaaggtgagggatcagtaccaggtccagagaggaggtggaaggggcaggtaactggtcatggtatgtctttggctgtgaagccagtgggatggagcctgggggattctgagcccaagaaaaacaggatgggtttatgggctaggcatcttgctttttttttttttcacacaggtgacaacattctgtcacccaagttggagtgcagtggaggaatcccagctcactgcaacctccacctcccaggctaagccttcctcccacctcagcctcctgagtggctgagaccacaggtgcacaccaccatgcccagctaatttttttgcactttttgtaaagagggtttttgccatgttgcccaggttggtttcaaactcctgagctcagatgattcacccacctcggcctcccaaactgctgggattacaggtgtgagccaccacgccgtgcctagcatcttgcttgagagatgaattcaccgctgggtagagtagactgaaggggcgggccagaagcagaggaagcaggcaggaggcccctgcagccactcgggccacagttggagctcagagactagaggcagcaaagaaggaggtggggcccagcggctgcacactgggcctccatggaggccagagcaggttggcggatggacgtccatgctggggctgcaacccagaggggacacagcgtcgagcctgcatgggggaccaggcaccattctatgcatttcacatgtcctagactcagaatcctttctaccaagaaggtactcttaccacactttcagggtggggaaactgaggcagggagcggccacagagcttcaacttaggttgggcccagcattcatgcccctcagggctcctgtccctgacaaggagctcctgggaggtagttttcctttaaaacactgctgagcacataccgtatgtggggcactggggtgtgtctcatacagaccttttcttgtttcaccttcatccccactctgtgatctgcagggccgctcagtaagcccagaggcggacaccaaaacatgagaagtattaaaaaatgttgttttttaaaaaattcataaaacacacaaacaccaatgtagccggaactgacattatcatgtaacaatatttttatcatgaattttgtatgggaggtatagtgggttcaactacatcccccaaaagatacatccacctcttaacccctggaacctcagaagctggctttgtttggaatcaggatcttgcagatgtaatgaaggtgaggatccctagctgagattcgtctggattagggtggccctaaatgcaatgatgtgtgtccttataggcgaacaggagaagagacacagagacagggcacaggagaaggcagaggctggagcatctcagccacggccaagaaacgtctgtagccccaggagctggaagaggcaggaatgtccctcccctagaacccttggatggagcgtggccctgccgacaccgtgatctcagacttctggctcccaggctacaagggaatggatttctgttctaagccaccaagcacgtggtcattcgttacacatcacgggaaactcatacggggggtgtgcacccagcaatttgagtctgtgaagtcttaacccagctctgggtgaggtgaatatgttttacaggtgcaggaaaccgaggtctatagaaaaccagcaccttgcaagcgccaccatgctggtcagctctgatgtggccaaggctggtgccagggtgaggcgagggtgacctggactttggaatccctcagccctgggcaggtctcttcatctccccaggtggccacttaatcatctgaaaaatagggctagccccggagacggtggggaagttgcaaggaaggaatcatggctgcgcccccgctgggggctggcccaaaattagtgctccagagcactcatagtccaccctgaataatgatgctaactgtaagcacttactgtgcacggggccaagcccctgacctgcagtggcacaggtaagtgtcacaaaaagtggacacacgtgctgttggacgccagctcctctctgggtcaccatgagagattcctgaacctcagctcccttgtcagcgcccttccaggagggagggaggtagcagcactacccccatctaacagaggaggaaactgaggcacgagagatgaagacactgcccacgtcacgctgctggtcagtgacagagtgggaccgggtgcagttgtccagcagtgcacctagatgggggagaggagcttggtgaatattaaaagaggttttgtctgggaacagagaggcggctgctgggtgaccccagcctcccatccaaaggcgggctgtggggtgactggctggacctcctccagaccctcccatcacacgtgtgctcagccggctcagccagcagcaggcgcccacccaccacgggccccttctctgagccagcgtgcacagcttcctggaagggacacggagcgcacagatgtgcacagcaggtggcctgttctgctctccctccagccagacagggccgggacccaggactggcaggaagacctggccagccatggctgtgaacactgaggaaacacttcccggagcagccagggccctgggagctggagtcgatccccacatctgggctcctcctggagccaaccagggctgtctggaagcctgtagggagatccaccgaggtttcgggagagtcagtgcccgcccacatcccctggccccaggatgaggccgtggctccccacagtccctcccacaggagcctctcgccctcccactcacacagtgtggccaggcatggtggcccagcctgccctgaactaagagcttctgctcggtccccaggggccatggcccttctgttaggggctgccgccctcctcttgcccactccccacaccccggggtccctgcaacaggcccccacccaaagggcctgaaagtctccacaatgacatgatggccagcagagggcgcatggccctggggacctcgacccctctccaggggacaccctctctggctttaatttctattttaaggtgggctgtgactatcataagtaggtgggggtgagacctcagcagcagtcccagccgaggggtcctggggatccccaagtgctcctgaggcccgggacaggcccctcaatgttgccaggaagtcccacgggcccacgtcttcccctccagctctgtggagcgggtgctgtgccctcgtttactgacaaggaggctgaagctcaggactcttacggtgacacagtgagggctgggtgtccaccagacatgggcccacaagacatcctcagtgtgggtgctgacggtcactgagaagccctggcccagtggagcttgtggtgggacggagggtgggggtcagtgtctaaccacaggcccatcctagcaggactccagcaaagacaccttccatagggttgggtccttccccacccctgggagtcttgaccagtcccaggagaggccactttctcccgaccgggtcctttacctctctgccactgtctccctcctgacagggtcctttacctctctgatccctcctggtaagggaagtagaatcattgtcactgaggcagtcaggagagcagctcccccaaccttggcagagaaagggacagtccctcacctgcaatccttctgccagccctggcttgcgtggtgtcaagggacatgagcttggggaggccactcattccttctcccggacggaagatttgggtgggaggcacctcctaaaaatgacgtttgggcagcagacatgatgaggacagggccttatgagtcccctccccaggacacctcaagaccactcggccaggaatgctgacgtgccatgcacattcacttgggatcctgaacctccctcccaggtctgtccttccccctggccagcagaagccaccaggggccactccttcccttcccctgagaggtcagaagcagcgtgtgctgcgtgagccggcccgcaggctccgggcaggtccgcctggatctgagctcggcagtactgggtgtctgcagcgagggcacacggggccatgaggggttttccccaaatctgaaaacagccccttccgcagacggtgcctgggaggggagccagagggagcaggtccagaaggacgggacatcgccaccggctggacagcactgaggaggccgacgggagagaaggtcacacctgactgaagcagagctggcagcctggagatccctgattctctcctcccaagtggggggacaggaggtggcggaggctgcagcggccccagagagcagggcagagcagagtgctgggcccaagcaggaagggtgggtttcactcgggagctgcaggcaccgcgcctcgcaggactcactttgaccacagtgggaggatgcatcggccccagggaggccaatggggaggccagcgtgagctccagtggaggtgctggcacccggacctggggctgggcgcggggatggtgggaagcgagcatttagatttaggaggttgagtgcccagggtgggggtgttggggggatgtggccctgaaatgccagctggttttggctctgggccaggccaggggccgaggggggtggacccaggacaagagtcccatgccccacctggcattcctgcagggggaggccaggcagagaggtacagttttctggctccagtgaagcgggggccggcagtgtcttctgctgggatgccatagagatgtaaacagacaactaacaagataattaagtaaaacgtgtggcgatgacaacaaacaggatattccataaggaatgggggccttgggtgaaggtggcccagaaggcgaagtgggtttggagggagggtgctggttccgctttgggaagacacagaactcaggttccagaggacacacaggtgggacctcccagtgggcagttagaccagcggaccccagccgggggagcgaccttcacatctgctctccctgctgtggccctgctggggccacagtgtgcacactgccatctgctgcccacctaacagtggccactgttaggtgcccactctggcccttccccctcatcccctactatgtggagccacatcgtcccagccccagcactggccctgagtcccctggccttggcccagctggcctggctaggacgccatgtagggcagtgtctcctgaggacggaacctgcacttggtcaccctcagggatgcctggcacacagttggcgctcagtacatgtccgatgaatgagagccgctccgtggacatgcggcagaggcagcacataccgagccatcccctggctggaacaagggcccgggtggggcgtggatcacttgccctggtgtccacccgacttgaccccaggcctggcccagagccaaaaccagctggcattccagggccacagacccaagaccctaaagtccaccctggttgtctccatcaagcatctcctgtttgtccagagctgtgagcccagggcaggtgaaagaggccgagccacagccctgccgtgggcccagtccggtgcacgagtgggtcacgcagcagagggagaaccggatgtggtctctaaatggagttatgcgttgagggactcggatggcaccaaggcacacgggggagccggtgtggactctagagcagggcggtgctgtgccgaggagggtgctgtgctggagagcagctccctgcctcccatgatggaaaccgaggccggggcaatcccagaggaggctgctgcagcattaggggacccgctgtggctctcaccaacccggtggcccccgggaggactctggcctccgggcagggcttgtgaggagtgagaagacggggtgcacactgccatctgctgcccatgcaatggggcgcacactcccaggcaccacgtggtaggacctgattcggatgcagctcctgggttcacaaactttgaatttgggctctgggaggaggtgactgctcccttcccttagtgataacaacttccagggccctgctgggtggccccttcggctggtgggctcaagggactgcagggagtgggtgggccaccggccatcttgctgccagctgggccctgctcctgccctcacagaagccccaagtcacacctttcggggtgagatcccagatcctgcatctcggggctagaaagggacccctctaagaaacccagcaggtccctgggactccaccccaacctcttgcttcctgccaggaggtaaacctcaggctttcctatccccaatgtctggataaggaaacaatctcagctatcttgttagttgtctatttacatnnnnnnnnnnnnnnnnnnnnnnnnnnnnnnnnnnnnnnnnnnnnnnnnnnnnnnnnnnnnnnnnnnnnnnnnnnnnnnnnnnnnnnnnnnnnnnnnnnnnnnnnnnnnnnnnnnnnnnnnnnnnnnnnnnnnnnnnnnnnnnnnnnnnnnnnnnnnnnnnnnnnnnnnnnnnnnnnnnnnnnnnnnnnnnnnnnnnnnnnnnnnnnnnnnnnnnnnnnnnnnnnnnnnnnnnnnnnnnnnnnnnnnnnnnnnnnnnnnnnnnnnnnnnnnnnnnnnnnnnnnnnnnnnnnnnnnnnnnnnnnnnnnnnnnnnnnnnnnnnnnnnnnnnnnnnnnnnnnnnnnnnnnnnnnnnnnnnnnnnnnnnnnnnnnnnnnnnnnnnnnnnnnnnnnnnnnnnnnnnnnnnnnnnnnnnnnnnnnnnnnnnnnnnnnnnnnnnnnnnnnnnnnnnnnnnnnnnnnnnnnnnnnnnnnnnnnnnnnnnnnnnnnnnnnnnnnnnnnnnnnnnnnnnnnnnnnnnnnnnnnnnnnnnnnnnnnnnnnnnnnnnnnnnnnnnnnnnnnnnnnnnnnnnnnnnnnnnnnnnnnnnnnnnnnnnnnnnnnnnnnnnnnnnnnnnnnnnnnnnnnnnnnnnnnnnnnnnnnnnnnnnnnnnnnnnnnnnnnnnnnnnnnnnnnnnnnnnnnnnnnnnnnnnnnnnnnnnnnnnnnnnnnnnnnnnnnnnnnnnnnnnnnnnnnnnnnnnnnnnnnnnnnnnnnnnnnnnnnnnnnnnnnnnnnnnnnnnnnnnnnnnnnnnnnnnnnnnnnnnnnnnnnnnnnnnnnnnnnnnnnnnnnnnnnnnnnnnnnnnnnnnnnnnnnnnnnnnnnnnnnnnnnnnnnnnnnnnnnnnnnnnnnnnnnnnnnnnnnnnnnnnnnnnnnnnnnnnnnnnnnnnnnnnnnnnnnnnnnnnnnnnnnnnnnnnnnnnnnnnnnnnnnnnnnnnnnnnnnnnnnnnnnnnnnnnnnnnnnnnnnnnnnnnnnnnnnnnnnnnnnnnnnnnnnnnnnnnnnnnnnnnnnnnnnnnnnnnnnnnnnnnnnnnnnnnnnnnnnnnnnnnnnnnnnnnnnnnnnnnnnnnnnnnnnnnnnnnnnnnnnnnnnnnnnnnnnnnnnnnnnnnnnnnnnnnnnnnnnnnnnnnnnnnnnnnnnnnnnnnnnnnnnnnnnnnnnnnnnnnnnnnnnnnnnnnnnnnnnnnnnnnnnnnnnnnnnnnnnnnnnnnnnnnnnnnnnnnnnnnnnnnnnnnnnnnnnnnnnnnnnnnnnnnnnnnnnnnnnnnnnnnnnnnnnnnnnnnnnnnnnnnnnnnnnnnnnnnnnnnnnnnnnnnnnnnnnnnnnnnnnnnnnnnnnnnnnnnnnnnnnnnnnnnnnnnnnnnnnnnnnnnnnnnnnnnnnnnnnnnnnnnnnnnnnnnnnnnnnnnnnnnnnnnnnnnnnnnnnnnnnnnnnnnnnnnnnnnnnnnnnnnnnnnnnnnnnnnnnnnnnnnnnnnnnnnnnnnnnnnnnnnnnnnnnnnnnnnnnnnnnnnnnnnnnnnnnnnnnnnnnnnnnnnnnnnnnnnnnnnnnnnnnnnnnnnnnnnnnnnnnnnnnnnnnnnnnnnnnnnnnnnnnnnnnnnnnnnnnnnnnnnnnnnnnnnnnnnnnnnnnnnnnnnnnnnnnnnnnnnnnnnnnnnnnnnnnnnnnnnnnnnnnnnnnnnnnnnnnnnnnnnnnnnnnnnnnnnnnnnnnnnnnnnnnnnnnnnnnnnnnnnnnnnnnnnnnnnnnnnnnnnnnnnnnnnnnnnnnnnnnnnnnnnnnnnnnnnnnnnnnnnnnnnnnnnnnnnnnnnnnnnnnnnnnnnnnnnnnnnnnnnnnnnnnnnnnnnnnnnnnnnnnnnnnnnnnnnnnnnnnnnnnnnnnnnnnnnnnnnnnnnnnnnnnnnnnnnnnnnnnnnnnnnnnnnnnnnnnnnnnnnnnnnnnnnnnnnnnnnnnnnnnnnnnnnnnnnnnnnnnnnnnnnnnnnnnnnnnnnnnnnnnnnnnnnnnnnnnnnnnnnnnnnnnnnnnnnnnnnnnnnnnnnnnnnnnnnnnnnnnnnnnnnnnnnnnnnnnnnnnnnnnnnnnnnnnnnnnnnnnnnnnnnnnnnnnnnnnnnnnnnnnnnnnnnnnnnnnnnnnnnnnnnnnnnnnnnnnnnnnnnnnnnnnnnnnnnnnnnnnnnnnnnnnnnnnnnnnnnnnnnnnnnnnnnnnnnnnnnnnnnnnnnnnnnnnnnnnnnnnnnnnnnnnnnnnnnnnnnnnnnnnnnnnnnnnnnnnnnnnnnnnnnnnnnnnnnnnnnnnnnnnnnnnnnnnnnnnnnnnnnnnnnnnnnnnnnnnnnnnnnnnnnnnnnnnnnnnnnnnnnnnnnnnnnnnnnnnnnnnnnnnnnnnnnnnnnnnnnnnnnnnnnnnnnnnnnnnnnnnnnnnnnnnnnnnnnnnnnnnnnnnnnnnnnnnnnnnnnnnnnnnnnnnnnnnnnnnnnnnnnnnnnnnnnnnnnnnnnnnnnnnnnnnnnnnnnnnnnnnnnnnnnnnnnnnnnnnnnnnnnnnnnnnnnnnnnnnnnnnnnnnnnnnnnnnnnnnnnnnnnnnnnnnnnnnnnnnnnnnnnnnnnnnnnnnnnnnnnnnnnnnnnnnnnnnnnnnnnnnnnnnnnnnnnnnnnnnnnnnnnnnnnnnnnnnnnnnnnnnnnnnnnnnnnnnnnnnnnnnnnnnnnnnnnnnnnnnnnnnnnnnnnnnnnnnnnnnnnnnnnnnnnnnnnnnnnnnnnnnnnnnnnnnnnnnnnnnnnnnnnnnnnnnnnnnnnnnnnnnnnnnnnnnnnnnnnnnnnnnnnnnnnnnnnnnnnnnnnnnnnnnnnnnnnnnnnnnnnnnnnnnnnnnnnnnnnnnnnnnnnnnnnnnnnnnnnnnnnnnnnnnnnnnnnnnnnnnnnnnnnnnnnnnnnnnnnnnnnnnnnnnnnnnnnnnnnnnnnnnnnnnnnnnnnnnnnnnnnnnnnnnnnnnnnnnnnnnnnnnnnnnnnnnnnnnnnnnnnnnnnnnnnnnnnnnnnnnnnnnnnnnnnnnnnnnnnnnnnnnnnnnnnnnnnnnnnnnnnnnnnnnnnnnnnnnnnnnnnnnnnnnnnnnnnnnnnnnnnnnnnnnnnnnnnnnnnnnnnnnnnnnnnnnnnnnnnnnnnnnnnnnnnnnnnnnnnnnnnnnnnnnnnnnnnnnnnnnnnnnnnnnnnnnnnnnnnnnnnnnnnnnnnnnnnnnnnnnnnnnnnnnnnnnnnnnnnnnnnnnnnnnnnnnnnnnnnnnnnnnnnnnnnnnnnnnnnnnnnnnnnnnnnnnnnnnnnnnnnnnnnnnnnnnnnnnnnnnnnnnnnnnnnnnnnnnnnnnnnnnnnnnnnnnnnnnnnnnnnnnnnnnnnnnnnnnnnnnnnnnnnnnnnnnnnnnnnnnnnnnnnnnnnnnnnnnnnnnnnnnnnnnnnnnnnnnnnnnnnnnnnnnnnnnnnnnnnnnnnnnnnnnnnnnnnnnnnnnnnnnnnnnnnnnnnnnnnnnnnnnnnnnnnnnnnnnnnnnnnnnnnnnnnnnnnnnnnnnnnnnnnnnnnnnnnnnnnnnnnnnnnnnnnnnnnnnnnnnnnnnnnnnnnnnnnnnnnnnnnnnnnnnnnnnnnnnnnnnnnnnnnnnnnnnnnnnnnnnnnnnnnnnnnnnnnnnnnnnnnnnnnnnnnnnnnnnnnnnnnnnnnnnnnnnnnnnnnnnnnnnnnnnnnnnnnnnnnnnnnnnnnnnnnnnnnnnnnnnnnnnnnnnnnnnnnnnnnnnnnnnnnnnnnnnnnnnnnnnnnnnnnnnnnnnnnnnnnnnnnnnnnnnnnnnnnnnnnnnnnnnnnnnnnnnnnnnnnnnnnnnnnnnnnnnnnnnnnnnnnnnnnnnnnnnnnnnnnnnnnnnnnnnnnnnnnnnnnnnnnnnnnnnnnnnnnnnnnnnnnnnnnnnnnnnnnnnnnnnnnnnnnnnnnnnnnnnnnnnnnnnnnnnnnnnnnnnnnnnnnnnnnnnnnnnnnnnnnnnnnnnnnnnnnnnnnnnnnnnnnnnnnnnnnnnnnnnnnnnnnnnnnnnnnnnnnnnnnnnnnnnnnnnnnnnnnnnnnnnnnnnnnnnnnnnnnnnnnnnnnnnnnnnnnnnnnnnnnnnnnnnnnnnnnnnnnnnnnnnnnnnnnnnnnnnnnnnnnnnnnnnnnnnnnnnnnnnnnnnnnnnnnnnnnnnnnnnnnnnnnnnnnnnnnnnnnnnnnnnnnnnnnnnnnnnnnnnnnnnnnnnnnnnnnnnnnnnnnnnnnnnnnnnnnnnnnnnnnnnnnnnnnnnnnnnnnnnnnnnnnnnnnnnnnnnnnnnnnnnnnnnnnnnnnnnnnnnnnnnnnnnnnnnnnnnnnnnnnnnnnnnnnnnnnnnnnnnnnnnnnnnnnnnnnnnnnnnnnnnnnnnnnnnnnnnnnnnnnnnnnnnnnnnnnnnnnnnnnnnnnnnnnnnnnnnnnnnnnnnnnnnnnnnnnnnnnnnnnnnnnnnnnnnnnnnnnnnnnnnnnnnnnnnnnnnnnnnnnnnnnnnnnnnnnnnnnnnnnnnnnnnnnnnnnnnnnnnnnnnnnnnnnnnnnnnnnnnnnnnnnnnnnnnnnnnnnnnnnnnnnnnnnnnnnnnnnnnnnnnnnnnnnnnnnnnnnnnnnnnnnnnnnnnnnnnnnnnnnnnnnnnnnnnnnnnnnnnnnnnnnnnnnnnnnnnnnnnnnnnnnnnnnnnnnnnnnnnnnnnnnnnnnnnnnnnnnnnnnnnnnnnnnnnnnnnnnnnnnnnnnnnnnnnnnnnnnnnnnnnnnnnnnnnnnnnnnnnnnnnnnnnnnnnnnnnnnnnnnnnnnnnnnnnnnnnnnnnnnnnnnnnnnnnnnnnnnnnnnnnnnnnnnnnnnnnnnnnnnnnnnnnnnnnnnnnnnnnnnnnnnnnnnnnnnnnnnnnnnnnnnnnnnnnnnnnnnnnnnnnnnnnnnnnnnnnnnnnnnnnnnnnnnnnnnnnnnnnnnnnnnnnnnnnnnnnnnnnnnnnnnnnnnnnnnnnnnnnnnnnnnnnnnnnnnnnnnnnnnnnnnnnnnnnnnnnnnnnnnnnnnnnnnnnnnnnnnnnnnnnnnnnnnnnnnnnnnnnnnnnnnnnnnnnnnnnnnnnnnnnnnnnnnnnnnnnnnnnnnnnnnnnnnnnnnnnnnnnnnnnnnnnnnnnnnnnnnnnnnnnnnnnnnnnnnnnnnnnnnnnnnnnnnnnnnnnnnnnnnnnnnnnnnnnnnnnnnnnnnnnnnnnnnnnnnnnnnnnnnnnnnnnnnnnnnnnnnnnnnnnnnnnnnnnnnnnnnnnnnnnnnnnnnnnnnnnnnnnnnnnnnnnnnnnnnnnnnnnnnnnnnnnnnnnnnnnnnnnnnnnnnnnnnnnnnnnnnnnnnnnnnnnnnnnnnnnnnnnnnnnnnnnnnnnnnnnnnnnnnnnnnnnnnnnnnnnnnnnnnnnnnnnnnnnnnnnnnnnnnnnnnnnnnnnnnnnnnnnnnnnnnnnnnnnnnnnnnnnnnnnnnnnnnnnnnnnnnnnnnnnnnnnnnnnnnnnnnnnnnnnnnnnnnnnnnnnnnnnnnnnnnnnnnnnnnnnnnnnnnnnnnnnnnnnnnnnnnnnnnnnnnnnnnnnnnnnnnnnnnnnnnnnnnnnnnnnnnnnnnnnnnnnnnnnnnnnnnnnnnnnnnnnnnnnnnnnnnnnnnnnnnnnnnnnnnnnnnnnnnnnnnnnnnnnnnnnnnnnnnnnnnnnnnnnnnnnnnnnnnnnnnnnnnnnnnnnnnnnnnnnnnnnnnnnnnnnnnnnnnnnnnnnnnnnnnnnnnnnnnnnnnnnnnnnnnnnnnnnnnnnnnnnnnnnnnnnnnnnnnnnnnnnnnnnnnnnnnnnnnnnnnnnnnnnnnnnnnnnnnnnnnnnnnnnnnnnnnnnnnnnnnnnnnnnnnnnnnnnnnnnnnnnnnnnnnnnnnnnnnnnnnnnnnnnnnnnnnnnnnnnnnnnnnnnnnnnnnnnnnnnnnnnnnnnnnnnnnnnnnnnnnnnnnnnnnnnnnnnnnnnnnnnnnnnnnnnnnnnnnnnnnnnnnnnnnnnnnnnnnnnnnnnnnnnnnnnnnnnnnnnnnnnnnnnnnnnnnnnnnnnnnnnnnnnnnnnnnnnnnnnnnnnnnnnnnnnnnnnnnnnnnnnnnnnnnnnnnnnnnnnnnnnnnnnnnnnnnnnnnnnnnnnnnnnnnnnnnnnnnnnnnnnnnnnnnnnnnnnnnnnnnnnnnnnnnnnnnnnnnnnnnnnnnnnnnnnnnnnnnnnnnnnnnnnnnnnnnnnnnnnnnnnnnnnnnnnnnnnnnnnnnnnnnnnnnnnnnnnnnnnnnnnnnnnnnnnnnnnnnnnnnnnnnnnnnnnnnnnnnnnnnnnnnnnnnnnnnnnnnnnnnnnnnnnnnnnnnnnnnnnnnnnnnnnnnnnnnnnnnnnnnnnnnnnnnnnnnnnnnnnnnnnnnnnnnnnnnnnnnnnnnnnnnnnnnnnnnnnnnnnnnnnnnnnnnnnnnnnnnnnnnnnnnnnnnnnnnnnnnnnnnnnnnnnnnnnnnnnnnnnnnnnnnnnnnnnnnnnnnnnnnnnnnnnnnnnnnnnnnnnnnnnnnnnnnnnnnnnnnnnnnnnnnnnnnnnnnnnnnnnnnnnnnnnnnnnnnnnnnnnnnnnnnnnnnnnnnnnnnnnnnnnnnnnnnnnnnnnnnnnnnnnnnnnnnnnnnnnnnnnnnnnnnnnnnnnnnnnnnnnnnnnnnnnnnnnnnnnnnnnnnnnnnnnnnnnnnnnnnnnnnnnnnnnnnnnnnnnnnnnnnnnnnnnnnnnnnnnnnnnnnnnnnnnnnnnnnnnnnnnnnnnnnnnnnnnnnnnnnnnnnnnnnnnnnnnnnnnnnnnnnnnnnnnnnnnnnnnnnnnnnnnnnnnnnnnnnnnnnnnnnnnnnnnnnnnnnnnnnnnnnnnnnnnnnnnnnnnnnnnnnnnnnnnnnnnnnnnnnnnnnnnnnnnnnnnnnnnnnnnnnnnnnnnnnnnnnnnnnnnnnnnnnnnnnnnnnnnnnnnnnnnnnnnnnnnnnnnnnnnnnnnnnnnnnnnnnnnnnnnnnnnnnnnnnnnnnnnnnnnnnnnnnnnnnnnnnnnnnnnnnnnnnnnnnnnnnnnnnnnnnnnnnnnnnnnnnnnnnnnnnnnnnnnnnnnnnnnnnnnnnnnnnnnnnnnnnnnnnnnnnnnnnnnnnnnnnnnnnnnnnnnnnnnnnnnnnnnnnnnnnnnnnnnnnnnnnnnnnnnnnnnnnnnnnnnnnnnnnnnnnnnnnnnnnnnnnnnnnnnnnnnnnnnnnnnnnnnnnnnnnnnnnnnnnnnnnnnnnnnnnnnnnnnnnnnnnnnnnnnnnnnnnnnnnnnnnnnnnnnnnnnnnnnnnnnnnnnnnnnnnnnnnnnnnnnnnnnnnnnnnnnnnnnnnnnnnnnnnnnnnnnnnnnnnnnnnnnnnnnnnnnnnnnnnnnnnnnnnnnnnnnnnnnnnnnnnnnnnnnnnnnnnnnnnnnnnnnnnnnnnnnnnnnnnnnnnnnnnnnnnnnnnnnnnnnnnnnnnnnnnnnnnnnnnnnnnnnnnnnnnnnnnnnnnnnnnnnnnnnnnnnnnnnnnnnnnnnnnnnnnnnnnnnnnnnnnnnnnnnnnnnnnnnnnnnnnnnnnnnnnnnnnnnnnnnnnnnnnnnnnnnnnnnnnnnnnnnnnnnnnnnnnnnnnnnnnnnnnnnnnnnnnnnnnnnnnnnnnnnnnnnnnnnnnnnnnnnnnnnnnnnnnnnnnnnnnnnnnnnnnnnnnnnnnnnnnnnnnnnnnnnnnnnnnnnnnnnnnnnnnnnnnnnnnnnnnnnnnnnnnnnnnnnnnnnnnnnnnnnnnnnnnnnnnnnnnnnnnnnnnnnnnnnnnnnnnnnnnnnnnnnnnnnnnnnnnnnnnnnnnnnnnnnnnnnnnnnnnnnnnnnnnnnnnnnnnnnnnnnnnnnnnnnnnnnnnnnnnnnnnnnnnnnnnnnnnnnnnnnnnnnnnnnnnnnnnnnnnnnnnnnnnnnnnnnnnnnnnnnnnnnnnnnnnnnnnnnnnnnnnnnnnnnnnnnnnnnnnnnnnnnnnnnnnnnnnnnnnnnnnnnnnnnnnnnnnnnnnnnnnnnnnnnnnnnnnnnnnnnnnnnnnnnnnnnnnnnnnnnnnnnnnnnnnnnnnnnnnnnnnnnnnnnnnnnnnnnnnnnnnnnnnnnnnnnnnnnnnnnnnnnnnnnnnnnnnnnnnnnnnnnnnnnnnnnnnnnnnnnnnnnnnnnnnnnnnnnnnnnnnnnnnnnnnnnnnnnnnnnnnnnnnnnnnnnnnnnnnnnnnnnnnnnnnnnnnnnnnnnnnnnnnnnnnnnnnnnnnnnnnnnnnnnnnnnnnnnnnnnnnnnnnnnnnnnnnnnnnnnnnnnnnnnnnnnnnnnnnnnnnnnnnnnnnnnnnnnnnnnnnnnnnnnnnnnnnnnnnnnnnnnnnnnnnnnnnnnnnnnnnnnnnnnnnnnnnnnnnnnnnnnnnnnnnnnnnnnnnnnnnnnnnnnnnnnnnnnnnnnnnnnnnnnnnnnnnnnnnnnnnnnnnnnnnnnnnnnnnnnnnnnnnnnnnnnnnnnnnnnnnnnnnnnnnnnnnnnnnnnnnnnnnnnnnnnnnnnnnnnnnnnnnnnnnnnnnnnnnnnnnnnnnnnnnnnnnnnnnnnnnnnnnnnnnnnnnnnnnnnnnnnnnnnnnnnnnnnnnnnnnnnnnnnnnnnnnnnnnnnnnnnnnnnnnnnnnnnnnnnnnnnnnnnnnnnnnnnnnnnnnnnnnnnnnnnnnnnnnnnnnnnnnnnnnnnnnnnnnnnnnnnnnnnnnnnnnnnnnnnnnnnnnnnnnnnnnnnnnnnnnnnnnnnnnnnnnnnnnnnnnnnnnnnnnnnnnnnnnnnnnnnnnnnnnnnnnnnnnnnnnnnnnnnnnnnnnnnnnnnnnnnnnnnnnnnnnnnnnnnnnnnnnnnnnnnnnnnnnnnnnnnnnnnnnnnnnnnnnnnnnnnnnnnnnnnnnnnnnnnnnnnnnnnnnnnnnnnnnnnnnnnnnnnnnnnnnnnnnnnnnnnnnnnnnnnnnnnnnnnnnnnnnnnnnnnnnnnnnnnnnnnnnnnnnnnnnnnnnnnnnnnnnnnnnnnnnnnnnnnnnnnnnnnnnnnnnnnnnnnnnnnnnnnnnnnnnnnnnnnnnnnnnnnnnnnnnnnnnnnnnnnnnnnnnnnnnnnnnnnnnnnnnnnnnnnnnnnnnnnnnnnnnnnnnnnnnnnnnnnnnnnnnnnnnnnnnnnnnnnnnnnnnnnnnnnnnnnnnnnnnnnnnnnnnnnnnnnnnnnnnnnnnnnnnnnnnnnnnnnnnnnnnnnnnnnnnnnnnnnnnnnnnnnnnnnnnnnnnnnnnnnnnnnnnnnnnnnnnnnnnnnnnnnnnnnnnnnnnnnnnnnnnnnnnnnnnnnnnnnnnnnnnnnnnnnnnnnnnnnnnnnnnnnnnnnnnnnnnnnnnnnnnnnnnnnnnnnnnnnnnnnnnnnnnnnnnnnnnnnnnnnnnnnnnnnnnnnnnnnnnnnnnnnnnnnnnnnnnnnnnnnnnnnnnnnnnnnnnnnnnnnnnnnnnnnnnnnnnnnnnnnnnnnnnnnnnnnnnnnnnnnnnnnnnnnnnnnnnnnnnnnnnnnnnnnnnnnnnnnnnnnnnnnnnnnnnnnnnnnnnnnnnnnnnnnnnnnnnnnnnnnnnnnnnnnnnnnnnnnnnnnnnnnnnnnnnnnnnnnnnnnnnnnnnnnnnnnnnnnnnnnnnnnnnnnnnnnnnnnnnnnnnnnnnnnnnnnnnnnnnnnnnnnnnnnnnnnnnnnnnnnnnnnnnnnnnnnnnnnnnnnnnnnnnnnnnnnnnnnnnnnnnnnnnnnnnnnnnnnnnnnnnnnnnnnnnnnnnnnnnnnnnnnnnnnnnnnnnnnnnnnnnnnnnnnnnnnnnnnnnnnnnnnnnnnnnnnnnnnnnnnnnnnnnnnnnnnnnnnnnnnnnnnnnnnnnnnnnnnnnnnnnnnnnnnnnnnnnnnnnnnnnnnnnnnnnnnnnnnnnnnnnnnnnnnnnnnnnnnnnnnnnnnnnnnnnnnnnnnnnnnnnnnnnnnnnnnnnnnnnnnnnnnnnnnnnnnnnnnnnnnnnnnnnnnnnnnnnnnnnnnnnnnnnnnnnnnnnnnnnnnnnnnnnnnnnnnnnnnnnnnnnnnnnnnnnnnnnnnnnnnnnnnnnnnnnnnnnnnnnnnnnnnnnnnnnnnnnnnnnnnnnnnnnnnnnnnnnnnnnnnnnnnnnnnnnnnnnnnnnnnnnnnnnnnnnnnnnnnnnnnnnnnnnnnnnnnnnnnnnnnnnnnnnnnnnnnnnnnnnnnnnnnnnnnnnnnnnnnnnnnnnnnnnnnnnnnnnnnnnnnnnnnnnnnnnnnnnnnnnnnnnnnnnnnnnnnnnnnnnnnnnnnnnnnnnnnnnnnnnnnnnnnnnnnnnnnnnnnnnnnnnnnnnnnnnnnnnnnnnnnnnnnnnnnnnnnnnnnnnnnnnnnnnnnnnnnnnnnnnnnnnnnnnnnnnnnnnnnnnnnnnnnnnnnnnnnnnnnnnnnnnnnnnnnnnnnnnnnnnnnnnnnnnnnnnnnnnnnnnnnnnnnnnnnnnnnnnnnnnnnnnnnnnnnnnnnnnnnnnnnnnnnnnnnnnnnnnnnnnnnnnnnnnnnnnnnnnnnnnnnnnnnnnnnnnnnnnnnnnnnnnnnnnnnnnnnnnnnnnnnnnnnnnnnnnnnnnnnnnnnnnnnnnnnnnnnnnnnnnnnnnnnnnnnnnnnnnnnnnnnnnnnnnnnnnnnnnnnnnnnnnnnnnnnnnnnnnnnnnnnnnnnnnnnnnnnnnnnnnnnnnnnnnnnnnnnnnnnnnnnnnnnnnnnnnnnnnnnnnnnnnnnnnnnnnnnnnnnnnnnnnnnnnnnnnnnnnnnnnnnnnnnnnnnnnnnnnnnnnnnnnnnnnnnnnnnnnnnnnnnnnnnnnnnnnnnnnnnnnnnnnnnnnnnnnnnnnnnnnnnnnnnnnnnnnnnnnnnnnnnnnnnnnnnnnnnnnnnnnnnnnnnnnnnnnnnnnnnnnnnnnnnnnnnnnnnnnnnnnnnnnnnnnnnnnnnnnnnnnnnnnnnnnnnnnnnnnnnnnnnnnnnnnnnnnnnnnnnnnnnnnnnnnnnnnnnnnnnnnnnnnnnnnnnnnnnnnnnnnnnnnnnnnnnnnnnnnnnnnnnnnnnnnnnnnnnnnnnnnnnnnnnnnnnnnnnnnnnnnnnnnnnnnnnnnnnnnnnnnnnnnnnnnnnnnnnnnnnnnnnnnnnnnnnnnnnnnnnnnnnnnnnnnnnnnnnnnnnnnnnnnnnnnnnnnnnnnnnnnnnnnnnnnnnnnnnnnnnnnnnnnnnnnnnnnnnnnnnnnnnnnnnnnnnnnnnnnnnnnnnnnnnnnnnnnnnnnnnnnnnnnnnnnnnnnnnnnnnnnnnnnnnnnnnnnnnnnnnnnnnnnnnnnnnnnnnnnnnnnnnnnnnnnnnnnnnnnnnnnnnnnnnnnnnnnnnnnnnnnnnnnnnnnnnnnnnnnnnnnnnnnnnnnnnnnnnnnnnnnnnnnnnnnnnnnnnnnnnnnnnnnnnnnnnnnnnnnnnnnnnnnnnnnnnnnnnnnnnnnnnnnnnnnnnnnnnnnnnnnnnnnnnnnnnnnnnnnnnnnnnnnnnnnnnnnnnnnnnnnnnnnnnnnnnnnnnnnnnnnnnnnnnnnnnnnnnnnnnnnnnnnnnnnnnnnnnnnnnnnnnnnnnnnnnnnnnnnnnnnnnnnnnnnnnnnnnnnnnnnnnnnnnnnnnnnnnnnnnnnnnnnnnnnnnnnnnnnnnnnnnnnnnnnnnnnnnnnnnnnnnnnnnnnnnnnnnnnnnnnnnnnnnnnnnnnnnnnnnnnnnnnnnnnnnnnnnnnnnnnnnnnnnnnnnnnnnnnnnnnnnnnnnnnnnnnnnnnnnnnnnnnnnnnnnnnnnnnnnnnnnnnnnnnnnnnnnnnnnnnnnnnnnnnnnnnnnnnnnnnnnnnnnnnnnnnnnnnnnnnnnnnnnnnnnnnnnnnnnnnnnnnnnnnnnnnnnnnnnnnnnnnnnnnnnnnnnnnnnnnnnnnnnnnnnnnnnnnnnnnnnnnnnnnnnnnnnnnnnnnnnnnnnnnnnnnnnnnnnnnnnnnnnnnnnnnnnnnnnnnnnnnnnnnnnnnnnnnnnnnnnnnnnnnnnnnnnnnnnnnnnnnnnnnnnnnnnnnnnnnnnnnnnnnnnnnnnnnnnnnnnnnnnnnnnnnnnnnnnnnnnnnnnnnnnnnnnnnnnnnnnnnnnnnnnnnnnnnnnnnnnnnnnnnnnnnnnnnnnnnnnnnnnnnnnnnnnnnnnnnnnnnnnnnnnnnnnnnnnnnnnnnnnnnnnnnnnnnnnnnnnnnnnnnnnnnnnnnnnnnnnnnnnnnnnnnnnnnnnnnnnnnnnnnnnnnnnnnnnnnnnnnnnnnnnnnnnnnnnnnnnnnnnnnnnnnnnnnnnnnnnnnnnnnnnnnnnnnnnnnnnnnnnnnnnnnnnnnnnnnnnnnnnnnnnnnnnnnnnnnnnnnnnnnnnnnnnnnnnnnnnnnnnnnnnnnnnnnnnnnnnnnnnnnnnnnnnnnnnnnnnnnnnnnnnnnnnnnnnnnnnnnnnnnnnnnnnnnnnnnnnnnnnnnnnnnnnnnnnnnnnnnnnnnnnnnnnnnnnnnnnnnnnnnnnnnnnnnnnnnnnnnnnnnnnnnnnnnnnnnnnnnnnnnnnnnnnnnnnnnnnnnnnnnnnnnnnnnnnnnnnnnnnnnnnnnnnnnnnnnnnnnnnnnnnnnnnnnnnnnnnnnnnnnnnnnnnnnnnnnnnnnnnnnnnnnnnnnnnnnnnnnnnnnnnnnnnnnnnnnnnnnnnnnnnnnnnnnnnnnnnnnnnnnnnnnnnnnnnnnnnnnnnnnnnnnnnnnnnnnnnnnnnnnnnnnnnnnnnnnnnnnnnnnnnnnnnnnnnnnnnnnnnnnnnnnnnnnnnnnnnnnnnnnnnnnnnnnnnnnnnnnnnnnnnnnnnnnnnnnnnnnnnnnnnnnnnnnnnnnnnnnnnnnnnnnnnnnnnnnnnnnnnnnnnnnnnnnnnnnnnnnnnnnnnnnnnnnnnnnnnnnnnnnnnnnnnnnnnnnnnnnnnnnnnnnnnnnnnnnnnnnnnnnnnnnnnnnnnnnnnnnnnnnnnnnnnnnnnnnnnnnnnnnnnnnnnnnnnnnnnnnnnnnnnnnnnnnnnnnnnnnnnnnnnnnnnnnnnnnnnnnnnnnnnnnnnnnnnnnnnnnnnnnnnnnnnnnnnnnnnnnnnnnnnnnnnnnnnnnnnnnnnnnnnnnnnnnnnnnnnnnnnnnnnnnnnnnnnnnnnnnnnnnnnnnnnnnnnnnnnnnnnnnnnnnnnnnnnnnnnnnnnnnnnnnnnnnnnnnnnnnnnnnnnnnnnnnnnnnnnnnnnnnnnnnnnnnnnnnnnnnnnnnnnnnnnnnnnnnnnnnnnnnnnnnnnnnnnnnnnnnnnnnnnnnnnnnnnnnnnnnnnnnnnnnnnnnnnnnnnnnnnnnnnnnnnnnnnnnnnnnnnnnnnnnnnnnnnnnnnnnnnnnnnnnnnnnnnnnnnnnnnnnnnnnnnnnnnnnnnnnnnnnnnnnnnnnnnnnnnnnnnnnnnnnnnnnnnnnnnnnnnnnnnnnnnnnnnnnnnnnnnnnnnnnnnnnnnnnnnnnnnnnnnnnnnnnnnnnnnnnnnnnnnnnnnnnnnnnnnnnnnnnnnnnnnnnnnnnnnnnnnnnnnnnnnnnnnnnnnnnnnnnnnnnnnnnnnnnnnnnnnnnnnnnnnnnnnnnnnnnnnnnnnnnnnnnnnnnnnnnnnnnnnnnnnnnnnnnnnnnnnnnnnnnnnnnnnnnnnnnnnnnnnnnnnnnnnnnnnnnnnnnnnnnnnnnnnnnnnnnnnnnnnnnnnnnnnnnnnnnnnnnnnnnnnnnnnnnnnnnnnnnnnnnnnnnnnnnnnnnnnnnnnnnnnnnnnnnnnnnnnnnnnnnnnnnnnnnnnnnnnnnnnnnnnnnnnnnnnnnnnnnnnnnnnnnnnnnnnnnnnnnnnnnnnnnnnnnnnnnnnnnnnnnnnnnnnnnnnnnnnnnnnnnnnnnnnnnnnnnnnnnnnnnnnnnnnnnnnnnnnnnnnnnnnnnnnnnnnnnnnnnnnnnnnnnnnnnnnnnnnnnnnnnnnnnnnnnnnnnnnnnnnnnnnnnnnnnnnnnnnnnnnnnnnnnnnnnnnnnnnnnnnnnnnnnnnnnnnnnnnnnnnnnnnnnnnnnnnnnnnnnnnnnnnnnnnnnnnnnnnnnnnnnnnnnnnnnnnnnnnnnnnnnnnnnnnnnnnnnnnnnnnnnnnnnnnnnnnnnnnnnnnnnnnnnnnnnnnnnnnnnnnnnnnnnnnnnnnnnnnnnnnnnnnnnnnnnnnnnnnnnnnnnnnnnnnnnnnnnnnnnnnnnnnnnnnnnnnnnnnnnnnnnnnnnnnnnnnnnnnnnnnnnnnnnnnnnnnnnnnnnnnnnnnnnnnnnnnnnnnnnnnnnnnnnnnnnnnnnnnnnnnnnnnnnnnnnnnnnnnnnnnnnnnnnnnnnnnnnnnnnnnnnnnnnnnnnnnnnnnnnnnnnnnnnnnnnnnnnnnnnnnnnnnnnnnnnnnnnnnnnnnnnnnnnnnnnnnnnnnnnnnnnnnnnnnnnnnnnnnnnnnnnnnnnnnnnnnnnnnnnnnnnnnnnnnnnnnnnnnnnnnnnnnnnnnnnnnnnnnnnnnnnnnnnnnnnnnnnnnnnnnnnnnnnnnnnnnnnnnnnnnnnnnnnnnnnnnnnnnnnnnnnnnnnnnnnnnnnnnnnnnnnnnnnnnnnnnnnnnnnnnnnnnnnnnnnnnnnnnnnnnnnnnnnnnnnnnnnnnnnnnnnnnnnnnnnnnnnnnnnnnnnnnnnnnnnnnnnnnnnnnnnnnnnnnnnnnnnnnnnnnnnnnnnnnnnnnnnnnnnnnnnnnnnnnnnnnnnnnnnnnnnnnnnnnnnnnnnnnnnnnnnnnnnnnnnnnnnnnnnnnnnnnnnnnnnnnnnnnnnnnnnnnnnnnnnnnnnnnnnnnnnnnnnnnnnnnnnnnnnnnnnnnnnnnnnnnnnnnnnnnnnnnnnnnnnnnnnnnnnnnnnnnnnnnnnnnnnnnnnnnnnnnnnnnnnnnnnnnnnnnnnnnnnnnnnnnnnnnnnnnnnnnnnnnnnnnnnnnnnnnnnnnnnnnnnnnnnnnnnnnnnnnnnnnnnnnnnnnnnnnnnnnnnnnnnnnnnnnnnnnnnnnnnnnnnnnnnnnnnnnnnnnnnnnnnnnnnnnnnnnnnnnnnnnnnnnnnnnnnnnnnnnnnnnnnnnnnnnnnnnnnnnnnnnnnnnnnnnnnnnnnnnnnnnnnnnnnnnnnnnnnnnnnnnnnnnnnnnnnnnnnnnnnnnnnnnnnnnnnnnnnnnnnnnnnnnnnnnnnnnnnnnnnnnnnnnnnnnnnnnnnnnnnnnnnnnnnnnnnnnnnnnnnnnnnnnnnnnnnnnnnnnnnnnnnnnnnnnnnnnnnnnnnnnnnnnnnnnnnnnnnnnnnnnnnnnnnnnnnnnnnnnnnnnnnnnnnnnnnnnnnnnnnnnnnnnnnnnnnnnnnnnnnnnnnnnnnnnnnnnnnnnnnnnnnnnnnnnnnnnnnnnnnnnnnnnnnnnnnnnnnnnnnnnnnnnnnnnnnnnnnnnnnnnnnnnnnnnnnnnnnnnnnnnnnnnnnnnnnnnnnnnnnnnnnnnnnnnnnnnnnnnnnnnnnnnnnnnnnnnnnnnnnnnnnnnnnnnnnnnnnnnnnnnnnnnnnnnnnnnnnnnnnnnnnnnnnnnnnnnnnnnnnnnnnnnnnnnnnnnnnnnnnnnnnnnnnnnnnnnnnnnnnnnnnnnnnnnnnnnnnnnnnnnnnnnnnnnnnnnnnnnnnnnnnnnnnnnnnnnnnnnnnnnnnnnnnnnnnnnnnnnnnnnnnnnnnnnnnnnnnnnnnnnnnnnnnnnnnnnnnnnnnnnnnnnnnnnnnnnnnnnnnnnnnnnnnnnnnnnnnnnnnnnnnnnnnnnnnnnnnnnnnnnnnnnnnnnnnnnnnnnnnnnnnnnnnnnnnnnnnnnnnnnnnnnnnnnnnnnnnnnnnnnnnnnnnnnnnnnnnnnnnnnnnnnnnnnnnnnnnnnnnnnnnnnnnnnnnnnnnnnnnnnnnnnnnnnnnnnnnnnnnnnnnnnnnnnnnnnnnnnnnnnnnnnnnnnnnnnnnnnnnnnnnnnnnnnnnnnnnnnnnnnnnnnnnnnnnnnnnnnnnnnnnnnnnnnnnnnnnnnnnnnnnnnnnnnnnnnnnnnnnnnnnnnnnnnnnnnnnnnnnnnnnnnnnnnnnnnnnnnnnnnnnnnnnnnnnnnnnnnnnnnnnnnnnnnnnnnnnnnnnnnnnnnnnnnnnnnnnnnnnnnnnnnnnnnnnnnnnnnnnnnnnnnnnnnnnnnnnnnnnnnnnnnnnnnnnnnnnnnnnnnnnnnnnnnnnnnnnnnnnnnnnnnnnnnnnnnnnnnnnnnnnnnnnnnnnnnnnnnnnnnnnnnnnnnnnnnnnnnnnnnnnnnnnnnnnnnnnnnnnnnnnnnnnnnnnnnnnnnnnnnnnnnnnnnnnnnnnnnnnnnnnnnnnnnnnnnnnnnnnnnnnnnnnnnnnnnnnnnnnnnnnnnnnnnnnnnnnnnnnnnnnnnnnnnnnnnnnnnnnnnnnnnnnnnnnnnnnnnnnnnnnnnnnnnnnnnnnnnnnnnnnnnnnnnnnnnnnnnnnnnnnnnnnnnnnnnnnnnnnnnnnnnnnnnnnnnnnnnnnnnnnnnnnnnnnnnnnnnnnnnnnnnnnnnnnnnnnnnnnnnnnnnnnnnnnnnnnnnnnnnnnnnnnnnnnnnnnnnnnnnnnnnnnnnnnnnnnnnnnnnnnnnnnnnnnnnnnnnnnnnnnnnnnnnnnnnnnnnnnnnnnnnnnnnnnnnnnnnnnnnnnnnnnnnnnnnnnnnnnnnnnnnnnnnnnnnnnnnnnnnnnnnnnnnnnnnnnnnnnnnnnnnnnnnnnnnnnnnnnnnnnnnnnnnnnnnnnnnnnnnnnnnnnnnnnnnnnnnnnnnnnnnnnnnnnnnnnnnnnnnnnnnnnnnnnnnnnnnnnnnnnnnnnnnnnnnnnnnnnnnnnnnnnnnnnnnnnnnnnnnnnnnnnnnnnnnnnnnnnnnnnnnnnnnnnnnnnnnnnnnnnnnnnnnnnnnnnnnnnnnnnnnnnnnnnnnnnnnnnnnnnnnnnnnnnnnnnnnnnnnnnnnnnnnnnnnnnnnnnnnnnnnnnnnnnnnnnnnnnnnnnnnnnnnnnnnnnnnnnnnnnnnnnnnnnnnnnnnnnnnnnnnnnnnnnnnnnnnnnnnnnnnnnnnnnnnnnnnnnnnnnnnnnnnnnnnnnnnnnnnnnnnnnnnnnnnnnnnnnnnnnnnnnnnnnnnnnnnnnnnnnnnnnnnnnnnnnnnnnnnnnnnnnnnnnnnnnnnnnnnnnnnnnnnnnnnnnnnnnnnnnnnnnnnnnnnnnnnnnnnnnnnnnnnnnnnnnnnnnnnnnnnnnnnnnnnnnnnnnnnnnnnnnnnnnnnnnnnnnnnnnnnnnnnnnnnnnnnnnnnnnnnnnnnnnnnnnnnnnnnnnnnnnnnnnnnnnnnnnnnnnnnnnnnnnnnnnnnnnnnnnnnnnnnnnnnnnnnnnnnnnnnnnnnnnnnnnnnnnnnnnnnnnnnnnnnnnnnnnnnnnnnnnnnnnnnnnnnnnnnnnnnnnnnnnnnnnnnnnnnnnnnnnnnnnnnnnnnnnnnnnnnnnnnnncaaccctggcccctgcacggggctatcttgggccacccagtgcaggtggctgagcctctggcgatggcttgtgactggcctggggctcatcaaatgcccgttgcatgaagcctgcctggcttcatgcattgttttatgtgcatctcaggactggggcagctgcctgggacagagatgcctgccaggtcccagccgctgggaatggggctgtctgactctcctgcagtccctgcttcctctggtcctggcattcagcaggaaggaggctcagggatcagtgcccaggcagagcagggtctccagggtcccaaggacatgggccaactaaggtagcccaggacatggtccctggagtcgcccttccttgtggcccagtatccccggtcactgccatgtcctctgggagcccatctgacagccctagccgcagccttcctgtcctgctccctgtccctggatgaaggacttaaccccatttagtcaagtccttcatcctcgacttccagaccagttgtgctattaactggcacacctgccctgaaccgtggggtcctctgcccacaatgccccccacccatctgcacagggtgggatcctagggatcaaggtcacctggtggagatgccccctccccatccacctcttggcttctcacgtcacaactccatgtgtgtttagggcctcactcacttgtggaaaggaccctgatgaggctgtggtggccaggtccctcctctcccaagtggcttgaagtccaagtgactggggtgcccactggggtcccccccatttccatctgattctatttcctagaagaaacaatgtgcacgacagccaaagaagacaaacaaccacaaaatcagaaatgtgttgtttctgctggattttttcttctcttagaattttaggggaaggagggctaccggccaccggtctccccaggtgagcaccctgggtccaggcaccttgtccaggccatatcagagccagccagaccctccagtggctttcccagcagcagactgctgctccctagcctctgccagcagggccagcgggggtcctggcccttcgaggctctttcagtaacatttgcctgcagctcttagagccccattcctttctctctcatgtaagatcttgttgaggtctgatctggggttttagggcagagttgagagactgaatcaacatttcaacctgtcttcagttttgtaacttcacctgatccctgtgatcctgggaaggggtgtttaaggcaataaatggcaaaatgcaagccatgcaatttgatcccaaagccctgctgactctaagcagctcttcaactcattcctccacggtacacccctcccagccccagcttctctacctcccaggccgctgcagccaggccggtgcccgccacctgcattcccaccccttccagtccattctccacctgcagctggaagcattagggcctcgcctgggcctgccaagggctggatgcaaagacaggctctgacagagaagaggattttgggggaggaagcaggagaacatgaaagaggcttcaggccacaatgaagaggcgacccgcatggaaggagagaaggaaggaaacagaagtggacaggaggagtctcaaactgcagtgctgttccactaaggttcagccctgctgactctttcaagggggaaaaaaaagcagctaaactggctgaagtaatcaagaggaaaaggggataaatgcatacacaggcatacacagagtaagagaatacaaatagagagatagcaacagacacagagagataagagcatcacaagagaatgctttgatcggctctatgcaaataagtttgtaaactcagatgaaaccagttcttcctggaaaaaaaaagaagtaagtcataaaacttaactctagaagagacagaaaaaagaacaactccatcaccattaaaaaaaaaaaaaagttcttaatccccctatcccaggccgaaacatcaccaggccagtaatttcacatgggagttccattgtcatttgagagaacaggagattttaataccatgtaagctgtttcaaggcatggaaaaagtagaagagtttcaaaagtctttagaaaaagctagtgtaacactgataccaaattcaataaagagaggacaaaaagttttaaaaggaccaaccaatctcttaagaaaattacaaatttctaaaataaaatattactaaatactacagagtgatcgatagatgtaggaaaagcattgaacataatctaacatgctttcatgataagagattcagaatcaataaaccaggagcagaagagaacttcctcaacctgataagagccatctatgaaattcgtatctaacatcgtacttaatgaaaaaagaacaaacgccttcctcctaaaatcaagaacaagacaaggatgtctgctctcacccttccattcaacattgtactggaagttctagccagggcgattaggcaagacaatgaaataaaagacatccagattggaaaggaagtaaaaactgtctgtatttgcagatgacatgatcttttatgcagaaaatcctaagaaacccactgaaaaaactcttcaaactaataaatgagtccatcaatgtagctggaagcaagatcaatgtacaaaaattaattgtatttctacacactggcagtgaactatctatctaaaaataacattaaaaaaatcccagcatgtgaggcaaggtataggcaaattagcttgatttagccattccacaatgtatccatatttcaaaacatcttgttgtgtaccataaatatacacaattttgtttgtcaacttacacaataataaaaaaatccaatggaaaaaaagaaaaagaaaacaaccccatttgtaatagcagcaaaaagaataaaacactcaagaataaacttaaacaaatacagtacttgtacattaaaaactgcaaaacattattgaaatgaaagaaataaaagattacaatgaatgaaaagatattgcttgttcctgctcataaaatatcattgctgagaaggcgatactcctcaaattgatcttcaaattcaaagcaatctctatcaaaatccaagttgagttttttgttgttgcagaaattgccaaggtgatcttttctttctttctttctttctttctttttttttttttttttgagacagagtttcactctgtcacccaggctgaattacagtggcatgatctcagctcactgcaacctccaccacccgggttcaagcgattatcctgcttcagcctcccgagtagctgggattacaggtacctgccaccacacccagctaatttttgtatttttagtagagatggagtttcaccatgttggccaggctggtctcgaactcctgacctcatgtgatccatccacctcggcctcccaaagtgctgggattacaggcgtgagccactgcacccggccatgattctaatagtcatatggacccagagtaaccaaagtgatcttgaaaaagaaaatgttggggggccacacttccaacggttccctctccacaggggacagatatagcagtggggttggccaggtgctggatgatgcccacagttaacaggacaaaggaggacgcattgattctggaatggggaatctattcccacacaaggcagcaagcccagggctgactgtgaggacttgactagaacattgaacttgctacaagctgcagtaaccaagactggcaccggcatgaagatggacatagaggaatagaacaaaatagagtcagaaataaaccctcagattgacagccagttgatttctgacaagggcaccaaggccgttcgtcaagcaggtgggagctgttgttcgtcaccaggtgcagaggtcggagcgctgctgctggctgcatcttggtatcagagtcaccaagaaaatcacaaggcagtcaggcactggagggaaaacatttcactcacatggaaaagggatggaacaagaccggtcagtggtaggcattggcccctcgtggcccagtgggtccctctcagcagccaatgcagggcagtcggcctgcaggcacctttcttgtgctggggtagaaggacctggttccctctccacaggggacagaaggggttggccaggtgccagatgattcacacagttagcaggacaaaggaggacgcattgattctggaatgaggaatctattcccacacaagcggcaaggccagcgctgactgtgaggactcgactacttgatgagaaagtgtgccaggcccacagccctttcttaggtggctgggcctggtcagactgcatgcagagactgccttcctgacacgatgtaatgagggagggacggctctccaacaaatgatgctcaacaatcggacatccacgtgcaaaagaaggaagctggaccccttccttagatcacagacctaaatataaaggttgaaattacaaaactcctataagaaaatctaagagtaggctaggcggggtggccacgcctgtaatcccagcactttgggaggatcacttgaggtcaggagttcgagaccagcctgggcaacatggtgaaaccctgtctctactaaaaatacaaaaattagccaggcgtggtggcgcatacctgtaatcccagctactctggaggctgaggcacaagaattgcttgaattcgggaggtggagtttgcagtgagctgagatcatgccactgcattccagcctgggtgacagagcaagactctgtgtcaaaaaagaaagagaaagaaagaaagtaagaaagaaagaaagaaggaaggaaggaaggaaggaaggaaggaaggaaggaaggaaggaagcaaggaaggaaggaaagaaagaaagaaaaagaaagaaagaaagaaagaaagaaagaaaagaaagaaagaaagaaagagggagggagaaagaaagagagaagaaagaaagagaaagaaagaaagagagaaagaaaagaaagaaaggaggaaggaagaaagagaaagaaaagaaagaaaaaaagagaaagaaagggaaaatctaagagtaaatcttgatctaggaaagccttcttagatacaacagcaaaagcacaagtaggaaaacacaaacagataaattggacttcatcaaaattaaaaacttttgtgctgcaaacaatatcatcaagaaagtgaaaacacaccctacagagtgggagaacaaaatgttaagtcatatatctgataagggagtcatttctagaatatacaaagatctcttacacctcaacaataaaaagataaatcatccaacctagaaatgggcaattgaagagacattatatttgaatagacatttctcctaagaagatatacaaaatgccagtaagcacattatagatgtctaacatcatgagtttttacagaaatgcaagtcaaaaccgcaatgagatgataccacttcacacccactaggatggcttaaattaaaaagacagacaatagcaagtgttggcaaagatgtagagatattagaacccccattcattgctggtgggaatggaaaatgatgcagccactttttaaaacagtttggcaattcctcaaaatggtaaatgtagagttactatatgatccaataattttgatacccaagagaaatgaaaacatatgactacacaaaaacctttacatgaatatgcataacagcattattcataatactccaaaagcagaaacaacccagatgtctgtcaactaataaagtggaatattattcagccatgaaaaaagctggagtactgatgacacgttgcaacacggatgaagctcaaaatcactggctaagcaaaaagaagccagttactgaagagcacaaatggtgtaattccctttattgcagaataggcaaatctgtagaggcagaaaatagattgcataaatgattgcctaggggtagagaaaggggaagatggggagtgactataagggctatggggtgtgtttttggggtgatgaaattgcctaaaattagactttggtcactttctacaactctgtgaatgtgtactttaaatgggttaattttataatatttaagttatcactcaataaagccatagaaagaaaaggaaaaaaagggtcaatttttcatatatatatatatatatataaaatccatgacacaaaaatggataaatttgactatacaaaaattgtcatatattaatggcaagggattctgcaatgtcaaaagaaaataactatataaaatacaagccactcgtagcatagattgagggctaatttctctaatgaataagagcttttatgaattgatgaaaccaagcgccagtgaatctggggtaggttatgcagcactcacaaaacagcccgcaaattgcagtggcttagaactgcaagggttttttctggcttggggtacgtgtctgtctagggtttgtggacattctctgctcgtcaggtactcagggaccccatcaaacgttgccagtccaccacaccaggtagaaaagaaagagctccaagggcctccaaccgtccattaaatgttcaacctggtagtgaaacatttgtagttaccccatgtatatctgtatccctaggcagcaaagttaattgcaaacttttgaattgtatatacatggaaatataccatgtgctttcttcttattttatttcttttgagacaaagtcttgccctgttgcccaggctggagtgcagtggcaccctcagcacactggagtctccgcctcccaggttcaagcgattctcctgcctcagcctcctgagtagctgggactacaggtgcatgtcaccacacctggctaatttttgtatttttagtagagatggggtttcaccatgttggccaggctggtctcgaactcctgacttcaggtgatccaccggccttggcctcccaaagtgctgggattacaggcatgaaccaccatgcccggcctaccaagtgtttttttctgttgtttagttttttgttttgctttgtttaacctaaccccctgttaccgacattcattccagttgtggctgcaccagtaattcactcatcgtcctggctgcatagtacccccaacggcatgaccacggctgtgtatccagccttctcccacttggttaatcccaagattttgctgttacaagcagagaacagccttgccatgacagcgtgctccggggactcactgggtcgcagcccacgtggctacttacagcccagtggtacctatttgtcttccaaagtgtgattccaatggacccagatccctccaccccgctctgcaggtaggatctccaggtgcttcccagcactattgtcaggcattgataaaggcagactcgtgacctttcagccgtctttttggtccgtctttttggtacaaaatggaatgcctttgtcgtgtgaattcgcctcccctaattactaatgagcatttcacctgctgaccggccacccaggcgtacccttctcagagatccctggtcaccttcttctgttccccttttctattaaattgcttttcttttttttttttttttctgagacagagtctcgctctgtcgcccagcctggagtgcagtggcatgatctcggctcactgcaacctctgcctcccaggttgaaatgattctcctgcctcagcctcccaagcagctgggattacaggcaagcgccatcacacctggctaatttttgtatttttagtagagacggggtttcaccatgttggtcaggctggtctcaaactcctgacctcgtgatccgcccgcttcggcctcccaaagtgctgggattacaggcgtgagccaccgcgcccggccttaaattgctcttttatatcttttgaatttcaagcatgggcactacctattcaaaaacaaatgtaaaacactgaatatattatggagctaattggacgttagagtcccccatggggtggggtgggtgatgtcatcatgctgtggcgttccctagggacctggtctccacccggcctctgtcctatctctgctttattttaactttcaaggatggatgtgactttcagatgactgatggtttcagatttttttgctccttttttttttttttgacattatccccggatcttttcaaaatagtaatgacagtaaaacaacagaaaagaaccatgtcagaattctgatcaccatcattattaaacacacacattccttttccttcaaccaatacggagcacctcctatgtgccaggccccgatttaaagactgcacataaggatattcctgagcttttgcttctttttctgagctaccttaagcatccctcaacacacacatttcccagggaggcagtggcagctcagagctcaaagccgtagaggttctcagggcctagagcccgcggaggcggaacctcaaagccgtgttcatggactcagggaattttcaggctctgcagagacagtcagactccccggcccaagcacccagggtgtgctgaaagtttagatgtcacgtccctaaaacgtcagcctgtctgtttccagcccacgccgccccaggctggactttgggaagttctgaacagccccagcttcgctgcattccccaactccctgcaacccagcgtaaacaactctgcactcagccgcttggagaggttgctaggatattatcgctttgggaaatgcaggaaccaagtttggagaggctgcacagcagagggaggggacacagctgcaaagcgcccatcctccagccaggccctctgggggttcgccggacccttgggtgcccagggtccgaggcagcgcgtggctccccacctcccctggcaccacccacaccccctggcctgtgtgctgtgagaaggggtcactcagttctgggagagcccgtggatagccgaggcctgggcgctgggcagactcccaggctcgttagcgtggccatccctggcgtatttccggccacagtgcgagaatggggaatgttctctttcatgggcagtgaccccaggatttgccatttcttatgtttaaagcttgcgttgatggtctggctgccaccaacattcttcccccagagataatgaagtacaaaagccggatgaatgtgagctggggacccagagcacccaaggaaggacaagggaactcagaagagcggtcactgcccatcccctccctggctgtgcctggtctgaggggctccagggcaaatctttcccattctccgcaggtgcttcctcggagcctgcacacgcacctggcccttctccctgggttgtcttccatccaccccaaagcctgtgtccactgggcaggtggaacttctgcttaggaacctgcccaaagtgggaggaagctgccccctgtcgcccccatgacagcagggaccacactaggctgcagctgcccctggtcttgactctgtccccctgacatgagctcttcctgcacgcttcaatttatattctccttagtattcctaaagctcagccactgcccaccacaaattttttgtttatggatgtccagaatctattcaatcatttctcctgtttgtgaatgttgaggttgttttttgtcactacataaaatgcttcaatatgtatttctccaaagtgggatttgagattttaaaacgtgcttatttttattaggcgtggccaaattagattccaaggattatgtagcccaagcaatatcgagcagtatctgtttcccttatactcccaccagtcctaggtgatgctggtattttttgtttttttagtttttatttcctggttgtgtgatcggtaaaaacaatacatcttcgtatcgttttgttttgtttttaatttttttatttccataggttattggggaacaggtggtgtttgcttacatgagtaagttccttagcgatgatttgtgagtttttggtgcacccatcacccaagcagtatacactgcacccaacttgtagtcttttatccctcacccccttcccaccctttcccccgagtccccaaagtccattgtatcattcttatgcctttgcatcctcatagcttagctcccactcatgagtgagaacacacgatgtttagttttccattcctgagttacttcacttagaataatagtctccagtctcatccaggttgctataaatgccattgcttcattccttttcatggctcagtagtattccatcgtatatatatcccacagtttctttatccgctcattgattgacgggcatttgggctgcttgcacatttttgcaattgtgaattgtgctgctgtaaacatgcgtgtgcaggtatctttctcatataatgacttcttttcctctgggtagatacccagcagtgggattgctgggtcaaatggtctttctacttctagttctttaaggaatctccacactgttttccacagcaaatttttacaaaagatggaaaaatagtggactcctgctctcagccccagaggggccaatgtgagtgcaggggaatcacaggaatcccaagaccaagccgcccgagactgggctgggctccctgggggtggggcttctcacccttagcactactaacacttggggctggaaccatcttagttgtagggggctgtcccggcctctccccactacatgccaatggtaccacccaagttgtgacaaccaaaagtatctccagacatagccaaagtccccagggggcaacttcttcctgatgaagaacccctgacctgagcagcccacccaatccctgggaagctccgcagaccccagatagcaggaaggagggagggagagagcaagggtcctgtccggatgtcaagctctgcctaccgaggccctggctgggctgctacctccccacccactcaacacaggagccggaggctccttctcaggccaagtggttagggttgagtgggaacggcagggctgagtgcacagtgcctgtctggagccgggcagaaaagcaaaaggcctttacggcaaaggggtgcataggagtcggccgaaggagggctgactcattgggggaagccatggcagggccccatggcccaggaccactgcctgggcagcatcgtcagctcagggtacccccgtccacaggcggtgaccttggaaaaatcagcagagcaaaggccagggacagccagtgagggggagccatggcagagctcagacacaggtggtgaccctggaaaaataagcagagcaaaagccagggaaaaccggcgaaggggggccatggcagagctcaggccgcattcatgctggaggtcaggaccagagcctgctgccacctggctcatctcaggagggaaagtggctctgcagagatggcaaatgtgtctgctctcccccacctgcgccacactgccccgcagcatcacttcccgccctacacctgccatgactccctagcttgctcaccccacctccatcctgccccctccgatgcatgccccaccccaaaagcaaaccctgctatgccttttggaggctcacctcctgtcctctgcagccttcaggcctcaactcaagtgtgccctgccctccccagcaaggacaaatgcgtgcaggtgttggggaccactctgtctccatcaactccagatgttgttttccacgtttgtgtacatttttgatcaatgtctgatttcccattggattttaatctccaggaaggtaggctgggctgtggtttgctaaactgtctatctccagcaccaaatagtaactgtaccataggctgggctccacagtcattgggtgggtaaatgaatggattaaataggcgtggacaagggctgtctctcctggctgcagagggcaagattccagactgcagtcagctcttgagggcaccatgcagcccagacactggtgccccaagcggcttctcctctagatggtggaaacctttgaaggccggcgatggcactgggggaccatctgtaggacagtggggagcctgaggtctcagttaggtgttgaggctgagccaggtgttgaggctgaggtctcagtttggtgttgaggctagatcaggtctactccagagaagggaaggccactaggggtcaccaaggctactgccgtgaattcagtccactgctgagacctggcagaggttgggtgaaactagtctggcaggcaggaagcagggaacacaaagggatccgtgaaagttgagctttgtgagtggaattc

SEQ ID NO: 62 - DNA, 200628 bp, Homo sapiens
gaattcagtgccatagctggagggaaatcaaaaccgcagagcagccactgggagccaaatgaaacagaggaggaaataaagggtacggcccgtcagaagcagacagggcctgggggtgcctctgagctctgcaaaagtaaacccccatgcctctgttgctttcatgtgatcagagagcctgggctgaaaccaagccacgggccacagaggcggagggaccctgtatccaagaggtggcttccttccggcacctgttgcccagattcgctgttgtggcttggttaggtcccttgccttaaatggacatagtgtgtgtcacaaaagcccttttctgccccttaggaaggaattaaatacccacctatgctcactgcaagaggtgcgaccacacaactacagggtgggctgtcttggaggccatacactgactcctgagacatcttcacccaggcttgggggccgggatgccgccctgaaaacacgccggatgcttgtagggccttagagatgatggcatccaggccttttgctttcccaggagggaatgaggggcgcagagggcctgaagggccggggcagagggcagctggcacccgggcgtgcacatccgatgtgttaagtcagacagacagtctctttattttagggcgataactcctgcttttatagttgtattctgttgagtcctgctcagaccctcaggggtgtttaaaaatacatacttctggctgggcacagtggctcgcacctgtaatcccagcactttgggagactgaggcgggtggatcacctgaggtcaggagattgagaccatcctggctaacacggtgaaaccccgtctctactaaaaatacaaaaaattagctgggtgtggtggtgggcacctgtagtcccagctactcggaaggctgaggcaggagaatggcgtgaacctgggaggcagagcttgcagtgagctgagatcgcgccactgcactccagcctgggctacaaagcgagactccctctcaaaaaaaaaaaaaaaaaaaaaaaagacatacttccttcctggctataggaggaccgagctgtaccccagattctcattgtatttgaagagctgggccttgagaggaggctttctagagcacccactttaccctccagatgggattttggcaactgtaacccccggccactttggacctgtgagcactgtcccctgacacattgacaaggaaagacaaacccaggggtttgtcctgatcagtccccaaggctgaaagtgcagatatgacacaaggtcaggacctgtgagagctccctcgactgccctcatccctccaagggtcagtgcgggcatctccagcctcctttagaggctgacaaggccaggagctccatgcctgcttgtcccacatcatgtgaaaaacaccattaaataaactttgctgggcacggtggctcacatctgtaatcccagcactttgggaggccaaggcgggtggatttcttggggtcaggagttcgagaccagcctgggcaacatagtgaaaccccgtctctactaaaatacaaaaaattagctggacacggtggtacgcgcctgtagtcccaggtacccgggaggctgaggcatgagaattgcttgaacccgggaggcgggggttgcagtgagccgagatcatgccattgcagtccatcctgagcgacagagagagactctgtctcaaaaaacaaacaaacaaacatacaaacaaacaaagccggcaagcacctctggaggtcttcgagagtcctggctgcacatatgacttaatttgaatgagacatttggggaaaaagaaaagcaattattataaaaagacgatgacctcaagaacattgcaaaacatgtctcaccctcattctcacagtctgagtgaaacaaggaactggccatttgctcaggggtgctggtttggcaaaggcttctgtttcattgctcggcatagaacaggaggggtgtactgtgaaaaagctttgaagcttcaaagccacgtggttcctgtggttgaaatgctggctaaaacttgagatcaccctcaggatacatcatgacaagagatctagaggaagtttgacaaactatagccctttggccaaatctggccccctgtctgtttttgcaaataaagttttattggaacacagtgtgtggaacacaggcccatgtgtttacctactgtctatggctccttttgccgctaccatggcagagttgagcagccgcaacacggggttacacagcctacaatatttgttctctgggctgatcccaggtctacatggttgatgaacacagtgttttattgctgggaaagttaacccacagtggccaccatacctctttgtttctggactctttcttcagagacttctccaagactctggcttcgtattcagctctaggatgatcctgtgaatgaaaccaagtcaagacagagtccttgttaattttgagtctgagctcctcagcgtgagcatacttggcaaatcagtccatgtattagcctcgggcaccctttgggtccagttcatagttggctgctgaatatttccagtgtaatcaccccatctgtggtctggatagtgacccaggatcatcccgcttgtggggaaccccagcccattgggagggccaccgaatctggcctctgtgtcctcctggaggtggagaagcctgtaccaggctgcagtgaacacccagccatgaactggccctgagaacattctacgggggagctgtgggagtcagaagagacgcagtaactgtcggcaagcgcaggaagcccagaggtgccaggccttggggagctcagcgcaggtcagcgaagggtgctggaaggaaagaacaggttaggagagaccggaggtggggagaaagcagagaccccacccgcgtggaggaactgcgggaactgcgtggtagaaagagattaggtgcaagagaaggtccctctcccagggagataggctgtgggaagatagaggagcgacaaaaagttccaaaccttgacagcctccttcagggaaccagaaaagtaaaaacaaaaacacaaagatgtcattacttaggttgttattttagaaataggacctgtccactaaggacaactttttttttttttttttttttttgagatggagtcttgctctattgagcaggctggagtgcaatggcgcggtctcagctcactgcaagctctgcctcccgggttcaagtgattctcctgcctcagcctcctgagtagctgggatacaggcgcccgccaccacgcccggctaattttttgtatttttagtagagacagggtttcaccctgttagccaggatggtcttgatctcctgacctcgtgatccgccctcctcggcctcccaaagtgctggggttacaggcgtgagccaccgcgcccggtcctaaagacaactttcttaagaattaggatgaaggtaaatggatacaggtgagccgggatgggtgggtgaccctgggttcctttaaggtttactgctgcttgagggtgactgtggactgtggcctttgtagctgtggcctttcccatggttttggaaattccccaaatttccaaatttcagtgctggactgaaacatctcagattcagctaaggcacacatgggtcacatgataggagacaagtgtccttctgcttcattaccaaagtctggggttcaggctatgtggaggggcggcccctgtcgcctgaggttattactcccaaaggagtccctgaccagccgctgggggtgcgagtggctcactttgggaaattcattcgggctccttggcactgtgtgtgcccagtgacttcggttatcacccccaaaatcaagatcccaagccatcagggtcaggagatcagggaatgggatcccaaggggttgaacaaaggggactgggcctcaccgccaactttccccagccacagggacatcacagaagggacatttgaaattgacttctgaacaagatggtgactgcttttttttttctatttgaatctttctaattgaaacggcaagggaagagaccacccagagagctccctccatggacagggctctgggctctgcccccgctctgccctgcagagctgtgtgctgtggacaggttgcattgatctctgtctggtcatttgtggacaggataatgagatcggctgaggaagagggtggaggctgttgtctgggcagataaaggtgtcgcccagtggccactagccgggcagccgtttatggggcactgactgtgtgctaggtcaggttctaagtgctttatatctattgatccattgagaccctacaaatgccatcaagtgaggacactgaggtacagggatgttaagcaatttgcctggggtcacacagcaaggctggtgccgaatctggatggaactctggcagcctggccccagaggcccgtcttataccctgtgagctgctgtgcctctcccagaaaactctaatccccttgtctgttgacaatattgtcaacccaaagctggcacatttggctgaagagtgacccttgggttcagtctgagagggagcagattgtgtgagaaaagacaatagaaaagttaaaaaaaattttttttaaagaaaaaaggcctttaaaagaaaaatatctttagaaagaaatgtctacattacaataaaaatgcatgaaaaagttcttttttttttaaaagggagcatgtgtagcctgggcaacataacaagaacctgactcttacaaaaaaattaaacaattcgccaggcatggttgtgtgtgtctgtagccccagctacttgggaggctgaaatgggaggagggcttgagcccgggaggtcaaggctgcagtgagctatgatcatgccattgcaccgcagcttaggtgacagagggagaccctgtctcccaaaaagtggggagcatgttttataaaattaaatagtggtcagtgtggttgcaccttacagcgcgtgcatgaggtcgcctctgttgtgcaccaaggctaattgtggggactgttactccttttcattcccacctaccctgaagggaattcctgctggacttgggatccctgggagtatggttcacctggcatcccaggggctacgtaatattgaatgtccctctctctggagtatgaagatgcccaacactggctttccctctatgttagtaaaggatccgttccctcttgtcagccacgcccagctgcaggcacagagctggctccagggaacgtgggtttggcacccggggaggcagatgctcacggccacttttggagacccatgggcagtgtccatttcctctccacccccacgggtggtgccgacagcccaggcagcccccagacgcgatgaggtcagtgtggtgagccctggcatgtgcctgagaccacgctggtggctgggtgtccatgtgagcatggggatgaaaacacttcagcagacagggagtggtcactttggccatggagggtgttcggaacgccagggtgttgagtggcgaggcaggcagggggtgggggatggggggcggccttgcctcagcttggaccagaagtgctttctgacctcgggcctccgtgtaagtcccaaggaggtcctggggtagggggaacgtgggggaagggcgtgatatgcacggcggcaaacccactgacctcttcctcttcaaagcccgtgaggtcccagcggtagttgagtcgcatctgtttccgcttccagtgctccatgaaggtggcagctgcgggcaggggcaaaaccagagtctctgatgacataaaggcattttttttttttttttagacagagttttgctcttgttgcccaggctgtagtgcaatggcgcaatctccacccactgcaatctcgcctcctgggttcaagcgattctccttcctcagcctcccgagtagctgggattacaggcatgcgccaccacacccagctaatctttgtatttttagtagagacagggtttcaccatgttggccaggctggtctcgaactcctgacctcaggtgatccacctgccttggcctcccaaagtgtggggactacaggcgtgagccaccacgcccagccaaggcattcttttctttatcagtgtttggtgagagagggtgacatcctgggctgagaacttcatgtgaattcacgtgttcagccctcccgccaatcctgtgaggcaagagccgtcattctcccattttacagatgaggaaactgaggcataggacactcaagtcccgaccgaggttacccagctagtcagtgagggatgggcagcatggtctgagagcccgtgcctcaaccatcctcccccattgctctcgggggccccggttcggaggtcaggaggaacgagggttgagcccaggccactcactcactcgggcttcaaaccaccccaggggtctgcctgctgaatcgcactggcagctgctgcattcagcttcatattcccaacagacagagcatggttcaaatgccgcctccttcaggaagccacagatcatccccctcaatgtgagaaaaacccagctcctctcgggaccttcttcagcctgcatctgtcttgcccacggtgtcagtgctgccttccatcaggatccccgtcccgtgacttgtatgtgaggcagggatggggcctcgttcccctgggcccccagttcccagaggtgcctgggacagacaggtgctcgagtgggcaccgaatgagcaacttttgtgagcacacagcttgcaaaaggagatgcccttggctgaactgtttatcctgaacgcttctccctgcagaagaaaatcagcagaggctgaggggcagaggaataggaaggccacagagtttctcagagctcacgattctcgagctgttccttgccaggcactgttgggagctggtcaatctacagacccctccaggacagggccgttgcctctgtctgaagatgcttagtacaaattttagggcaataataccagagttcaataccagccactgagctctgtgaccttgggcaagttatttagcctctctgtgcctctgtttcctcatccataaaatggtgccctctaataatcagactgggagtatcagtgaggaagtatcagtgtgatttaagcctcacggtgatcataggaggtaggcgctattcccatcccctccattttacagagggggaaactgaggctcagagggatcaaatggcttctccgagaagcagcagcactgacgtgcaaataaaatgggctgtgcgacggtgaccgtgcagagtgaattcacaaatgtggcccttaactgaaggcagcgtgtggcaggaaagaacgaaagtcatgggtgtgaacctggttcagaggtcgtgagtctatgcataacacatcccattccctttaaggcgaggtgcgaatagggcttccaaggatgcacgggtttgtctaggatggctactgtatcggccggcccagcctggaaataggaaccccccgccgaccccaggtcttttcatagcggagtaacttaatcctgagacttgctcgcacaggcaatggaaaagctgagaagccacacgggggatggtgggaccacccagagatgacccacagcaggagctggcatccgtttcaggatggcaggacagtaggaggtgctcagcgccaatgctggagccagaaattggagctgcccagaagaagctgggatcacggaggaagggcttcccaggggaagtcagagtctggagaagacacagtcattgctggggatgtcccaggaagtggagggagatggggagcaatatctctgctgctcccttcctcccaccttctgatttcccaaaagggcttcccactggctgaacctactgggaagagggagagccaggagcctggggaacgcgcctccccatgatgcagagctgagcaggtgagggaatggctatcgctgaaacacctgctggaaacccagccactcagcagacacgcactgagcaccatggctggtgaggagggccacagggggcccagcaggaggcccccaacccccagggcccctgaccctcaggaggcagacggtgggagcagcctgtctgcggtgggcaccctccccaggaggcaatgcggggaggtctctgcctccttgaagatgtcctttggcccctgtagctgctctggagcagtggaggaggccatccattccctggtctctgcctggtctgcaaggcccccgatgtctcctccactgtgctgtgagagctgcctctttctgtcctcctctgcccgcccaggccaacaacgcccttttacgacgctttctggggccgagcactgcccgggagggctgctccacgcacacctgcagagttggcctgtttacccgctgtgatggtttgtattgagtgtcaacttgattggattgaaggatgcaaagtgttgtttctgggtgtgtctgtgaaggtgttgctacaggagattaacatttgagtcagtggagggggagaggcagacccacccttcatctgggtgggcaccatcccctctgctgccagtgtggctagaaaaagcaggcaggggaaggtggaagagcacacttgctgagtcttccggccttcatctttctcccatgttggatgcttcctgcccttgaacatcagactctgagttcctcggcttttggactcttggacttacactggtggtttgttgggggctctcacgccttcaaccatagactgaaggctgcactgtcggctttcctacttttggggttttgggactcagactgatccactactgatttcccttctcctccacttgcagacagcctattgtggggcttgaccttgtgatcatgtgagtagtcgattctcctgaataaactccctttcatatgtacaatatcctattagttctgtctttccagagaaccctgactcacgcaccttccctgtcccggcctccccagctcctcctctttcccagacttggcctccattatgacactcaccccactaccgctccggctcgccctctctgcactggccagcttgcagcataacaacagtcaccagttcacgaggaggtatccgtgcactagcattttacacatatcagtcaatctcatcctcacaacgaccgcaggcaggaaggaggattcccgttcatagatttacaaactggagaccatttacaaaactgagattcagaggcctgagtgctgtgcccaaggtcagctgcaggggagcagcagccattggatttgaacctcattctctttgactccagagtcttcacagaaccacgatactggaccaactctctgtgcagatatttaactttccttaagaaaataatagctgtagcgtcacaaatctgattattaaagcataccatcttatggatgaggaaatgggggcacagagaggttaagtaacttgcctaaggtcacagagcttggtggctggtattgaaccttggtattctttctttcttttttttttttttttttttttgttttttgagaaggagtctctctccgtcacccaggctggagtgcagtggtgtgatctcagctcactgcaacgtctgcctcctgagttcaagtaattctctggcctcagtcccccaagtagctgggactacaggtgcatgccaccacgcccggctaatttttgtagttttagtagagacagggtttcatcgtattggccaggctggtcttgaactcctggcctcacgtgatctgcctgcctcagcctcccaaagtgctgggattacagttatgagccactgcacctggcattgaaccgtggtattcttgctctaaaatttgtactgtgtcttcaggtagaagcaaaggccctgtcctggaggtgtctgtagattggccaggacccagactggagcctagaatgtaacctggcggctgggggtggggtggagggtgaagatgttacaaagatgtggcttgtttggctcagacacgtttaaaaaataaagacatttgacataaaaattatgcatttcctgcttctcctttaaaagccagaagcattggcagcggaaggctggagctaagcaatgatcatccctttgtcaaaacttgggcatacctttccacttggccacagaccccaccatgccctattgtctggcttttgtgggcagtgagcgtgggggtggagctgtggagtccaggcttcaccagcaggaaaggaatgtgaaggctcgtgctgcgcctggtggccagtcctcaaagctggcattgtgagcagtgtgaagaaccaccttctagtggagtgagcgaaggcaggaagaaccctgagctccatcctcctcaagtaattctcctgctcctgagccctccctcctcacccacacgagttccgattcctgccctccgagggtcccaatcctggtcctccttgccaatgtgccaaccacctcatacaaatgttgtataatacccagctgctgccaggcgctggacacggtgctttcccacgcctgatcccctcggatcctgccccggccccctccacgcagggacgacgcactccattttatagacacatagctgaggttctgagacgtcaggggactcatcaagtaagggcagaaacctggacccaggccttctgatgcccagataggctggcattagggacggggcttcccacccacatgagtgtacaatgaagaaacagccttgagtgcagcagccttacgaggtggccaaagggacaagcccatccccctgaaatctggagtccaggagtcaccacagcacacagcacagagggtggcagcgagcgagaagccaggcctggcgggagcggatagttgggctatggtcccttcccacattgattttcacagcacagagtcacacaaactcctcatagaggcgtccagaggcagcagttgagcgaaagactctaggtctacatgggatctcatcagggtgagcatgggcagctgaccacactgctgccaacctcagtctccacatctgagaaatgggcttgttaccagtgcctgcctgagagggtctatcacagggtgtccctgacttcatccacaagcggtgctcagggcagggcccgcatatcacagggtgtccctgacttcatccacaagcggtgctcagggcagggcccgcatctctaagggcttgacagaggactgctcttacggcccagctcggtcgcagggatctccacgtgtccccttgagaggctcagcacaggacagaggctacattttgtaccaccccgtttgtataaaatacccagaatatttatggtaaatatatataaataaatataaatatttatggtaaatttttatgtagctgctctggagcagtggaggagcccagcccccctgaaatctgaatccattgattcaggtaaatccagagagacagaaagcagattggtagttgccaggggctggggttgggggaaagggggaccgactgcttcatggggatagggtttccctttgaggtcatgaaaatgttctggaattagacagaggcgtggatgcataacatgtgctaaatgccactgaattgtgcacctaaaatggttaattttatgttgtgtgaatttcactgcaatttacaaaaagctagtgatagaatgatgagcgtagattccccttatgtgttaatgtgcacctgccacatcttggaggaatcacaggagaatgggccggagggacacacacatgtgtggttacctgtggcggggggcaatctgtccatttcatccgggatttctcagtgtgggtctgggaatctggggtgtttctgaatctccccagggagcttgttaaaatgcagatctctgacctacagagtcacccagggtccccggaatctgcattctgaacaagctccgtaggctgccagcaggcatctggaagtaccgacccctccgtctttctgccgtccttctccaaccatccctccatccatcaggttagctgcctctcctcccaggctgcatcccaccccgcctcaacttatgccaatgtctctactactcaggcttcactccaatttccctaatttcgcggcacctccttagctggctggcggactccctttctgagctctctctcccctgagatgctgttgcccaaaccagggcacaatctcaggtgcttcatctgacactctcttggttcccctgagcgagctgcaacccgctctgtagctgcccagtggacagccccatctccccagtgagatccatgctcctcacgggcaggggtcgcgtcttccaagcctctgccctccacccctgagcccaccagctctgggaagcaggcagggcacagtcacacatgaccacagagcaggggtgcatcctgcttggactgtgcatgtggggtccctatccatttcccttcttgaaatgtgaccccctgctctggcctgacttgcatcctctcaaattcacatggaagccctgaccccccaggtgatggtatttgaagatggggcctttgggggttgatcgggtttagctgaggtcatgagggtggggtcctcgtgatgggattcgtacccttggaagaggagacaacagagaacgggcttcctgtctctccctttgccacctgaggacacagggagaaggtggctgtctgaaagccaaggcgtgggccaaatcagctggcaccttgatcttggacttctccatactcagaactgtgggaaatgcatgcctgttgttgcaggcacctgtccgtggtatttggttatggcagctggagcagactaagacacccaccccctgggaatagaaaccaccctttgctaacctccagttcccgagaagtgcaatgtttgcttagtgcagactccatttccatgaactagaggttagagaggggtctcctggggagtggcggggcgggggcagggctctggtcctgcacgagagtgctcggcagagatgggtgggacacaaaggcctccagccttctctttcgctctgagtcaccgggcaccctacctatttatccctggaacaagtttagttcccgcagacgatcacagtgcatccccttcgtccccacctagctgggagtgactcagctgggtgacttgtcaactccatgtaaaatctcaggcccagcccctgggaggggttccagttccatctctggcatttcattaaagttgggaccatctttctccggctttttgcagccaggctcaaatcagataaactcctttgttcttcgtggaactgacaagcagttaaaaccccattattatgctataatttcagaaaatggatccaagtgaatagctaaatagggctcaaggctgcttaatgagacatcttatttgaggctttcaaatgtcagaaattccagacagcagcaagctgaagtctctgggaccaacgtgtcagctccaggaaagctggaccccacggtgcagtggaagcaaagattaaaacagcaggctggaggtgattcatccaccgtgaatacggacccccacaccccggcgggcgggtggccacgaccaggctcccggctgccaggcagtaacaggtttctgtctctttgccattgtaggagcagaaatgtgaacagctggaggccggaaaagaaaggacacaagcggagaagaaacaccagaggaaaaataatcccttagagggtaaagaacaaataattgaataagggattaaaaaacacacaaggagagatccctggtaattacccttgacagccagtgtgaaaagggcccgggatgggggctttgtccctcccctctccgctcacacctctcagccgcagtaggttctttcctgttgctcctgtcttgatttagaataagctccttttctctaaagcaaatgcttcgtgggagtggcctggcttttttgtgaattccccccgcccccgctcaaaatgggagcgtgcagacggaacttgtacttgactgtatttgacagtcggggcacatttgttgtctcccagggctgaagtggagctagggaggggtgagacaagcagcaaagcctcccgcggggtcagcaggcacagagtcccccactcccagagtcgggggaatgtagccatctgctacgaaggggctggcccgcagctcttggggcgcaaggcactaggtgtgcagtgaagaactgcaaaacaggcaagctggcttctcgaaacagggccaccaaatgaacggccacagcccatgggggacggcgcgctcagtagcactacgcctacatgtcccctgctactggcttacggtacattcctgctaccccaagagggccctgcatgagggaacgtttggacagagaggtgggaccagggcacgtgctgaaaccttggaggcagatgggccggggtgcgcatctgagacgtctgttagggacctgttagctgtgtgattttgggcaagtcgcttaccctctctgtgcttctatcagaggcattccaaccagagagactccatcttgagtgaggactaggaaaaatgaggccggggcttgccgggctgtattcccagaaagtgaggcattcccagcctctagatgtttacattaagggacagattgataatgtttactaagcagacccagactcaggaatgtcctgatatcccgagatgttgagaacaaaagcattcctaatttcgctttagagataataatattgattctcacaaaatatagtaattaagacaattaatcctttatcacaaacccttgtagcagagtatatctccccatgattttctttgttatcctctacataaacaagcactgtacctagggtaggcacggtcctcctcttactttgggaatgccctattctgtagccattctttcactcctttactttctttctttcttcttcttcttcttttttttttccttgagacagagtcttgctcttgtcacccaggctggagtgcaatggtatgatctcggctcactgcaacctccgcctcctgggttcaaacgattatcctgcctcagcctcctgagtagctgggattacaggtacctgccaccacgctcggctaattttttgtatttttagtagagagggggtttcaccatgttggccaggctggtcttgtactcgtgacctcaggtgatccacacaccttggcctcccaaagtgctgagattacagatgtgagtcactgagcccggccactcctttactttcttaataaacttgctttcactttagactgtggactcaccctgaattctttcttgtgtgagatccaaaaaccctctcctggggtgtggctcaagacccctttctgggaacactttagcgtcttcaacagagaaaagaacagagccttggtctgctgtggggttacagagagagccggtgtagagcccttagcccggggcctggcacggaggcagtcctcagcgcagctcccaaagggaaggaggtgtatttttgtggagtcagacggggaaactactctaggtgagagaaaaacttggaggtaatccagtcaggaacaagcaaggcacgtgttcagcacacacgccagccggagccagttagtaatgcccgcggagtagggcctagagtcaggtatttggggctcaagatggagacttcttaaataacttgaaacagaagtaccatttaactcagcaatgccattactgggtatatgcccaaaggaatatcaattgttctaccatagacacatgtatgcatatgtttactgcagcattacttatgagagcaaagacatggaatcaacaaagatgcccatcaatggttaactgggtaaagaatatttggtgcaggccgggcgtggtggcttacacctgtaatcccagcactttgggaggctgaggtaggcagatcacctgaggtcaggagttcaagaccagcctggccaacatggtgaaactccgtctctcctgaaaatacaaaaattagctgggcgtggtggcgggcggctataatcccagctactcgggaggctgaggcaggagaatcgcttgaacatgggaggcagaggatgtagtgagctgagatcgcgccactgcactccagcctggacaacaagagtgagacaccgtctctactaaaaatagaaaaattagccgggcatggtggcaggtgcctgtaatgccagctactcgggaggctgaggcaggagaatcacttgaacatgggaggcggagtttgcagtgagccgagattgtgccactgcactccagcctgggcgacagacactctgtctcaagataaaaaataaaaaagaatatgtggtccgtatacaccagggaacactacgcagtcataaaaagaaggcctttgcagcaacatggatggagctagagaccattatcctaagcggactaaacgaatgcaggaacagaaaaccaaatgccacatgttctcacctttaagtgggagctaaacattgagtacacagggacacaaagcaggggacaggagacaccgaggcctactcgagggtggagggtgggaggagggtgaggatggaaaaactatctgtcgggtactgtgctggttatctgggtgacaaaataacctgtacaccaaaccaacggcacgcagtttacccatgtaacagatcagcacatgtcacctctgagcctaaaataaaagttggaaagaaaaaaaaactgcaactaaaaaaaaaagttatgaaaaagtatttggggctcagaaaccagaattctggggttcaagccctgcttacgagcgggtgtaagtttgggaaggttgccctagtttgttcatctgccagatggggtcatagagctatttacctccttcggggggagttagtgagtcagcacgcgggagatgctcatgacagtgcctggcacaaaataaggctcacctaccttcagctgtgattcttttcttttcttttttttttttttgagacggactttcactctttttgcccaggctggagtgcaatggcgtgatcttggctcactgcgacctctgcctcctgggttcaagcgattctcctgccttagtctcctgagattacaggcgtgagccactgcgcccagcctttttttttttttttttttctgagatggaatttcactctttttgcccaggctggagtgcagtggcgtgatcttggctcactgcaacctctgcctcccgggttcaagtgattctcctgcctcagactcccaagtagctgggactacaggcgcgtgccactacggccagctaatctttgtatttttagtagagacggggtttcaccatgttggcctgactggtcttgagcttctgacctcaggtgatctgcccgccttggcctcccaaagtgctgggattacaggcgtgaaccaccgcgcccagccagctgttattcttttctgaaggagaagaagtcactgaatggacagaggccaccaagcacaaggtgagaggttaggtttaagctcaatctcctaggacccaaggctacgttttcaaaatttcaaaaagcaacagctcacttttaacagccagtgcaacgtagcaactggcaccaggcacaagccaggcatggccctaagaactttgcatgcagtgactccttccatgttcccagcaaccctgtggggtgggactgtgtctccgttctacagatgcgaacctgggacccagagagtagaagcaagttctcaggtcacagggctggcaggtgacagagctgggatttgaacctgagccgggccccggagctggcactgtgaaccccttgactgtatctaaccgtcctactacgcagccaagtcagcctgagtaatccagtgaccgtcaagtgggctgccagggcaggccgggccccgctgggtggatcttcccagcctggagctggggcaccaggaggctggggagtcacagcctcctgggtcatgatcagagagagggagacagggagggatctgaccggtgctgaggtctctaggaaggcgagggagggaaggagcagcagacagcggtgatggcgggtgggggggtggggggtttgtggagatagttccagatggacgcagcgtccagggaggcaggcaggggcaggcaggggcaggcaggggcaggcaggggagagaggacaggctcagagagatgtggcttcagttcccggctgtgccaatggagcctcactttcctcctctgtgaaatggggacaggttctccgctgttcggatacagtgtgataaacaacgggagctctggcacgtgtgcttcagcggtgacagactgctgctgaccctacatttataattctaaatttacgatacattttgatccccaaattaaaaaccagagctgggttgtaggcctgggaatcttcccaataagccacgtggccttggatcacacatagacatcacctcccaatgctctgcagttgccccagcaagaagtcctccaacctcagcttgaatgcttcccagcacggggcgctcaccccctccctggccagcccagctcagcgtgtctcactgctcaccactggaactcacgccctacaccaagctacggacccacggctcccattcttggcctcctctggaaaatcgaacgcctttgtccacgaagagaaacaactgcatttatctcgaggctatgctgatttctgtgcgtgtctgtccccacctgtgactggaatcccgggaaagcaagacctgtccctcacactgctctgcccacaccctcgtgtggtggagctgagcgtgtctgagggcggcttccaggcaagtgcagacgccgacgacaggcacctgacctcaccaggaaaggcctctcctgactctccctgggccctcacttgctcacagaggcttgcaggccctggctgagccttcgaacctcagcagaggaactcccatcttcccctaacaaactccaggcagaagccccaaacatgaaatcggccaaaggacgatgttcatttaaatcaggactgaggccagggtgaggcgagggaggtgctggtgctgcaggtcccacgacactcactctcagggtcatgggcacctaagacgagatgccaacatccatgctgtacccaggcatccctcccttgcacttaaacctcttgactggtgcgggttcctgcagaggcctgtgggaccgagtttgagaaccacaggggaccgacaagcccagagctgctgccccctgggaatcaggcccaggtctagagcctccagcagggtcagccagccctggacgctctagtcttggagggtccacaggcctgggggccacagggctgctagccagcccaacgcatgagggaccagacccttgagggtttctccccaaacaaccagggtgttgaccaatctgcgctgcctgcatcctctcaaaggacgaccttgcagcaggaactcccagaaggagggaggtctggggggaggggctcgttctgtggctgcggcacccatgcctgcccagtaggcactcccacaggtgacctggaaggcgtgactgggtgatgctctggcactcagaagaaggaatttgcagtgaccagaatgccacgtagcgctttgggctcccaaaacaagagccgcaacaggcgcttatcacagagacctcttatcgcccggcgtgttaagctcgaaatgggatcattacagcccaagacggcttctttcttcatccgggctccttcagcctctctcctcccttcccctgggaatgtgctcttactgggcatgcctgtaattggagaaggagaaaatgaaacaccacgtccttctttctctgcagaggagggaggcccagttctgtggacccaggaattactggacgtttggagagtcccacaaaagtgggtgcctttggagtccgctgtagagaagaacaccagccaggggttctcagacggctgtgccctcccagatcctaaggtgatgccagggatgggcagagcgtggggtggaaggacgtggtggctgctttctccagggcccttaaaagccttttattcatggttaaatgtgggagctgtaattcataaccctgtgtgtcagatgagaccagctcggccaagcccgccagcgtctccttaactcatgggaatagcatgagagctaaaacaaagtgtggagtcctttggaataatctaaagtctctcttttccatcggaggccttttctttggagaagtggctacagggagtctaagggctgaattcctcccagggatttcagcagggaaagaggaaacagacggatgaaatcagggtccccagggccagggagggagggtgccatgaggctcccaatcgcttctctcacaccttcccataggtgcccttcctggagctgggcccccactgtgtcacccctctcttaatcactgcacaagctccctcttagacttgcggtctccgactcgagcataagacaggaaagcatctttgacacagcagctgatggcactgggttctgattcctctgagccagcacactaagttcttctcagcgtgtccttgctgacctctccggatgctctgacacccctctcacctggtccctgcacctggagctcctgccacagccccgcacccttcccatggggccttctcttgaaacctacgctgcagcttttagagcagcggatacatcaggtttgcttcccttggttcccctggggcccggcacagtgtgggatacacattgtgctcagtacacatgggccgatgagtagctcccacacaccaggcacgtgcacatcctcatgcaggtgggacacatgtgctcagtacacgtggctgatgagtacctcccacacaccaggcgcacgcacactctcgtataggttttctttggttctcacatgctccaatgtggtaagacggcagtgaccacctatttagagtaagctatgtgctaagcctcggctgagagttcatgtccgtcgcctctgatcctcatgcagcctcattctgcagatgaggaagctgaggtttagagcagtgaggtgggaactggcagagcgggagtctgagccccgggggcgctatagaaatgtacacggggcagcagggctgaccacagcaggcggcactgaacaatcttctagtggctcagggggctcagtgctacaggggtcacacttacttgtgggtcatgctatggaccacctgaaatactgtctcagtggctgcacaggcccaggggtcccaaatgaggaaacagagctgctggcgaccatgtggaggaagcgctcatgagagccaggcccttccagctgcgcacacagcgggtggggctgcagcgaggtgcctcggggctgaggcctctgtggagggaactctgctaaggacacggagctgcccaataagattccagggtgaggagggtcttgagggaggtggccgtccacaaagcatctaaatggagaagctccaactctcaccattgccggcacccatgctcagagctggcggcctctgtcccgggtctccggaagggtaggaatgagatacagtgttggtgagccgaggcaagaggacccggcccagctgcccaggctggagcaggagctgcagagggtgggccaggcctcccctccctcacctcacctgatacatacctcggctctgctgtgcacacccacccgcaaaccacacaggctcagccaaaccctgagtcccagctgcaggatatctgcgccaagcaggaggataacctgagcctgtcggcttcctcggcttcatggggaattctcttatgcactgttggagagaacaccagccccgaatgcagcctccggagcaggggaggaggctgccgagctgtgtagggacagggctcgggcctggagaggacggaggcgccataaggatgaagaggggaggagcatgcagaccccagagctgggtgctggtgcttcagtccctctctgcccaacctgctgggtgcttctgtgcaggccagagacccggctctaccttcatcctctgaacctcctctaggtttccagcctcccccgagcagctgctccttggtcaggaggtgcctgagccggaatcacaggccatacttcgaggtgctctccatggaggatgctggcaaggctttggcaatgccagccaatgctctgcttactgatggggcacggtactgaatcctaggtctgatcttcaggatcagcacgctggcgggtaagggccacacagagccccgcaacctggctggcctctgtcctcactggtcaaacaattgccttttcagtccacatttgccccttgcctacccacagagcacacagggcagtgccaagcgggtacagctgcaggtgaggtggcgctattctggccccgggagcctgccccaagcaggggtacgaggtgggacggagaggcccctctgtctctacacctggtctctctgccacaaatgctgcctcccccacacccatgtcaactcatctgaagggcctcacacctcttccagaaagccctcctgaactccctccagcgctgtctctgtgcctggccccatctcctacaaggtgggagctcacaggtaaggatgggggcttaagtgcccggcgtggggccaggcctgggagatggctcagcacaggctgcccactgtgggcatctcaaagctggcacaggctgagacacggggctgcagaggacagaatgggcctgcttgctcacccagaacctctgtagaaatgcattcagccaccacttaccaacctcccaagccccgaaagctggagttgggagtcgggtaggactggggttagggaatcttcctggaggaggaggccagtgccttaggtttgcatggcagtggagcccagtggcaatcaggagctgagtgaccccaggcgattcccaactctcttaggccttcgcctccttatccgaaaatgggcacatgaagcctgcagggatgctgagggctctagtgagacacggtgcctccgggacctggcccaggtcagctttccttcaggctgtggtggtcgccagctgcagcagggatggaggcaggaccctcgggcctccctgctctaaatcagctgcccttcacaggccagcataccctggtgtcaggatttctcagagcaaaacgtccctcctaggcttttcctaagggactctttgctgggtcaggagaacccgtgtctctcctgatgcactgcgcaccccagtaacctgaacacaaaacaggggtcgtttccaccagcccccttcccctatgttttttcccgacaacccctgcctgaggatgatttcgcaaagacagacagaagcagcctaggtaccactcagactcaccactgcccaaaaacccagtgctctggagccctgcttaccccagagggccatgaagacagagaagaagaccgtggcggggttgtcgaagaggtggctggcgcgggccgtggcgcaggctgagctcatcttccagtagctgcaggtcttgtcgcaaagcgggcacatggtgatattgtgtctctggtcacacatctccatgctgcaagagagggggcagccctggagtcaccttgttgggccatgatggagcacctcctgggtgccgagctggcctgggagaaagcgctgggcccaagctgggggttggcgagggtccctcaggtccatgccatagtggacataagccgggtgcttagccatgccctgtccctccttgccatccagggcagcttcacaggcgtgtgacccatgctgttgcaccagccctgagctcagcagggcctcatgcttggtttaatgctcccctgttgctgccttaaaacacacaatgggacgggcgtggtgactcacgcctgtaatcccagtactttgggaggccaaggcgggcggatcacctgaggtcaggggttcaagaccagcctggccaaaatggtgaaaccctgtctctactaaaaacacaaaaattagccgggcatggtggcacgcgcctgtgatcccagctactcgggaggctgaggcagaagaatcgcttgaaccctggaggcagaggttgcagggagcccagatcacgtcactgcactccagcctgggtgacagagcgagactccatctcaacacagacgcgcacacacacacacacacacacacacacacattgatttttgaactaaagacctgcattttcttcttgcatggggccctgcaacctctgttgccggccttggaggtggactcacccagacctgctttgtggtagatgggccctggaacattcacctctggggtgaccctgaggcagcagcctctgcagcctatccttgagccacttctaggagaggcagagttcccagcctgcccccatataatcggcaggcacggtcaaggcttgtgccaatagcaaatgctagccaggtctttatgttataaggccttggaaaacagtgagatgatgagggcccttgctctgtgccaggcgccgtctatgagcggttcacacagcatctccatccgcctggtggggcggctgccttggacgtggcctgggtgctctggacacaggaggtggagaaacggggatcccaggactcttctctgggagaacgggggctgggccggaaggaataggtccccagctgcccggtgcagcggaggcccaccctgtaggctcactcgggaagccgggggggcctgccagggatgatgggtcccgctcagtgcaggcttctgctttgctgagcacaggtgagcctggggccagatcccaactactgtggccaggagagaggatcttcatgatgcctgagactcatctctgtgcctcctccccagcactgacttactcccactaatattagaaaatactaatacttccaggctatcggcggcgagagcaggagcctcattactggcaggcacagatgttccacctcacttggaccagcactggggactgttgcaatcccagagcccagagaggggaagtaacttgttcagggccacgcagcagagtgggaatggaatcctggtctgtgtgtatcttcaaagcccaagcactgccggctctcatctactgctcaagggccatggggggctccttgtggaagttgggtggcctgaactgggccctcaactgactactcataccctccgtggccctggccaagtcctttagcctcagattcagtttttcgttctggaaaatgaggaggggtcagaataaggtcccttcctgctctggcctgctttgaactttctcctttctgctgccttggacaaggctctgggctctaagtacacaccctggctggttgggtcggagggtgatgtggggggatgctgaagtgggtgtttgttttttgactttctggatatgctgaacttatgcgcagaaccatgcctggtccacagcagctggtgcttaataaacgtcccttgcaaggctctgaagggcctcctctgtgcccagcatcatgggcattctggttcaattctcttccttcaggtacagtccctaaacatttattaaaaagtggtgtagggccaggcacggtggctcatgcctgtaatcccagcactgggaggccgaggcaggcagatcactcgaggtcaggagtttgagaccagcctggccaacatggtgaaaccccgtctctactaaaaatacaaacattagcctggcatgtaatcccagcctgtaatcccagctactcgggaggctgaggcaggagaattgcttgaacctgggaggtggaggttgcattgagtcgagatcacaccactgtactccagcctgggcgacagagtgagactctgtgtcaaaaaaaaaaaaaggcggggggtggggtgtaggtactgcatgtatctggcacaaaagatggataggttaagaagaattcattgcagccacagcctggagcatggaggaagtgtgtgtgtgtgcatgggagcaggggtcgggcagggtgagtaggcacacacagccgttgggagaacctgcactctacggtcagctagctctgggtttgtatctcagctcttgcattttgtgatccgtgtggccttagttttcccggctgcagaatggggttgctgatagtgaagagaagccgtgttaataggttgtcaggaggattaaacaaccaacaaccaacacgagtgtggcccttggaacagtgcctggcacccctcggccatcacgtggtcaccaacgctgttgtcattattatgcaatagccaagcactttgcagcagcagtgagttttaaacacgagccaggagccggcctttcggggtttatctcatgcccctcactcagcctcctctcttctgagggcctcttgagggcagaagaaagcagcgttttggggggttgggggcaggacgtccccagttgggcacaacgcgagcccctcttccagagaacaggcatgtggaaggccatccccatcatcgccagcatgtggcccaggccacagtgaccacctggactgaggatggcctggagtccacagtggtgggactggggacaggcagggccaaggcgtacaccaacggcctgcccatgagccctaccgctctcctaggctctcctccctgcccacctcagcttctcgcacaaacaccatcagcccaacaagaagcctttttctgctggttttaaatccccctccgcctctcacttcaccgcctttagccaaaatacaaagagcaggaagctctcttcttcagagaggaccggaggtacaagggcagcaggcggctccatgctggggcttccctgcaagcttggtggggatggggcggaagctgcagggagcacgcacctcccgcttcgctccaggtcgcctgctgggcagaggccttggctttggcctcatctccgcccacagcggctgaatcctgagtaactgctgtttgcatttctgaccatgtggtggaagggccgagctggcatggccaacccctgggctggcagagcctccctgctggggccaccctccaagggaaggaaggaaggaagatggaggtcccccaggcttcctccagggctcatggggagaatcctcaccttacactcaccattttcctccggctttgagctcctagcctaaagccagccttacaatccccaccaagtctggactaccttgatctttaccacaaccaaacccaagtgcccaggacctcataccatattagcaaacaaagggaaacctttctcctgcctaggaccaaattaacaccaaaagggagataagccagattcctcagagctttgattcgggggtgggggtggggtggaatattttaggtgttattcatgtatcaaaacatcacttaaacaaaaattgaccagatatggtctttttgtgctgcaaagagtcagtttctttcctaagactgattgggtctttacagacaggctcagtggatacattttctaaactatacctctgctttagagatacttggcaggagtggttcgaaaaataaccaaactaacattttagggcttttctgagacttggagcccttgcagggcagggtcagcccaaattcccctttatagtcaattccctggcagagcgatttgcacgctgaaggcactgcctgtcggcatagaaaccctgccagaggttgggagcctggaattatccttaggttcatgtcaggaaatctaagaaacagctacaaaagcaagcaccagagggactctgcacactgaggctgagcttctcaaaacttgactctttttttttttggctacagggccccactctgttcccccaggctggagtgcagtggtgagaccatggctcactgtggcctcgacctcccgggctcaagggatcctccaaccttagcctcccaatgtgttggcattacaggcatgcgccatcgcaccaggcaaaactggactcttgttctgaagtcatgtgggggaactgggcccctgagcgaggcgaggctgtctcaggtctgggccttcttttccgagctccctgacgtctgacatacccttggtgaacagcagaaggcacatcggatctacattcagatgcctgcctatgctgtgggatgcaatcctcccttatggaacagttcctgcagaatttctcggggccgtgcagataagggaagcaggcagccttaggaagctgggcaggtggaacctactgtacagcccacgagcgccagcctgcactgaggccactagcattcgcatctcacctcccgggagcaccagcctgcaccgaggcctctagcattcatgtctcacttcctgcaagcaccagcctgcaccgaagcctctagcgttcacgtctcacctcctgggagcaccagactgcaccgaggcctctagcgttcatgtctcacttcccgcaagcaccagcctgcaccgaggcctctagtgttcacgtctcacctcctgggagcaccagcctgtaccgaggcctctagcattcatgtctcacctcccgcaagtgccagcctgcaccgaggcctctagcgttcacgtctcacctcctgggagcaccagcctgtaccgaggcctctagcattcatgtctcacctcccgcaagtgccagcctgcaccgaggcctctagcgttcacgtctcacctcctgggagcaccagcctgtaccgaggcctctagcattcacgtctcacctcccgcaagtgccagcctgcaccgaagtctggcattcacgctcacctcccgcaagcaccagcctgcaccgaggcctctggcatccatgtctcacctcccgcaagtaccagcctgcaccgaagcctagcattcatgctcacctcccgcgaacaccagccagcactgaggcctctggcatccatgtctcacctcccgcaagtaccagcctacactgaagcccctagcattcatgcctcacctcccggccacacaaggaaacagaaaactttcttgtcactaatgaccaacagtgaaaaagaacaagccaaccataacaacttttaaagaatgaaaatggtcagatgtttcttttatgcctttctcttaacaataaaacatagcctagcacagatgggcctgagaaggactcccagactcctagatggcttcgaaccatgtcctttcctcctgacggctcgtggcttggcgtgaggtttcatgtgtacaggaattggtgtgagaggccagtgtcccaatgaattgtgcagctgggatggcaggagagggctcctctgtgtactgcggggtggtgggggtgggctgccgcctacctggggatgttttcatccatggtggcgcatccgtacaggaagacaatgattcccacgatggaggcagggatgagcatctgggtgtacacgcccagccaggcgaagtacaggccgatcttctccccaaaatacttcctacaccaggggagcagagcagagtcaagcccactgtcattcaatactagcagggaaacatgtcacaggccctccccagcaagagcaactcaaaccaggggcactggttccctcatcccagaagcagagagtggggtcctgggccgccccatcaggttgggggtgctctctgcttttctgaagccctcccctcttctctctttttttgtttttttttgagatggagtctcgctctgttgcccaggctggagtgcagtggcgctatctcggctcactgcaagctccacctcccgcgttcacgccattctcctgcctcagcctcccgagtagctgggactacaggagcccgccaccacgcccggctaattttttgtatttttagtagagatggagtttcgccgtgttagccaggatggtctcaatgtcctgacctcgtgatccgcccccttcggcctcccaaagtgctgggattacaggcgtgagccaccgtgcccagcctcttctctttctttttcttttcctttctttctttttttttttttttgagatagagttttgctcctgttgcccaggctggagcgcagtggcacaatctcggctcactgcaacctccgcctctcaggttcaagcgattctcctgcctcagcctcctgagtagctgggactacagatgcttgccaccacgcccattgcatttatttatttatttatttattttgagatggagtcttgctctgtcgcccaggctgcagtgcagtggcgcgatctcggctcactgcaacctccgcctctcgggttcaagcgattctcctgcctcagcctccctagtagctgggactataggcatgcaccatcactgccagctaacttttgtattttgggtagagacggggtttcaccatgttggccaggctggtctcgaactcctgacctcaagtaatccacctgcctcagcctcccaaagtgctgcgattacaggcgtgagccaccgcgcccggtccccacttctctgtggtgccttgggaaggtgggcgcttttccgtgtgcgatggcccatgctgatggctgtgggcctacttcccctgaggctgtgggctccattccaagccctgttcagcataaggactggaaagaaccttggccgggaggtgccaagaaaaccaattgctcctcatattaagcgtggttggcagtttgatggcttgaatggatttctaccagtcgagctctggcgggcaagttgcctaacctggtcggcccctccttcctgccctgtgaggacagagatcctcttgggagagaagaaatccttccacatttgaggcagctctttccttcccctccacgtctcaaatccggaaaaccctcccgccgcccagtgaggccaggccaggcagtgaatttaggagatggtaaatgtgactgaaaagggcccgacctccagggaatttgaataaactgcttcatctaatgctggcccaggctctcagccctgcagggacattttgggtcttcctacacaagctctttgagttcaaacacgttcccgggtactgaacattcagagcggttgaaacccacagggatgttatccgactgccatcggagtagggacttgattcccgcaggctgtggcgcgttcttacctgaccaggtcgatgggctggtacttatagaaaactccatagcgtgcccactcttcgtacaggagctgagggggaggaagcagtggggttggtgacaatgtggcactccgaggttgctccccggaacgcagagctgcggggactgagcctccgtgacatcattcattcatcccataaacacttcttgagagtgggctgtgtgggctgtgaacgtggggatgggaaagaagcttctggcaggttatggaatgtgagctctttgtgatttgacctggaattgatctaaatgggccagacgctgtacggcttcttacctttagggtttttggtcatccccatcagacaccaaaccattctttataaaggtcacaaagtcaccagggttttgagcagagaaataccagtggtgaaattttaaaaactctcacgggatgcaaagatactcgaggtttatctcctgagatgggctgtctgattaaaacagctcttcatgaaataagtgaaattgacacacaccctgttacccccccaggctttgggcagggacagtaatgagtttggtggattggaagccttgtgtgaacatgtaaagggtgtcctgatgaagatgctgggttaggactgctagtaaaaaaataaaaaaataaacccgcgcatgtgggtggttaatgctttacagacctcaactcaaagcccaggctcatacatcatgcccgcccagggctacagggccacactcagggaaggcaggattcaggtaccttgaggggcccagaggctgtcctgggacagagcagctgcccaccaggagccagaggtggggcagctgccctcctcctcagctcagagcccattctggggccaagctgcctcccaaactcagagtcaaggtcatggctgggggacgagggaaccccttggagcctccataactcctccagtgcctggagggcaggaagtgagtgtgagccatctccacagctgacatagcctcgcgtgcctgagcgtctcctctggggtaacacgggctgtgcactatagagaccccccactgacaaacagggaggggaaacagtgcaggtgtacccacggctgcccccacccaaactcacaggtggagggcgtattcctgagatccatagaggggccgcctgctgctgcacagccccccgaaaccaccagcctcacctgcagctaagcatggccatggttggaggggcttgtgacttgtctgcggccctgggaaggttcccccacccccgaatcgagagtcctgggcagaccccttcccccatccctgtctcctcctttacactgaaggatgcgatctctcctcccagggcatggagagaaggcagatgggctcatgcgagttagtgatgtgcgaaaggtacagggtgtttctgcatcagtgcgtttccttaggcagataacgatgaaaaggccacagttttactgtgtacatagggaagcctcggccagcaaaccttgatgaagcggagccacacctctgcaaaagcaaagcagccatcgctaacctgggcagcttcctcctctcacctagagtcaagctgctgatttatgccatagacaggtggaagatgcggcagagagtgaggaggagggaaggaggagacagagagacagagggaggaaggggggagacagagacagatggagagacagagaaggagagaggcagcgagagagacagagagaggtaggggagagggagagagagacagagacagatggagagacagagacagagagagagaagggggagggagggaaagagggagagagactgagacagagacagagagaggtggggaggtggagagagagacagagacagaggcagatggagagacagagatagagagacagacagagagaggtgagggagacggagagagagacagagacagaggcagatggagagacagagacagagagacagagagaggtggggaggtggagagagacagagacagaggcagatggagagacagagatagagagacagacagagagaggtgggggagacggagagagagagagacagaggcagatggagagacagagacagagagacagagagaggcgggggagatggagagagagacagagacagaggcagatggagagacagagatagagacagacagagaggtgggggagatggagagagagacagagacagaggcagatggagagacagaaagacagacagagaggtgggggagatggagagagagacagagacagaggcagatggagagacagagatagagagacagacagagagaggtgggggagacggagagagagagagacagaggcagatggagagacagagacagagagacagagagaggcgggggagatggagagagagacagagacagaggcagatggagagacagagacagacagacagagagaggtggggaggtggagagagacagagacagaggcagatggagagacagagatagagagacagacagagaggcgggggagatggagagacagagacagaggcagatggagagacagagatagagagacagacagagaggtgggggagatggagagacagagacagaggcagatggagagacagagatagagagacagacagagaggtgggggagatggagagagagacagagacagaagcagatggagaggcagagatagagagacagacagagagaggtgggggagacggagagagagacagaggcagatggagagacagagacagagagacagacagagaggtgggggagacggagagagagacagaggcagatggagagacagagacagagagacagatagagagaggtgggaaggtggagagagacagagacagaggcagatggagagacagagatagagagacagacagagaggtgggggagatggagagagacagagacagaggcagatggagagacagagacagagagactgacagagaggtgggggagacagggagagagacagagacagaggcagatggagagacagagacagagagacagacagagagaggtgggggaggaagacagggagagaggcagagacagaggcagatggagagacagacagacagacagagagacatgggggagatggagagagaggcagagacagaggcagatggagagacagagatagagagatggacagagagaagtgggggagggagacggggagagaaggagggagggagcgagacagggacagtgagaaaggacaaagctctgcaccgggggaggagggacccaccctcagtggctcccaccaccttctgacagacgtgtggagggggcctactcccagctttctacatataccgcttgacctcggtggacttttctttctgccaagaggcgacatcagtcactctgcactgtcaaggcaaagaaatccaactgaagtgctggaaggaatccaaggtggcaccttagccccggtgagcaggcaggggggcgtccagccatgggggctgtgggctggagaacaaggccagccaggcggctccagtcactgtgacctgggagccttccagcatccggaccctggagggatcccaacaaccctcaggcgtctctcttgtcgaaaccccctgccaggactcacatggctgccaccggcccttggtgacatggatgcaatctttaattggtgtatgtccttgcccgttgcccttccctctagaatggagacaccagagggaccaggtttgtctggtccttctcaccctccatgcctccaacagggcctgtgggttttcactaagtgactgttgaatgaatggatgaatggatggatgaatgacatgttgggctctgtggctcctagtccagcccagggatgcagcagacctcagtccacacctggaatcaatcccccacaacccaagccacccctctccccaacagggcccaggtggtcctactcttccagtgccctggcagggggaggcagcagctgcccaccagaacaccttctgcacatccaaagacagctctgggggcgtgccttgctcacctggggttcagttctgtgtaggtgtgaactcacccacggtcctggaggaaggggctcccaagtactcctacatgtttgtggccccatgatcaggccaagagtgatggctgccctgcccagacctgcctcctgcttaaacttccctacactctcttctgcccaccctccagctcagcacaggaaaatgtcattgaaatgtccttggctgcactttcatttctgccctgtgaggtatccagggtcaggcacgtggggctcctgccactgattagaacaataatggagaagccatggagtctgtcaccggaaaggcaaaaacttggcaccaggctgtgatgtggagccatcgtggcagaatgcagagttccctgcagctctgagttaggacccaaacacccatctaatcctccctccttccctccttttcttctttccatcatccatctacccacccatcattcattcctccagcatctatccatcatccctccatcatctatccatcatccatcattaattattcatccctctggcatccatctattcacctacctgtccacccatcaaccatccacccatccatctatcatccacctatccaaccatcaaccatcattaactattcatccctccggcatccatctattcacccacccctccacccatccatcatccatcattcatccttccatcatccacccatccacccgtcatccatcattcattcctccagcatccatcattcatctttccatcagccacccatctacccatcaaccatcattcattcctccagcacccatccatccatttatccatccatccatccacccacccatcatccatcattcattcctccagcatccatcattcattcttccatcggccatccatccatccatcattaattattcatccctcaggcatccatccattcacctacccacccacccatcatccatcaacccatccatccatcattcatccacccacccatcatccatcattcatccttccatcatccatccacccacccatcacccatcattaattcctccagcatccatccactcacccacccacccccccatcatccatcaacccatccatccatcattcctccacccacccatcatccatcattcatccttccatcacccatccacccacccatcatccatcattaattcctccagcatccatccatccacccacccactcacccatcatccatccatcattgattattcatccctccagcatccatcaattcacctacccgctcacccacccatcatccatcattcatccttccatcatccatccacccacccatcatctatcattaattcctccagcatccatccatccatctacccattcacccacctacccacccatcacccatccatccatcattgattattcatccctccagcatgcatccatccacctacctgctcacccacccatcatccatcattcatccttccatcagccacccatccacacacccacccatcatccaccattcatcccttcagcatccattcatccatccacccacacacctacccatccatcaaccatccatctgtccatccactcattcacccatccatccacccactcatccatcaaccatcattcatctctccaccatccatccacccacccacccacccatcaatcatctattcatccgtccacccattcacccatccataatctatccatccatccatccatccatccatccatccatccatctatccatccatccattatccatcattcagttatccatctccatctctatccatccatctatcatccattaatccatccatccacccaactgtcattcattactccttgactacccccatgggccaggccttgtatccactgctgggacctaaaattacatggggagtgggaatcattccaggtagagtaaacagctgggcctggacaaacccgcattgtgtttgctgggcctggcacagagtagtgcccagtaggtatttctcaaatgaataagtaactgaatgagctagtcctggcactgacgtgaccatcagccaagcaatcctgagactagaaaagcagccagtgtggctggagaatggaggagggggaggagggggaagagggggtagggttcaggggcctgtgacccagagaactgaattcggctagaaagggactactggtgtccatggaagaagcatttttagggggaggataggcatctgccaagtgccagaggggtgcggagggatgaagggggctggactctgaggctggaattggtcaggacaggcctgtggaggggatggtccttttccaacaggattggagtcgggagttctgcaagtcatggggtcccagacgatgccagatgttacactaaaaataaccaaatatgtaatttttgtgctaagttagatagcatcttcatctggattcccaggcgggcaagttgtatcaagtaccaaagatttaaaaacatgtatgggggcctgtgggggaggctgaaatgaagaacattccatacacagaggtcctggcccctgggaattgggacaaggccactattgtgaggttgtcagggaagcatctctacccaccacctgtggaaggaccagcagatagggcaagggctgcacatgcagggtccaggaaggactgcttcccgagagggaaagctgggcacatttggggaacagaggctgacgtggagacctggggggaaggctggtatcgggtgtgggcccatgggagaggagggaagagcaaatggatgtggtggggacatgttcttttcgggggcatggtagagaagcagagcttcctggggagcctgggtgggaagggtggagttcccatgctcagagtgaggggtagagggtggggaccaacgctttggggagtgaggaaaattagcaacagccactaaagaataaaggggctggctgggtgcggtgactcacgcttgtaatcccagcactttgggaggctaaggagggtggatcatttgaggtcaggagttcaagaccagcctggccaacatggcgaaagcccgtctctactaaaaatacaaaaatcatctgggcctgctggcaggcacctgtaatccaagctactctggaggctgagtcaggagaatcacttgaacccgggaggcagagggcctgggtgacaaagtgcgactccaactcaaaaaaaaaaaaaaaaaaaaaagaaagaaacaaagaaaaaagaataaaggggtcacccagtgtttcccaaagtgtgttccctagaacactagctcaacaacttctccattaaaagggttccaggtcaggtaaatttgagaaacacttcattgaccaccatcaaacaggtttccccaatgcgctgctgggggccattgttctctgtgcacctggtgtcagtggttcccaagtttatttgcctgggagccctgtgggattaggccacatgccagcaaggactgctggaggcccaggcacagttcagattgtcccgagaagataagggaaggacagcgtgcaaggagtgggctctgggaggacagctttccctttcccatgctcacggtcacctgccaagggcatttttgacaatcagaaagaggaaaacaaaccagccacacaaagctcacggacttttctcctgaaaaggtgagaggggacacccgcttctcagccccctgcagcgagcgccctggggaggccctggaggccggtaagtcctcggtccagctgcaggcccaccccgccccagaacgcctccaggctctgacagagccacctcctgctccgctccatcaacttacttttctgtcgttgaactcgacgttttcaccgttgtagtctccctgttaaaaaaagaggaaagggacgttcttatcatccaatggagctttggaggcgctcacatccattatgtttcaaaacataaaccccagcagctctcgttgacacaaattaagatcatcctggggcaacatttcacacagagtgtgagggttgcccaggtgtgcccccgttatgatagaaaggccgtgcacgtccctgttggccgccctgttggcctccaccaccaggacggcctgagccgcctcttccctcgacacagaggggactctaggagaggatccacggtcgggtccttggaaccagaaacacaaatgaaagggggcttttggaggcaggaagagtcgtatcaatagggtgcgtatatgtcccactctgctgggacagtccgtgtcttgctcccttctcactgtggagcatcccaagagggacagtaaatgacaaggtcattgtcatctaatcagtgagtccaaaactcccattctacagatggaatcactgaggctccgagaagcaaactgacatttctgaggacacacacctaagttcggtcagaccctgacttggatccagaccttcaaacctaaaggaagagaagggtctaagggttgaaagcccatcttggaacatcatgggtctagactgcctatggctatgtgcacgttaccctcacaaacactcaaaatgatacttaactgtcattcagtgagccccaaataactacagttgacaaaagtaactggggaggagcagcaagggagcggccctgtcgaggttcagggcatggctggcctggcctggctaatagttttttttgtttgtttgttttgattttgtttttgtttttgagatggagtttcactcttatcgctcaggctggagtacagtggcatgatctcggctcactgcaaccttcgcttccaggttcaagtgattctcctgcctcagcctcccaagtagccgggactacgggtgcccaccaccacacccggctaatttttgtatttttagtagagacagggtttcaccacgttggtcaggctggtctcaaactcctgacctcaagtgatccgctcgcctcggcctcccaaagtgctgcgattacaggtgtgagccactgcgcctggcctggccaatgggttttaagaatatccaggcagacaaagctatggggctcctgggggtctgtccagtgccctctcccctcaccagcaacttccatgaccccttctaacccctgccaggtggggacgacttgaccacacactcaagcaagcaaccaaatgcaggtggtcttggaacgaagacgctctgagagcagtttaaccaatttcctcctaagtcttcaggggatcctcacccacccaagcctgactccttttagtgtttcccagtttctttccatggatgagacagccacgcgatcccagcagcacctcatttatacggaggtccttatgctggtgacctcgttagtcaggaagaaagccaaaaggccgccaagtagccaacataaatatcaaagtcctttcagtacgggtgatacactctgattccaggagacttcctcagggtctcagttggagcatgtgactcttacccacacacaactctatcaggttgttatccgcctcccgagttcaagcaattctcctgcctcagcctccctagtagctgggattacaggcatgtgccaccatgcccagctaatttttgtatttttagtagagatgaggtttcgccatgttggtcaggctggtttcaacctcctgacctcaggtgatctacccgtcttggcctcccaaagtgctgtgattgcaggcgtgagccaccgtgcccaaccgaccagatattcttgaggaatgaatgaatgaatgaatgcagtaagcacaggattggaagggggtaagatgcaggacagcttcatggggaggaagatggaagcaaaaatgtaaagccagaactacactgcatgcagtgagagcctcaccatggccaccgaggccagcctgaacttccctgcagtcagtattctgggtaaggacatgggtgcacgcggctcaggccagaaccagtcatctccccaaatgcttaaacatcagctttggtacttagcagcacgggcgcccttcagtcatatggaaaatctgtggctgtaaacttccatattccctaaggatacctgccacccacagcctagggcttccgagctccactccttctgggctgtgcgcccctgggcaagtggtctgagctcctccagcctgtttctccatctttaaggtgggaacagaccccacatggctgcataaggcacgatgaagattttgaaagaggagattgtctgcatggatcttggagatgcttcttgtgaggctggctctctgacaataaatagatccagctgatgagggagttttgcgccagtcaatttaaactgttgacagtcaatccctaagacaaatgcagtagtggctgccaagaagagggatgcatttggcctccatgacgggatgaggtggggacacagcgaggcactggagttgcagagtgtcactagggacggcttttggccccagctcctccaaaggggctgtgtgacctcaggcaaattactaagcctttctgagtctctgtgtctgcacaggttatatgaggtacagttccttctaaacagagggctctgcacacagtaggtgctcagatacgttcatttctcccctttcccttttaagacttaaagggctaactcaaaacaagcagggagggccggaaacattttggcttcggtgcctcagcctctcagcagggattacctgcttaaaggtcaatcaggagcatggatgtagctctaggctgccttcttgggatcatgggctgtgccaggcagggctgtcttcctggcacccagccggagcctacacagggtgggacagaacaaccagaccggctgggtcctctggaggaaagcctgacagaatggaggagtgggctcctccagactcagggcttcagggcaggaacccggagccactgccctggtctaggggcctgaactctgcccttgaaacctccccatacagcaggtcgctggccgaggcaaaccgactcaatccaatctcaatcaacaccacgtttattgagcacttattaagtgctgagtgcttgggcttccttgagatgacacacataactaaaggtggtcagacggtggtgtctttgcaggacagggaccatctgaggcccagagaagggaggaagaagccactagtcctggggaggaaggcaacaggcaggcgtggtgtgggtgcttctgtccgcctggggtggggtggggcggggaagagtaccgtagcagaaggaacagcatgtgtgaatgcacgaagggaggaagcggggctgctcaaccaccccaatccccggacctacagtgaggaggaggccctgacagggaggcgacgaggtgacgggcagcagatctgcctagactccttcccttggggtcaaccgtctggagaatacacccctgaactgccctgcgggatccctgcacctcaagtttgtctaatccattgtttcttcctcaagaagagaggaattaggctgggcacggtggctcacgcctgtaatcccagcactttgggaggctgaggtgggtggatcacttgaggtcaggagttcgagaccagcctggccaacatggtgaaaccccatctctactaacaatacaaacaattagctgggtgtagcggtgcacgcctgaagtcccagctacttgggaggctgaggctggagaattgcttgaacccaagaggtggaggttgccgtgagccgagatcatgccattgcactccagcctggatgacagagcgagactctgtcttgtttcaaaaaaaaaaaaaaaaagaaaagaaaagaggagttaggacaagttatgattcctgacccacagatggggacactgaggctcagtgagacaaggggctgactccaccactcaaggcggaggagcaggtaagtggccgggactggaatctgggtctccttagtcccaggcctgtcccttctctcctgcttcttggctcctggcctttgcacatttgcaaagtttcagagctcctctgtctgggattcccacactgctcaggcccggaggcccattcccagtgccctgctgaacttgagtccctgtttccatagagacaacaagaagacaatcttctctctctctccaccccaagtcagccactgacatgggctatatttgtcaaagggataccagtgggatctggagattcagctcaggaagctggccacttgctctgcagaaatagacacgtacagagccctggtcattctgccagagccccgggccagctgggggtaggggagcccaggccaggaaagacattctgtggacccgctggctacgaggttcagaggaagtcgaggcaggagcagctgccacccgtgcccccgttttggtgggattgttttgcaagaaaagatggccctgtgtgtaacttcttggcccccacccggggaacagggaaggcctgtgtacagttgacatttacagcgagagccaagcaggaagctgtgaccacaggataattgcagctcccgggggggtgtggcccggcgggatttggggagtcaaatgacgcagagataaatcgtgtgtcaaggttacttacatcgtgcagtgggtatgcagccgcgtacacaccattggccagcaggctcgtgatgccttaaaaacagaggcagagagaaggttatggggcaggcgggtctcccgcttcccattgtaaagtcacagcggtcacagggccatctcagccactaagagcttctcaaaatgaaacgaacctgactacgcagagcccggccacctctggggtttcttccccaggaatgacagggtgcagctgggttattgatctatcaactaggagatgacgaaacacatgctcgattggcagaattaggaagacacagagaaaaccccaagaggcggctctgtctcagaggcaggcggtgtgagcggaccatggcttcactgtcaccccaagcctccgattcaccggctccccccacctgtccgagggcaagcctgcagatggggaaggtggattgtaagtggttagagaagctgaatcatgaggaaatatacggatggaaaaattgatggtgtcagaaaacacacatacaatttggaattagattttaggttgattgggaaagccggaggaggcccacacttaccatacttcccacatttccgccttttacttagaagggcggagtccttctttcttccctcgccttgccctgtttatacattggctattagtgaggtggaagggcctgacaggatcaaagctacatttggggcagcaagcgtcagtggccagtgattctggcggactcacagccgtccagtgctcctggaggcagtggaatgctggcagggcccctttttacgtggcccccagggcctgcactgggcacattataaaaacaccatgcctgtgtgtcctaacaggtgcgcatgcgggcgcccagccccaggagactgcgagagaggaccggaaagccagggccatgtgtggggaagggtttcctggaaatcagatcttgctccaaatacatcgtgggggcccagccaggcgggggcgtttccatggggccctttgctgctcatggaaccccctgcttggctgaagaggcttcctaggcagtaagagcgttaagtttttcacagcagcctgggcggaccaccctctgagactccacctgatagcggcgggaaaatgacctcccgaaatccccttgaaaatgggccatctctgtggtcaatgacctggaatgatcaggggactaagggatgcttagaagtcaaaaccagaggaaggggcttaagccacatgtgtgagtgaaaagtttgtctgcaatagaaagtgaacatgggggcccggcacagtggctcacgcctgtaatcccagcactttggggggttgaggcaggtggatcacgaggtcaagagatcgagactatcctggctaacacagtgaaaccccgtctctactaaaaatacaaacaattagccaggcgtggtggcgggcgcctgtagtcccagctactcgggaggctgaggcaggagaattgcttaaacccaggaggcagaggttgcagtgagttgagattgtgccattgcactatagcctgggtgacagagcaacactctgtctaaaaaaaaaaaaaaaaaaaaagaaagtgaacataggccctcagccaggctcgctggcctccttcctgttgctggaatgctgctaacctggtgctgcctgccgcagggcctttgcatgtgccactccctccatctggaaggccttctctcatcacagttcctaaatcccgcagctagccccaccctgctcatcctgcaagactatgggacacaacttggcaggtgacgggaatcctcagcacttgcggatgaatttagaggtgggtcgactctcagacaaggtgtcatggtgaagcagggctgaagaggaggacccgcatctatctgccccgtcaccaggtgcagggaaccagccccgccacaaaaccggtgggaacacagagaccctgtgtccccagggaccacccgagcagagaatcagcctgggccatgcagcctgaagacgctggacttctattgcaaccatacacgtttctactggaaggaacgctgcagggacccaggggggaaaccgaggtccaagacccggccctgggaccagaaccatgcctcctccttacctctagttacctttccaaggctgtgccctggcagcggtgacctagaggagcaatttcaaaaacccaaactcccaacgtcaccttcctttccgcctgacctcactgcagtcgtgtgtactagggcttggccattctagaggatctcagtccttttgaccctggatgggactcctccacactccccttgccttaggacatggacttagagacttcaggcctgcaagggtatccctgtgagtgaacacaggccatatggtctggggccaagcagccaccagagctgtcgagggttcgtcttctctctgtctcccgggcctgacctcaggaattccagttccgagcccttgactcccactgctcttcattttacttcccacagcattcctgccaccacgggaagccaaggcagcaagatggtccctcctgtatgcacagactccagctttcaccagacctgctgtgtcccccgggagccatggcctcatcctttcagaggcttctacagagtgatggatgctaccctatggcacggctctcagcaggtcataagacagctcaagaaggaggggaggaaaggctggaaatggcattcctttgctctgcaatgttctggctttcacaaactgcctgcagctgtgggcaagggacccactgtggggggtggttcccagctacacaatttaattgggaagattttgtatctacggcttaaggggttctggaaactggtacccagaaagcctggtcaggatggttttgtggcagcttccggaattaggctgtctgtacctggtggtgcctggtcagggggcgctgctttcagcaagcccagctgtgcttttaagggtccggaacagccacatggagatgccgccccggctggaaccccaattacttcccactggaccgtgagggtcaagagagggccaggaatcccccggtcatccctaacactggtctgtttccagcctggatttaccacccgtgcagggagagcctgtccacacgctcacaaacccctcaggccaaagtgaaggatacatttgtgtttaaaagtgctgggccataaaactgccctgcacgctcccaacccagccctcttgtctggaactgttacacaggcttaaatcaaaaccctcttaaacaccccaagccggctgcctgcctcccacagagatgactcggaggtgagattccgacttggaaaccaatgctgatctcaagccccaaaaacgtgcttacccatgctgtacttggcctttgtacacgtcgttctcttcaagatctcatagacctattgcagagacaagaaggggggtgagcagttacttaaggcaccttccacgagcagaaacagtctgctgtggctggagaggacctggtcacacgttacgcatgaagacctccttggtgctatcttccaaggaaagacaatggcatttattcagggagggttgacccagctccggattctcaacactgtcaaaggcttgagcttctcagggagaaacaggtgcacctgcagttcccatctttcacctcccaacgtgggagtcatggcagttggccccagcaaagcactgccgtgccctcctgggcctagtgctggtgtcctgtgtcacagctgtgccacgtaccctgcctggtggatttacggtcccctcgtgctgagagctgagttggaacagcaccactctgggacacagccctgaatgttctaggactctgggggatcaggggtggtggtggtggggcgggccttgggatccattccccacggtggcaggaggcggccatcatcgggctctgggttcctggtgcctgggcagagccctgctgaagggattcccccccggctgcctgccccttgactagtgacgtgttttgtttggtggcctcagcagctccggcttgggagtctgtctgcctggaacctggcgccagctctgccatttgcagctgtgtgattttggaccagcgacatcaccactcccggcctcagtttttccatctgtaaactggggtgagaagaactggtcgtgctatgcagacgtgcatttcagagcatgccaattctgcctccactctctcaggcaaggccagcgtccttccagttccccctggcccaggccatctgaccgcttccccgccccgccgcctccactggacccacctgtcccaacaaccccgccccctggctgcctctctcactttccaaactcactcctgcagccacagggcctccgccctggctgttccttttcccagaagcacttgtccccttcagattggaataggtccagggtccccttaacaaccaggccttgaggccaccaccctcccggtggctctgtcttctagctcagcttgcctctccccacctgccggattataaatgtcctcagtgcctcttttctcccacccagcaggtgcccaatacatccctgctgaatgaaggaaggaatcgcccactaggctgttctcaatggctccctccccatcatccctcagatctaatcggttctgaccttgctgattctcctgtaaccacctcctcccttccacatgcagttatggcccatgtttatgaccactgccaccagccctcatccaccagtcatttaccctcccacagctggccactggcagtgatccttctggaacggatctcaccacatcctcaacctagctccacaaccttctatggctccccagcgcccacaggccaaaggtctaaaatccaagaccagcacagtgggcctctccctatcgagtactgctgttctctgactcctatccacttgcacactggaccaccccaatgccaggacagattgaatggtgtggaggagaggagtggggaagggctgtcagttctccacggctttgcctagaacctcagccaaccctgcaggctgttggattttgatgactattaggcctgactaaccaaggccaaagctatgaattatcagtttctttggagcatgttggccatttagaaactggcctccagggtctctgggagagagatgccctcctccctgccccagatctgtctgtcccagcagtggctcagaaccccccgtgctggtacgacctgcaccgacctcctgctggctgcctgccagtctcaggtggtggtcatgaggagtagttgtctggacaaggtcaccctgactgtctcctcccagccctctgtctctgcccggccaggctgggctttctgggcagggaatagagaataacagcgaaagtttggctgccaggttaatttcttgtttagatagaagttgggtcctgagccatgcacagccccagcttggctggtggacaggttggataaacatgaagccagtgccttgaatagggcagggtggcctggtcagatttcaaacctcagttggctcctctggcaaaggcctggaaagagatctcaacccacgcgcctttgcctccaccaaccctccctcctgcccacacctgcctgccctgaaagccccgaatcgtggcctgatggtcaggcacgcacaatcccaccacgaggcggctctgagacatgtgctgggagctgcacagatccagaaacaccgacctttgaaatcactccaggggtctggcttccctcctgctttcccaagctctgtgctgattcccttcctctcagctgcccctgcctggggcacgaccatcccctgggcccctcgttgccctctccctttcattattctaattatttctgtcacagacaattagagccggcttccaccgggaggagtttcaccaaaatgaaattatcatctggatccccagggccatcttgccagtgagccgtttccaggcgcgtgcgatacttacaatcgtgctccgggttttgctgtcgaaaaaggaatccttatcagacaagtcaaatctgtggaaatatcgggaaggaaacaagacacagttcaccagagctggcagttctctgggtttcaaggccctgggaaaccacactgtccccattagccgtgaccgtgaaatggacagaactctgtccgcacgccaggtatgacccgtccgcccctgggcatttggaacagactgtttcactgcccccgcacctgggcgaggcctgagacccacataggtgggaagtgacctaggaggcgagtacggtcagaccaccctccagccccccaccccccacagccccccagaagatccctgcttccttttgatgacatcctcagtgggcagttttgaaagtctctgtttcaacaaggcgggggacaggggcagtatcaccgccaccatcagacagctccaaccttgaaaacaatctccctgtatttccaatggtttgggtcctgatgggctgcatagggatggcccgaggcttcctgagggtggaggggcatcttgggaacacactccctgctctccctgctctccaaggcacttcggggagagctggggagggcggctgggccagtttccacctccacggagcctggaggtgagcttagccctgtccaggcagcagggctgacagagtcgacccagggcagagacgagggaggtcggcgggggtcctggaaggagggcggtttcctctaatgccccaagcccctgttctggatctggaggagagggctgggcttgggggttgcttccttctctctggtggcatgtcctgtccgctctaggaatcaggacctggtaaatgcatccagtgatgctcatggctccacccctactacatttataagcaagggcccctgtgagctgaggcacctgttcgtcctccctgtctgcttttccatgcccccgaccctgtgaggccagcactgtccaggagccctcctgcccgccagagcttccatccaaagtccctctgggttcccatgactcaagctttctattcccacctctgctcacactccagctccgcccagtgaggccagcagaggccttgcagtcactgctgacccaggtggctacgccccactgcccctcgggaggagggaagtttccagaatagacgtggccctgccaggcaagccagctggcggtgagtccctggggcctcaggcctcctgcctggggatgcttttcaatttctgccacaaggagtgagacttactggggctcaaggctgcctgggctgcaggaggcctggttggccagacactggagggggatggggtggcggggcaggggtgcggagcgggtgggaaggcatgtctagaccactgctttggggtcctcactcaggccaaagaagtttttcctgcgtcaccaagcagaacaagatgctgtgtccccctaactcatcagttaacggtgatcttagaaatcatttccacagcctcttctgggctcagcaaccacaaagctcttacaagaacacgctcttctttgggggacagataatcaatctgcatttctcatgctagaaggttaaatccccacacacaggaccctttggggagcaggctgggggtccccacttacagatgctgcttctcccgggagaagggataggagagtctcttcatggtctggggcctgtgctcagccactttgggctggatgggatctgtgattttctggagcacagagttgatttttttcaggaggccacgggtctcattaatgtggtacatctgcagataagacaagggaccggggagctgcgtcaccctgctggaccatgatccgtggaatctgttctcggatggtcagagaaccatcccaccccatgcaacggggcgtcctgagagcagagcacctgggtgggccagaatgcaccgccccaccccgcccacgccatgaaagcccagagtttcaggagcgcccagccaaaagcacaattacaatgcattccagagaacttccccgctaaactttacttttgcttcaaaagaggtaatccaagtggtctctgaggacgcgagaagcaggaggctgatttactacctagcccggcttcacccgtccgcctgccagagtaaataccgactccaagctaagcttctgggaacacactgtcaaactgctttttagatacaaagttttcacagattaaaaagaaaaatccccgtaagccagaaaatgtaattaaaatgaatctgataaattagctgagatgccacaaacacgaaagcaccacggcccgaactgtaactgtgtctgcaagtacagtaaattccccgggggccgagaggtgggcttttctgcctgcaccatctcttggtggggtttggtctggggtctctaaagatcacccagggttgggtcatattcaccacggtcaggaccccagagcctgggggccttgtcacatcgagccacatggtctttgcaggggtagccgtgaagcccactgggttttttttttataaaactcagggcctcgaggtcggcatgtttcactgccaggcgtccaagtgacctctagacttggcgattcatttcggagcaggaccatcaacaccaaccttcttcgtcggcatcttcagtttcagaaactcggcctctctgcacagcacgttccagggggcatggattttcacaaacccgactccgtggattttagtctggagagagaaggaaagttctgggttgagggggggcggtgcatctctgtggaaaaccaccttgatcttcagaggccaccacaatttatcgagcagctactgtgcatggctgcttttaccgcggcctcattccacgttgacaacactttgaggcaaagctagaattccctttagcagaaggtgggaggaagtgcagggggctgtgggagctcccccaggtcatacgggaaactttaagagccaggagggtctagaggaggatccccggtgggtatagactccaaaacaccagggaagttttcaggagggtttagccaagggcccccaaagcaggctaggccacaaaagaggacctttcaggatgcagagcccaggcccctcggcctccacctggaatcactcagggacctgtgggtccctgagcagtgccgaggaggggacgactgaagatggtcccccctctgggcatcttcccctgtgggtcagggccacacctctgcctgctccaggtccactgcccgggttcccttgtatctgcactgacttcatcctaaagagaatggcagcctggtgcatgggcttgaaggcaggcccgagttcaagtccagtgccctccctaaacagctgccagcttggccaagtcacctctctctggtcctcaatggcaacagtgaacagcagagagtcaccgagcgctggctggcgaggatgcggcaccagctaggggcttcatgagaaccgactccatcaaccttcatggccagcttgatgagaaaggccccctttacagatgggaacactgaggctgggggagatgaagtcaccacagcctacagtcttgctgctagcagggtggagctgtgctcaaacacaggcagcactgccctgactccccactcttaatcggggatcagatgcaaagatggccccagcgtctctagctttccctctcccctctggatttcgcgtttaatagagtccctttagcaaatgagcagcatctttgcagccacaacgtatttccccatcaaagacacatgtcacatcagtcggccttcctgtcaccctgagaccacccagctgcccagggtgctgacgcaacgagaagggaaacagtgccgagtctccctgagccagagctgcctaaaggcagtgggggccttggtcctccggggcttgggggtcagacagaggcttccagactgaggtcccatccacgtctcctttccacaattctgagccttaaaggaagggatgggaagtcttggcaaaaaggcagacgggaggaagagcgagtgccggccgggacctcatccatcccctccgggtgcagagcgaccaggtgcaggctcagggcctgacctgggttctggaccccttgagtgtctgacacaagtacataggttcattgtagcttgttgacaaaaagcaatgaagccaaagtcacttggggatgagttttttttttttttttttttttggtttttaatcatttttttgttcttttttgagatggagtctcactcttgtttcccaggctggaatgcagtggcgtgttctcagctcactgcaacctccacctcctgagttcaagcgattctcctacctcagcctcctgagtagctgggattacaggcatgcaccaccacgcctagctaatttctgtatttttagtagagacggggtttcaccatgttggccaggctggtctggaactcctgacctcaggcgatctgcctgcctcggcctcccaaagtgtacttggggatgagttttaagaaaacaaaatctgaagtgggtcaagtcaatgtacccagcgagagcctcggtggaagcctgtgaacgcgacggtcccagggacctgggcaaagcttccaggtccagcagagagagttaaaggtggggccccagcacctcaggtgaccaccgaggaagggagaccctccttgacaccccagcttcatcccatgcttcttcctgatccgatagaaaagcaaatggcaatggggtgaatcctgtctcatcgctccttctgaagcccaccgtggtcgcttatgctgatggtgaggcccccggctgcgtccacgaggcctgccctacgccatcctctccccagcaccaccgctcaggcctcctctgtgctgccctgctgcccacggaaggctcagagcagccgctttgcacatatttatggaatgaacgaacgaagggcaataatacagtaatagtaatagtaatgttgacagaggctgacatccactcaatgtcagttccgtgccggtccctgctgcgtgcattccatgcatatcaactcattttatcctcactgcaagcctgtgaggcaggtcctgtcatcatcctcatttcacagctggggaaactgaggccctgaggcgtgtgccatgctggccattgcgggatcctcctgcagcttctgtaacacgtgaccccaaagtgggtgttcattctccttcagctctggaggcctgaagtccacagtcaaagtgtctccagggccatgctccctccgaaggccctaggagaggatccttcctgcctctcccagcttccgggggctccaggcgtcccctggctgtggccacatcgctccagctgctggctccttgatggcatggcctcctctcctcgctgggtctcaaatttccctctgccattctctgctattggatttatggcccaccttaaatccaggatgatctcatccagagatgtttaacttcattccctctgcgaagacccttcttccaaacaaggccacgttcgcaggctccaggagcatgtggatcgggggccaccgctcagcctctgctcccaccctgaagctgcaggttgcggtcctgcagggctttgtgcaggggcctgtcccagtggttaggggagctttgcaggagcacggacccaggagcgggggcctgaagctgcttcagggagacagcaggactaggctgccccaggcacggtgactggagaatgtgcggcgtggggacccttgtaggggagcccagggctgaaggacataaggtgtgggtttgggctccctctgagaactgatgatctcagcgtgaactggaggaggcagtgccaggggctccggcaagatgagcccagatccttctgtggccctcgaggggcagattgagtgggcactgtgcttagaggcctgggacggcgtggcctgggctggaatcctgccctgcccctgtgtggtttccacagagtgacttaatctctctgagcctacatttcctcatcgcaaactgggtatcacaaggcctgtttcccagcaggggagcctctggtgctcttggcagccctggtccagctgagcccctgcctgtgcaagcacagactccttcggccaagaagcttgaagccacctcctcagtgctggggagccacggagggcactgaggctggagaggtggaggtcttccatcctggtgacccacaggaacagcactgacttcatggggcacctctgagtcaggagaaaagacagcccacgtgtgggagagcctgtcttttcttgttgcagacacagatttatttctgggctctgctcactcacatgcaaagacccaaaatatattcctctgagtccatgaggatttctgcacggtggtcaaggagccggtggctgctgctggcctccctgggaaaacatgcacccccgtttacatgagcaacagggtctctcccagggaaacatctggtgagattcgggaaaggggtcatgagaccagttcggcaaaaacacatgtgggatgttttaaagcatggtgcccgggctgaccacagcctgtccccagcaggaagacactgggagtgacagccgtgtccccttcgcccccagccagcgccctgaggagtgcattctgccccgactcttggccctcaagctggggtctttgaggttcatgaacctactttgtcgagagccacggccgtgggggtggtgaggccccatctggccagaccatggggctctgcaaggggacagagtcagccccccagacagcccccaaccagagggggcagaagatgctgaccttagtgcagtgactaactatgccggcggaaacctccctctgaacccagcccagaagaactctgaccttcctggaattgcttctgacattttcgtttcagaagaaagaagaaaatcacaaacagaaaggagaagtgagtccccatggtggatacacagtgggcagggatgctgagggtccccgctacagcccccgtggcccgagggcctagaccctcagtccacgcggtggccctgtgtgcttctatcatccagtcttggccacggatgggactccctgcagctggagcgtgggctcgaaattgctagaagatttgaaggtttgcacccctaaagatcagacctgggtggttttcgggttgcccttggcttcctagggggtgagcttctttcctcacctaccctggtcctcacaggccgcttcataccctggagggcattgttcactatggatgtctggccctcaatcatggcgtcggggtgctggagggctgaagcctgaaggtcagagtgctactgagaggggcctccccagacagcacctcccgtgtcaggcaggaaccatggggtgtgtgtgccgtgcacagcaggccaggcacctcccatatcgggcaggaaccatgggtgtgtgctgtgcacagcagtccaggccactgggtgcaggggaaagcccaggagcctcatcgttggtggggtttgggcccgaaggccctcgagcacccacagaacacctggacaaatccccgtttccctgtttgcagcttcctcagctcccaaggaggagaacacccagccctgcggggagccgtgtggccccattaggaaggcacaggactcttctgaccctgtctgtccacgaggacgcggggctgctgtggtctaatcctcctgccgtcggactcgggggcagacaccaggagccttggcgggtgccccaaggggttcacattctctgccataaataggcttttggggcatgtgacgcccagtgccacatccctggtcagcccttcatgaccaggcgagttttcagcagccctggcatctgcctgtctctccccgttggcaccagcttccagcacggataggagctggcacactgggtctgaagccaggcttatctgtttagctgactgatgtatccctaggacggggaacagcagtggccacagagcagaggctcagtgatgtccactgagtgagggagaaggcagagggaaggcacccgactttataaagcgcctactctgtgccagcctaggacagccccggctttcagactaccatccgccttctctccaaccttttggtagctatggatgtgtccacttcagtaaatatggacgagggggcagggaaggcccagagccccttgtcccaggcccatgaacagtagatgtggaggaatctcagcctgaccttgaccctgcaatgctcactcctaccctccacccgcacggctccagagggcacgcgggcaagatgggagatgctctcagtccctgggcaggggtctgcctggagaggtcattgccggtgcctggtatttcccacgccacagttactgctgatcacgtccacactgcataggaagacctggctccccatagcagggacactgctatgaagcacagttgagggattgcttctggagcaagcatacatcccccattatcctgacgcagtctccagactcgagtctcaggcgagctgaggacccaaggaatgcagccgtgggtggatcaggcgccactgctcttccccaagcatggggcagggactgggctgtggacatctttaatcccagcccttgccatggggtctggtcctaggcctgctcagtgatgtcttgttaaagaaataaatgataggtaagtcagcagaaatatcatttcacattcctgcttctgttgaaggtggtagattactcagatcaaccctcccaggatacatagtaaagaatgcaccacaggaaaagaaacaagaaattcaatgacctgaaacagcggtccccaacctttttagcaccagggaggactggtattgtggaagtcaatttttccacaggacaatgctggggtttcaggatgaaactgttacaccccttgattattattattattattattattttttgagacagagtcccactctgtcacccaggctggagtgcggtggcgtaatcttggctgactgcaatctccgcctcccaggttccagcaattctcccgcctcagcctcccaagtagctgggactacaggcatgtgccaccatgcccaactaatttttgtatttttagtagagacggggtttcactatgttggccaggctggtctggaagtcctgacctcaggtgatcctcccacctcagcctcccaaagtggtgggattacaggcatgagccaccgctcccggctgaaactgttccacctctgatcatcaggcattagattctcacaaggagcacacaatctagatccctcgcatgcactgttcataacagggtttgggctcccagtgagaatgtcatgtcactgctgatctgacaggaggcagagctcaggtaggaatgctcgctggcccaccactcacctcctgctggggggcctggttcctaaaaggccacggaccgatacgggtgcccagcagaggaggaggagagaaagagaaggaaaaggaggactggaacccaccctgagaagctctggcccctacagccatggcgcctgtgaagacctgggcacctcagactgtggctttggttcaaggtggctctcatctataacgctgcaaacctttctggacaaggtcacctttatcagaggctttgggaaaccccacagattataaaaggtcaatgactagcagacaagcgaagcagacccgcccccaccagggcaagagacagccccgggaggagaaccagctgaagtgaccgagatagaaatcggcccactcagcttgggattagcaaaggatgagctgggtaataaatcagctatgcttaactcgtttaaagacataaacctcaagatagaaaagaactgcaaaggacaggaaactattaaaacatgacatagctgacttggaaaagaaccaaatagaactcctagaaataaaaaagatcataaaaagagttaaaaactcaacagatatgttgggaaatgctcaacccctccaaagacaagaaggcacatggggctggtgcaagaagatgctggtgaggggctccggcgggggtgaggggctcctgcgggggcgagggaagccctgatttgcagcatctgccaattcccatggtgtaaataccccaccgtggcctatttcaagccagcaacgggtaacaaccagcttgcagaattccagaaggacatgactccagcacaccatgggcctggacacagatgaggacctcagaactatagccagaatggcaaagatttcaccccagcagcctgggatgccctgtggcagagctgtgcaatgatggtcttggggtcactttaaaaacatgaatttttaaaaaggtccagaatgaattttctttccctctttctttcttttcttttctttctttctttctttctttctttctttctttctttctttctttctttctttctttctttctttctttctttctttctttttctttctctttcctttctttctttcctttctttctttctttctttccttccttccttccttccttccttccttccttccttccttccttccttcctttctttttctttctttcctctctctctctctctctctttcttttttgagacagtctcattttgtcaaccaggctgaagtgtggtggcgcgatcttggctcaatgcaacctccgcctcctgggttcaagcaattctcttgcctcagcctcctgagtagctcggactacaggcgccagccaccacgcccggctaatttttgtatttttagtacagatggggtttcgctatgtggccaagctggacttgatctcctgacctcaggtgatcctcctgcctcagcctcccaaagtgctgggattataggcatgagccatggcacccagcccagaattcactttaaaagaaatatgtttccatgaaaccaagacaagccaaaagaaaatcaggccatgataaaagtcatccaatctgtttcgcgcctcagctgaagactggggaggcataaaatctttagggaccaaagaagtctgtaacagtggaatgaagagcagagaaatagcttcatgaatagactagaggttcctaacatcccatcgtgcaagaggcccattcttcctcccctgggggagaacggggactgcaagttttagtgcagagtctctgggtgaggttaggggccaggttcaaaggccagacgtgccactctcagctcaggatcgaaattctgccctacctactcatggttctggtaggaagcccacacggagtggggaactgacaagtctcatgagcatgtttattgcttttatttgtgctgatgagctgggattaggcccgagactcctcaaattccaggcccccacccccgattctcaaatctgtgagggcctctccccagcccctgccagtgcccagggccctgtggacaatgaatgcagccccaggactgcctcccacacctgcccacatccacaaggcctccatgggaaatggcaagaaatggctgcccttccctgtcctgaggccatggcaaccctgccaccaccctccctggtcacctggcggcgggcaggggcggggtctccacatgcagggagacccttctcttccaagggggacttgcggttcccctctggcaggagcagggtcaggccctgggagtggtgaggagtgggctctgccccaggcctgtgggtaaggggcgtttacagccaacgctggccagctctgtccctctgtgggctcgaggattaactctcttgaccctcacccaccactccacaaggaaggtcacactatcaactccattttacagatggggacgttgagacccagagaggtgaagccacttgcccagggttgctcagccaggaagtttgagctgggtccacatccgcataccgggctctcagaggggctgggcggggtctgaacccgcactcggagccccgaggttgcgtctccaccacctatgcatccagccgtgggctttgtctgaaagcagcccttctcccatggagtccgccctcacttgcttttcaaaagcagcatccatgaagatggcgaacagatgctgctgcggggacagccccacccactacggggatgcatgtggagaaccagcggcgagccagtggggtacagacttgagccctgggcagcgacatgaaagcaaacagacttttatagggttccaatgtccacggccttctcaggatctaccaaagcctgggtcaggttcaacatcagggcagtgtgggcctcagccgccccccagcacacacagccaagagtttagtgtgtggcgttctccgcaatgaccccatggacataaataatgtccagcaggctttgaggctggacttcaaaaaggctaatgggtcttagttgcaagaaaacatgttggccatatcttctttagtccctttaatgggaaccctgaaagctgaccccatggctgtcaaagggagggagagagaaggggagggagagggaaagagatggagacagagagggagggagaaggagagagagagggggagagagagaaagtgagagggggtagagtgaaaaagagggaggtgggaagagagagagagggggaagaaaggagagagagaagagagaaagggaatgatagagagggagaggagacagaagggagagagagacagagagaggaaaagagaaaggacagagagacagagggagagagacagagagaagtgagagagagagatagagaggtagaggtgaataagaggtgaggaggaggacagagagaaagggagatcaagagggagagagagaaggagggagagagagaaggaaggccctgcctcagggcccttctcttttcctgccctttcctgccctgcagtgctgtcctgaggtctctgggcccctcctgtaaacccactttgaaggccgccctgtggatctgagtgcccatgccttcttgacccacccctgggtctctctttgggacatggctccgacctcaacaggctcttggctctctggagccggccctggggtcttggtctggggtcacccttggggtaccacacagtgctccaggggctcatgtggatactgggggtcttgctctggggaagcctctcctggcttgtgcaaaaggcccttcccacactcctcacatctcaaagcatggtctgggaaggaccagagcctcagccaccccaggtgctgggtcccccagaccagctgagccagagcctgcattttgacaagacccccaggagttcctgtgtgcatcctgggtcctgcagcaaggcagaccaggccaaagctggaagctgtcactcccccagaccttccctggccctcagccatgaccctgccccatgctgctacccgcgtgctccagcctgccccatccaaggcagccaactccaggattacctgcccagtgcagcatctcagctactggagtgggctgagtggtgtcccctacaaagatatgttcaagtcctaactcctggcacttatcaatgtgatctcacttggaaacagggtctttgcagatgtaaccgagttaagataaagtcgtaggggtgggccccaaatagaatgactggtgtccttacaagaagaagacacacaacagagacacacaacagagagggccgagtgaccacagaggctgagattagagtgatgcggccactagccaaggaacacttggagacccaggagctggtaaaggcaggaaggatcctcccctggagtcttagagggagcgcggccctgctggcaccttgattgtgcacttctcacctccaaagctatgacagcatccatctgtgttgttttaagcccccagcctgtgcaggtgcagggcatgacatagctgttatccgatctccaagaactggccccgttgtgcactcagccaagcccatctgccaggttgtcacaagatgtctcaacacaatgaacctcccgactcagtgaggaggcacgcacggggcataggggttgctcactcctgtgtggggctcgcagcacactttgcccaggagtgacacagtgtgtcccacccaccggcgccccaggaacaaaggccaggtcacacctgcacagccagtggcctccatgactgctgcacagtcctggccacagcagatggtcccagaggtggctggcacccctcaggggaccgtcttgctcatctgtccccctttctctccctccatgtcctcttctccctctgcctcctcatccagccttcagtgcagggattctcaactgggggtggttttgccccccacgtacactggcaatgtctggggacatttctggtttgctttcacaacttggggagggaggtgctactggccaggtagaggccggggatgctgttaaatatcacctgcttcaaagcaaccagtcataattttgggggtgggtgtcatagacagtgtgagaatctgatagactctgtggatttttctccccaggaaagctcacataagccctgaattttgcttccagttgggtaagattgtgcaactggactctcttggaggtgatcttattttcaaaatcgcaaaccctttgctcgttgtaatctgagcacccctccgggaaaggttcattcccaagagtgcttcttccccctgaaatgaacacggcagcagctctgtctgctaaccacgctggcaggggcccacacacacttcagacgctgcgtgtgcccaagcagccttttaatagattctggctctgcccctctccaggagaacaggccgcccaaaccatcgctccttccaacagccctaggggctggtgcagctcagatgagagctctggggtttccaggaagccttcataaaacagcttatgatttgagaggctccagcagggatgtgggaacatctcaacttcagccctttgaaaacttgaatggacgtttctaccccacaatcacggtttcatcttaaacatggccagatcaactgctgaaaagcctcttttagcccttgagccaagttaccagtgaaaagttggggtcatttcactggttaaaaactagatcattttggtgacagtaaccaatgtccttatgttttgctttttagctcaaagtcatgatagagaatataaaatatttaaaaagatatttatgagatagtatttaatgagacttggaaagggtcttttctcgtccttcttgccgcttcagtatgaacaataatatatgacacaatatcagccaagcatctgccacaggccagactctgaattaagcactttgcaaaggttacttatgataactcagtgatgcaaatactcttgctatctccattttacaaatggggaaactgaggcctagcttttccatcaggataagtggagggtctgggatctggcagaagtcagtcagaattactagaccccagaagttcctgttgagcgttaagatctcaaagttgtagtcaggaaagaatgaggatggagtgtaaaatcccctggggaggggccaggcgcggtggctcacgcctgtaatcccagcactttgggaggccaaggcgggcggaccacgagatcaggagatcgagaccatcctggctaacacagtgaaaccctgtctctactaaaaatacaaaaaattagctgggcgtgacggcgggcgcctgtagtcccgctgaggcaggagaaggcgtgaactcgggaggcggagcttgcagtgagccgagattgtgccactgcactccagcctgggcaacagagtgagattccgcctcaaaacaaacaaacaaacaaacaaacaaacaaacaaacaaacaaacaaaccctggggaacagatgagacacaaggaccatgaagctcaaaatccagctctctcggcctcagctcccagagagtggcctcggccgccaagcttccctgatggagccgattccttcctccagttctaagttgacatgctgaaacaaaccctgtatagtagccgcattgttctgaaagccacagggctggagggcaggaccgtgcgaaaacccatcaggaatccactgctcgcctgttccaagtgtctaagacaaagtcgggcaggacactgttccctggcagctgcccccaaaggcagggagaaagtctctgaatccttgtcaggatcaaactttgcttcctgatcatcaaaacttgtaaggctcctcacctgccctcaaaactccagagggacccatctgggtggccgaactcacaatctcctgccgggtggccagacctcaggaaggtgaaaggagacccagacagatgccccaggttcaacaagaccctttgactcactaggccaaggtccagggaggccccatggagcacgttccattgatttcaaggaaagtcatatctacttgtcacaaaacagaggcgtttccactccaggttccctaattaacctgctttttggtctaaatactccgaggacattcttatcactggaccaaaagcatttaaggacatggtggtgcctgtggatgaaatttcaaaccaaagccaacgttcattttcaacatccactggggactccatggtttctaagttaacctgccgacaactttttctgttttcgatgtgttttagagactttgtcgattcttgggtaatccgcacagtgatggctctgtaggctggggcccttcacccaatattcatggaaggaagggttcccgtgcacagagaggttaagatgacagccagagagcacacagcagccagcagagccgctgaaggaagcaccgctgtgctagggctgctaaagtcattctctctgcacacagctgcaccctcggccccgcagcagccaggcactcgaggggggtcgaccttttgttctcttttgaaatctttcttctaggaagattcgtaggctttgctagggagcagggcttcagagcacagtgttacagagccacggacttcagagcaccaacgactcccagggctcagctggacccacatctcactctacagacgagaaactgaggcccagagaagggccgaccccatccaggaagactcccaggagagctttgtcctccctcccccgattggcaaatcttcccaggaaaggagctgaccagaagcaggcgatgctctgactctgaaggtcatggctgtgaaggccagaccctctcccagagcagacatggccagaggagcaggtcagggctccctaactctgttcaaaagcaatttctaccccaccttaacaagaacagtgtttttgtctgctgccctgtcttcttcttctttttttttttttttttttttgaggcagagtctcactctgtcgccaggctggcgtgcagtggcgtgatgtccgctcactgcaacctctgcctcctgggttcaagtgattttcctgcctcagcctcccgagtaggggggccacagacacatgccaccatgcccagctaatttttgtatttttagtacagatggggtttcaccgtgttggccaggatggcctcgatctcttgacctcgtgaaccacccccctcagcctcccgaagtgctgggattacaggtgtgagccactgcgtctggcccgtctgccccttctttaagaacagcttaaagctaaaacaagataccagcctcgcaccctctgactatggaagcagctgcccccctactgccccccacgcagcccaccccccaccccccacaaacagcgcgcagtgagatagttacgtcctcgtcccgctccagctccaggcccgcctccaggaggttgccctcgtactcctccctgcggaagcgcttgtcatcctcgtggtagtccatcgggggctcccccgagcctgcatccagcgacgcccccttgcccggcagggggtggtcctgcttgacgctgcgagccccagagggggtgtcgctgtgctgcaccctcctgaccagggtccggttgcccgagggcctcttgtgatggtacaccaggatgtagtccaccttgcgccggccgtccctgaagtacaggccatacttgcactcggcatcagggtccacagataaggagttcagcagctaagggtggaagaaaagacacccattcaccatcgagctgctcgtgatgggcctttggagggtgcgctgctcccttcatccactcactcctcactcactcgttcaacaaacactccctgagcgccctccacgggccaggcactgtcctagggcctgagatacacctgggaacacagcagaagaccctgccttcagggagctgaacttcgagaaggaggtattcactgctaatcattcatgaaggtgccaagccacatatggtcccccagaagccctcctggtctatggaactagagcaggctggatgtcaggaacctccctggctgcttgcaaaaagctatggtaggggatggttaatgggtacaaaaaataatgagaaagaataagacctagtatttgacagtacaacaggggactatcatcaataataatttaattgtacatggacaaataactaaaggagcataactgggttgtttgtaacacacaggataaatgcttgaggggaaaatacccagttttccatgaggtgattattacgtattgcattacctgtaccaaaatatctcatgtaccccataaatatatacacccactatgtacccacccaaattaaaaattaaatgaacaaacaaaatatcccccagcaacaaaagctatggcaaaagctaccaagtgaatgagggctccccatgcacatggataggggctgaggcagagctgagctcaggttctgtgcgtgcaaatctcaatctctgatggccagtgtcagaggcagtgccatgtcaaggtggccacagggccactaactagctgtgtgtccagaggtgaggctttcactgtcttagtcagggctctcccccaaacagagcctgagcagaggccaggggtgcaagcgttttacttgggaggtgatctcaggtgccagagtagggtgaaggggagggaggctgacaggggtgggttaaggagcggccaccgctatgtgcagctggggtccgtcctgctggggaccctcggagtgaccttgaagggcacatcccactgccagtacccagagggtgaggaagttgggtgatcatgcacccgctctggccctttcttggctgggggtcactcctggggtgttaatgaccctgcgcttgcaccttccccacacgtggcctgcggcagcacctgcacggtcagtcacctttgggtgcagaggacagtgagccactggtatggatgggcaccgctggtgggtgccctggggtgaccaagggggcggggttagggctccaacagggcctgccctgcctcagtttccttatttgtttgaaggactctagggggccacgggagatagcagtatggagcagtttgtttaaaaaccagatattcccacagtggcagtgtgatgggaccattgctaaagccaagcctgcattgctggaattcccgaggggtttggccggttatcaagacagacaggtcgatcagcaatctgggtttccgaaataagaaaaaataaaaaaagccatgctgggtagaacctaacaggcaactccaagctgctaatggtccacagagctgtgcctcatccctcgagctggccgcctggtttccacctcagtttcctgtggctacgtgaggacgctccctagggcactatcagttcccgaggggcatcatccgagaagagggcctccctgatggagtgcagggacggcatgctgcgccaggcagggcccgagcacctgtggcctttggacagagctgtgcttgggcctcgctggcctggagggtccccccacgtggtcgcctggagcccctgggcagcttccggctgcaccatggctctaaatggctgtgcactggtcgggaaaaggggcaggcagaatccctcattcgaggcaggtgggctgtatacaacccaaagtgtatcagggaagccggagggtggagcccctccccaaacagtcagcactgcagtgggggagagggggagggaaggcctcgagtggaggctgtcctttttagttgtaggggaaggagagaggaggctctgggccagggctgctggttgggggctgccccacctttcataggtgttgatgtcaagggtctagactcctctacccctggttaggggacagttggggccatgtccctggcaccttggcctctctggccctaggatgcctctcctggaaacagcattgctcaccacctgggagggcctggtcagcatctggtgccggcaggaggctgaaactaagcaactgacttctctctacagtaacacagggccccgctgtgctggtgaccttcaggaggacctggactcagtgtgcgtgccccgcccaccttgccctctgtgacaaagtctgagggtgcttaggggccacgaccacgcccatgtgggtgggtggcttgggagggctcagggggaagggtgggggagggctggcttttgagggcagtgggttcccatgcccagccccatgaaggacggggttcacggaagaccccagtatcgcaagtctgtagccagcacggggggcctgcattccttctgcaggagaagcacgaaagagctattcttctcaattcgccaaggaggaaactgaggcccagcagggcaggagagcccgggttacagcgcaggcgggaggctgagctcagcctcaagtcccatctgcacgcccaaggtgcggccccccttagtaggagccgcgactaagggtgacgctgtttctcggcccaggtatgtcatctcgctgagtccccacaagctgaccctatgagggggttactatagttaggtccatttgacctggaggaaactgaggctcccacgggtgagctgcccagctcagtggccctgagtaccagactcctgctggctgaccccagtgcagggctctgtctctggtgctgaggggcatggggagagtgcagcaatttagcaggcctcagttctgtcccagcctggggcagtggttaagcagggccagtagagacagcagataagcacaggctagtcgggaggtttgggcaacaccaggccacaggtatgtctggacagtgtggggcagcaggtgaggccagcccaggacagggcactggcttcatggcaggccgtgtagtcagccagacctgggtctacatctaggcttggcccctctccagctgcaaggcctgggggaggctctggacactctgagccccagggttggtttctgctaaatgcggagcagcgggaggcttcactgaggggatgatggtctctgctaagctcagcacacactgaccagaacgtgccaggatggacgctccatctaattctggggccaggcacctgggagccatccccgtcaccctgatggccacccaatggcagatacgctttcccctcaacatctcagggaggtcaaacaagggcagggttacagggagctggtgactaaaggtgcttttctctccccatggctgagggggcaaaagagcccgaccggaagctgctcttggaagacagaagcccatgtgcagggaatgtgccagtgcccagcaggtgaatgcagggtctcgaggggtcggagggcacacctgcctgagtcccaggtgcgcctgagggcttcggctattcctcctcatctcctccccatactgccttccccagtctcctctccccctcccccaggccttccccagtccctcctccttgcctttgcagacactgtgtccctccctgtacgccctttctgtccttctcagccctttgtaattcaacctggttttcagggcacagggcaaatccagcatcctctgggatctgaaggtggccagcccctctggcctctgcaggtctctctgtgctgggactgcctctgagccatctacccacaagttcttaacttgcaaattagccccaaagctggatggcaggaccccggaggcctggccagggactgtctagagatgtgttaggacagagctccaacctgacctcagtacacagggactgagaacctggttggggctccataaacactcctggttggcagggataatgataatagcaaacaaatccttagagacagggaggaaattccacagggatccctccaagccagaaagcagggaaattacactaaggagtggccaaaaatcctctatcaagttgaaacagggaaggctaccaggttcaatacgaacccccatcatctgtccactgggggcctatcaagggacacacctaccctcaggggcctacagtctttgggagagcagaaacatcatctaacttcccatgcatggtggagggagagacagcactggggcctgatcaagagtgggcatcctcctacctgtgttcaaacaccagctctgccactcaccagctgtgtgaccccaggcacacagcttcgtgtttttgtctctccatatccctaagacctacctcatgttatatgacctccctcatggggttgctggaaggatgaaacctgttaatatatcttgtaaagagtttccaacagggcctagcatagagtgaaccttcaacagaagtttgctctaattgggaactgagacacacgcacataaagaactaggggaggacaggggaaaaaaaatcttgtggccagagtggaccacaagtgaaagatggtagcagtgccaaatccagactttaaaaagttacaaaaggagctggatgtgatgctgggaccagcaggaggcagcaccaagcacaggtgtgggagtcccagcgcctgactctgtcactgatttgctgtgtgaccctggataagctgctttgtctgtttaggtattagtttttaaggtgtgggctctctcccgtctacactctaaaaggctgggaggctcctagggtctggagagcaatcctgagctgggcttggagagagtcgggaggtgaatgcatagcaaggaccagtgcgtgtgactttatggtgcccttccacggagcagtggagtgggtgcctttcttgtgtagaacgggacaaaaaggcaaagatgtaattgcagtgggagggatgtgggtgagactttgtgcataacttccaaattcgaaggcctgggaaagcttcagaacatttctgtttctgtattcttaagaaaggggcaagcaacccctcggtgcacctttgctgagggtaaggagtttcttattcatcttttcttttgagacgaattcttgctctgtcgcctaggctggagcgcagtggtgcgatcttggctcactgcaacctccaccttttgggttcaagcaattcttgtgcctctgcctcccaagtagctgggattacaggtgcataccaccatgcctggttaatgttcataattttagtagagacttgggtttcactatgttggccaggctggtcttgaactcttgaccttaggtgatccaccagcctcggcctcccaaggtgctggatttagaggtgtgagccatggcacccagccctcttattcatctttttgatggttagcactgaatatgtggttgctgaatgaatgaatgaatgcaggcatgtgtgaatgaacaacagaggctgggtcttgtatactgtggctggctgtggccatcagatccaaggatacagaagctgagacccaggcaggccagcaacttaaacaccacaacccccaactgggagcctcagttttctcatctgtgagatgccgacaaagacatctggacttaggtcacaggattcttgtggggataaaatgtgatcgatgatctgaaggtattttgaagacttccttctgcataactgagggaggtactcctggaaggtgcctccctaaggaagataggaatatggtggaagagaaatacttccctgaggccacatgggaaaatgtgaaggacaaaggttcccttcacagcaggagtgtcctggaagacctgtcccaggcgccatgaatggcagcctatatctggtccacacctgcctctatgaaccccttcctcaaactccaacaaaagggcagaagggggaaagcaatcctatgtcctttaacctttaatactgtcctgggactctgggctctggtttcttccgctggtctctggagttggtactccaggaactgaattcatatccatatgaaatatcttgatcactcaagggaatctacaatgttcactttctctgaaaatgggctaaatgaaatcagtggcctgtaaaatttcttttggttttgagactcttcaaattatagttaagaagggaacatcagttttaaacttcctttgtcttctaaaaaaattttaaaaccaggtcactacatatcaatgtacgattatggggcacgttccataatctacaagcagatcatctcccacagcagataagccaggaaatactgggcagataccagcaaatcaggtatctctggagtgtctgggcttgtttggggcacacagatcccagaccatggacaaccaccagtttcaaggaagaaagtagaaacactcaaagattaacagagggaaatggaaacaaattgcattcaacctggcctctggctttcaagtcatttcttcttatatctctgcacagaaacaatgaagtcatttccacccttgaacttgggaatgaagagaggcaaaagtcacaggctgggaaccgcagcctgaattggatgaacttatcttgtggttgacttgtgcatgtatgagtttcacacctgagaacaggataggaacttttgaaatgcagcccacgccctctggccctcgtgtgtacagagccgccttcgttgggtgactcagggtaatgactgagcaacaactgttggcttgagtggtgccggggatgccctgggaggctctccctgccatgctgcctgccctgcaccaacaggcccctgctccatggctgcagcctccagcctgtctggccatctaccggcagatgctgctcccagggtctgcctcccacagcgcgcgcctctgattcagccttccaagctcacaaaacaaagtatgtgtaacggaagtgttgtgtggaacccaggagctgatggtctcatctgggcccagctgcctctttgcagactttatggccttcacctgggtttgcaggaggcagatagtttctgggtctggataagcaatgggtcctggaacaaaaactctagagaccgggggctattcatgacaggctccatttcttattgaacattcagttcaccatcaggtcttgtctagtctacccccagagcatccatttctccatcaccttggccaccactaccatcccctggctcctggctggtacctccatggtcccacctttgggactttgagtatgcaatgtttttgaaagactcagtccctacccattatgggtagaattagctccttctccagaatgtttattcttcaggcaggctttctgcagctacctggtctgtgtcctgggcccttcctaactgtcctcccagctgatgggtgacttggagctggtcacctgcccctctgggcctcagtctccttgcctgtagcaatagcacctacctcacacgttgtgagagttcaatgagctaagacacagcactggcccagcactatggaatagtccctgtcactgccgtggataacgggtaacgttccatcaccatttcttaagtaagctccagatgggcggagccttccctgtctcattctttgagggtgcccaggggccagcatggcctggcacatggctttgatcaaatggcaatccctgagctcctccggccagtcctgtgagtcacaggtagactccctctccatctacacctgttcccagtgctcctggcagctctgtgcaatctcatttcctgaagagatgcccccaggccacccccctccactgtgacccaaggggtgcaaggcctgaccaaggccagagtccctgctgtcgctggaacagagactcaaagcaggagctttgctcccgcttcattccctgcctctctgtgagctccagagactagagggacaggccagggccatcctcatcctgcttgaagcagccctgctgggcctgacgcctggggaggggctttgatggggtctgcatgggaagaaggtagaagggagcttctgtccttaggtcccacaaattgctgctgagagcttccctcaccccaagaggagatagccagtcccagccctgtcctatcctcttccggcaaactttgtccttcaagccaaacccttcctgggagaattctgcccccctctctaaaacatagggttacctagacctctgggtctggccctggggagggtggtggggatattggggacctcaggatggggtccccaacttacatgactggcttccaaccagtgcccccacctgaaccaggcctgggcgcccaggggagacaggggcgagggtagaaagcaatctccaatgattgacaccctgggctttgagagtttcggtgccaatgccagggtaccaggcccagtgccctgggcacaatatgcgtttctggcaagtgaggactcgggactctggccccagaggatagtgaagcagtggggcctggcagttaccatcatcgtggagtggcgaccaacttggccttcacccaagacccccaccatcaccctcaccctggctgccccaacaggtacccctggccgcgagccaggaagggaaggtcccatccagggcgccagccgtgagctcttggttgggctccgagctgcagccccgggtgaggcggcttcggggccgcagagctccgaggccgggccatgcctgggggcccggcgctgcgctgggcggagtgggcgccgcgctcggaacgctcagagcgcaggcggggcgcacgcacttggccagggccggcgcgcccttcccggcacgcacgtgcgcgggtgggcgccgcgaaccctgcgcggagggtgcggcccccgccctggggtcccaggaggccctgccgccgcccggttcccgccctcgccaaggcgcaggtgcgcggccctcccgcccgggtcgcggccgcccgcactcaccgtgccctcggacggcaggtagccgatgtcctcgatggcgcagatgttgatgatgtggacgctgcggtcctcggccgggagcgtcgagtacttctcgttgaccctcatcgtggccgcctgtgcgctgggaccgccgggcggcgcgccctccccatccacggccccggcggcctctgcgggcggagaccgcagcgttcgcggcgcgctcgcagggggccgggcctccccgcgcccaggcccgccggggacgtggccgcctcccgctccgcccgccgccctggcccgcccggcccgcgcgctcgatgcggggggcgcctgagcctctcggggccgatcgcgccgccacccggctgctggtcccgcgggccggcccgcgcctggtcaggaacttggacgccagccggcccgcctttgccttaaagatataagcgctctccgcccgcctatggcaggggcggtggccgcgccggtcagattttccgtagaaatttaaacacaggaagaaaaagtattccattcctgcgggcccctccaagttttatttttatccagggaaagtgcccctttggatttttgagggttttcataccgggtgtgaaaggggggaactttcaatagccccacctgaaataaagtccccgagtggcaggcgcttctgtggcgcgtcacctccgcctccggggggagtgaagcttctgagattggagtctggatctctgcccctttccctccaccctggcaaactcctgctgtcactcagcactcacctcctccggggagcttgcctggttcctgccgacccgccccctccagctgcccgcgctcctgggggagtctctcccggggcagtcatctccctggagcccactgatgttaccggtgcccccgagtttacggagtgcttagtgttctgtgcccaggtgcgtgcagcgtccctgatgtagggcgtgagtgtgtatcatctcatttaaccccgcacctgcaaggttggaatgcgggtcctcattttgcagaggacactcaggcttaggagggccaaggaccagtccgcatcctctgaggtggggcggggctcctgcagagctttccccactgctgggcaaggctgtcctgctttctggaggggcggagcgggggggatggtggctttgatctctcttacccccggacctagcaggggtctggcacactgcagatcttcaagtcttcttcccctaaggagaataaggcaggtccccaggggacgaccatactcaggttaagccccaggggccatgctggccaccacatccagtggaaataaagtgtccctctgcctctcacatcctatgagttcttcacggtgtgcatcagatagcacctcctgcaggaagtcctgctggattctcccctactgtccccttcccacccaaatatgcaggccttcctgtctatccaaagaacctgcctgaaccccaactagcacttcatttattccgtctcattttacagtgggttgtctaccaggttcacacagccgatgctcaataattgcttgttaaatggccactggggaacattcaaggcctacagaagtgattagaaaattgtctttaaaggccacgatgtcgtcagcgtgccatggttccaagcatggaacctggagtcagctaggatagggttggagagaaggggtggggtctagctccagctctggcaccttccagccttgtgaccttgtgccagcctccttggcctcagagcctcctgggcctcagagcctctgccttctcatgggagttttaagcgtgcctgaagctgccaggcttagcaatggtgactgttgtcactactaatgtcatcttgtcatgacctaccctttcctggtgcctcagtgagactctcccatttaggcacaagtctgtgacttccttgaacttggggcggtgcaggaaggctatttggttctcaggctggtggtgccaacgggcactgagtggccctaaaggaccctttgtctgcaccttggacagcgagagagggtttggagaagtgccccaggctggccaaatccatgccaggaacagtgctccacagcctctgctccttaaaagttcaagtgtccagggctgggagaatcccacacgcatgtacagaggattatgtaactccatccacttatctttgttggtaaacaaccaacattgtgtaatactaatgtactgtcttttcaaatttgtgttcgagtgccaacagaccttccagagctctatgaggtgcagtttgcatgaaaaaaaaaaaagagtaaaaatatacttggccaaatctggacacactggtgctcccaaaggtttgggaagtgacatttctggcctgagagggctctggggcttgggggctgcctgctggggggccatctcctaggcaaggtggccccaccttctccccaacagcaccccttgcggctttactcaagaaacagtgcttaacctctagtttctgtgatttatactgtagccaggctcagggcatctgcttgcctgtaagactccactttctttgctattgccactatgtttctttttttctctccagtatccccacattctgtttcctctcgccccttccccaagtcttcccaggtggacagtgtggacatgccacagcaagggcagaggaaatgcagcgtggcctctgtgcagcaagggccagagaggaccagttctgcctccaggcctctcgtggccttcgccgggggttcgtgggtctagggatttcagggaccgacacaaagtaaaaacaatagccccccaaaataggagcgggaaaagaattcctgtagctggagatatctcccaagccaggacaagtttacagggtcctttttgttccatagatggttctcttctctggttccctgtccccgcctgtgtcctatgggtcactttgctgggattctctctccactccagtcactaactgcttatacgtgggggctctccataaactgttgcacccagttttctttttgtctcagtgatttttatcactaaaaccccacagggacagattttgtgggcaggattaattccctgctcatgaattagtaaaacccttgtctaattcgtctagatggtgcatttcattatgggaagctccgggcctcccagctggcctgtttggccacagtgttgctcttcagtgtcatttgatggcatgcgccaacagatacaggtacaggtgtctttgctgatttttttttttttttaaatatggaatgcttcatgaatttgcgtgtcatctttgcgcaggggccatactaatcttctctgtatcattccaattttagtatacgtgctgccgaagcgagcactttgcggacattttaatagtcaccggggatgcaagcatcaggtgacaaggagcgcagaccaacaagctgtcaggagggtggcttcctggtaggaggcagcacaggggagcccttttcaacgatattttatttccatcccgttggcattgcccacagggaagaatacctcagagcacgggccaagctgtctgcaactcagtgggaagttgaacaaaccaaactttacaaagggaggaagaacgaggtgccccaaattatggagacacagggactggttaccaagaccatggaccggaacaagaacctcgctccccattaaccaaccgcatggccttggtgtgcctagatttcctcttttgtaaagtgaggctgaagtgtctccctttggatggtaggcgaggaccaagaggcccagcgcctggcggtggtgagtccaggccagggaggcaaaggtctcttctaataaaggagctctagcgtggggcacagtggatgtctcagcacagtggatgtgtggggctggatcatcctctgtggtgggagctggcttgtgcagtgtgggacattttgcaggcaccctggtgacctctacccacccatgagatgccagcagcaccctctgcctccagccccagtgtgacaactaaaaatgtttcttgatgttgtcaaatatcctccaggggacaaaaccagccccagttgagcaccactgctctcagatttctcagcagccctcacctgcatgtcaactggacctgggggggccagctttatcagtccccatttcacaggtgcacacacctggagaggtgatgtacttggcttaaggtcaggcaggagagcaaactaggctttcagtctagctctcctgacccccacccctcaaaccagagctcactccatgaattcaacacacaatctagaattagagaggtggcagaaaggagattgggtttctttttacaaaatagaaatacacaggtgcccagggttgccctccattggtagaggtcgtggcacccacacagcccgggtgcactgagcttgccctgcccctcggttggcccagtacaaatctctgcattcagaggggtttaataagtgctgttgactcatgagcagcccaggggagggaaaggagcatggaaggagtgagcagtcatgactcaaggccattgtgagcgccaatggccacccgtcccactcccacaccagccccgtgctgcccggcaacccgcgtaggacagaaacagaggccaaacaggtaaatgatatcacctcctaaaagcaacttgggctataattaccccggggaagacgtgcctggagaatttacaactgagatatggtgggcgggagacgggaccactgtcatttccttcccttgcatgatgtcagtgcccgagcagaggccggccaaccgcagcttgacggcgggactccatgggctcggaaactgccggccgaagctcagaaacgcagccaaagcatgaagttctgtcttgggggtggggggcggggggagggtgcggatttttttttcctccaacagaatccatggacatccagtttccataggagggttttcagattcttaatgtgttttgtgaacacaaggcctgccttctgagaatcccaagagctttaaagctcacctggggtagctgagagcctggctaggccacctcctcctggtagcctttctggtccagctcagacggcatccctcacctctgctccttccatcctcgactccagccactcacgttcccttctgcccaccatcctcagttttttgggcttcatttctgcactctttactctccttcccatccttggcacactatagatgttccccatttatgtttatttatttaacaagcagctgcgcagcgcttactatgagccagcaccgtgctaagctctttacaaatgttaagtcgcgcggttagggtgattacagccatctgcaagtgcattcacacggacggacgcaccctcctgggtcctttctcatgaggtgtgggaagaagtttagacgaaatcttaaacagctgcttcctccccagtgactctgcaggaggttcagccttcctccccaggatggtgggtgcattggtatcggaaaccctgccgagggggacagggtcggactccccgcagcgggacagcacctgcccactctgccaaacagagcacctagctgcctgccactggttcaattcttcttcctggggcttgaaagagtaaaagttccagattgcctggcaatttcctttcaccagcatacttcctgagaataaggaacttccatctcgcagaggcgggcggcttcagtctgagcttgtgccactccagggagacaagggtgacccttatggcttcctctgagcccctgtcctgattatgtattttctccctagacatgatacagcttctgatagagaaggacaggtcctggtcctcctgtcctctggcctgaggggctgaaggtgacttgaggtcccaagaccgtggagctgggacataggttggcacccctgcactgttgagagtacaagaaccccatgagagccgctctcagccacagactcatccctgtaccttccacggggtgtacgccgggcgtgagtgcaccaaagttgcatccctcccctggtgttggtgaccggcccaagcccctgatttccctaaagaccgaagtctaatgcctgagatggatcctaacgttacaggcactggctgcagcaagcctctgactctggggcgaatcctctggggcctcatcacaccctcccctccccaaagtcaaggaagccacacctcctgggccgactgtgaggctcagttatctttataggaaatcctgacgctttcctgcaaaaccctgtggttggaataaaagatgttccagaattttgttatgccatgcaaggccttttccttgaacgcttgctgttcacttcattgtgccttcacgtatgcatcatttggtgcaaaactgttttgtgtcaaggcctctgccaggttgggggtctctgtactgcagccgagctgctgggctgcaggtttctcttggggggatactgtgtgtgacaaccattggctgtacactccgggcctcacgtctgtgggagaaatgaatgggaacatgagccaggagcatcaccagcagtggaggaattgtcccaaccctgcgctggggaatcagaaccttcaaggccctctgggtttggcgccgaagacctcgtcctcctgatgcaacgtttctgtacaataaaggtgtgcgttactgggccctgcggagtgtgtgtcattgagatattctactatccacgctaacaagagtaaaaataatcaggggaaatcaataatctatgttatgtgacctgttatataaagaatatcatctcaacatgtcctcagtataaaagttcctggccaggcatggtggctcacacttgtaatcccagcactttgggaggctgaagtggaggatcacttgaggctaggagtcagagaccagcctggacaacacagtcagatcccatttctaaaaaagaaaaaaaaaattagccaggcatggtggtgcgtgcctataatcccagctacttgggaaattcaggtgggaggattgcttaagcccagaagtttgaggctgcagcgagctatgattgcaccaatgcacttcagcctgggtgacagagcgagaccctgtctcaaaaaaaattaaaaaaaaaaaagttattaatcagaccttggccattctcttttttccaactacatatttgaaatctggtatgtgaattttactttacggcatatcttatttcagaaaagccacgtttctagggctcaaagtcacatgtgggaaggagcgaccaggctggactgcttagctacagagccttttcctattatttaaggaaaattatattggatggcttttattttctgctttgtcatttcctctgttttgtaagatttctgcagtgacatgaaataggttgataggtagggaaagggtgatattatttaaggcactgacacactttgtaacctgtgggctcatattggacccttttactatttaaggaaaaatagttgaacagctttttctctgtacagcacacatgtagagaaacccacctttgcctaaaggccaatcacagcacattcccgaaatattaggacagagtagcctttaattacaaaacatatctgatgacagagctggtcacacaggtgttcaactgaagaagccaagagagcgccctatttcacaccagaaagagatccaggaggacacccaggggcaccctcccagggatcctaccatgtagtactcccagtacatgggccatctaccttgccaagtggaagcgatgcggttgggtaagagatctgaggcaggggctggcagcgctggggagcaggggactaacgcagatgccctccacgagcagttctgggcaggggttccaggactccgccttggcaggtacccctgaaggagatgctcaggccccttcccctggcttttctggtagagtgaggggttcattcagctacatactcattcattcgctcaagtgtttgtccactcatccacctgctcactcgcccattggctcaccccattccccacttacttacccactcaccatgcactcacaattcatttattcacttggagtttcactctgtcgcccaggctggagcgcattggcatgatcttggctcactgcaacctctgccttctggattcaagaaattctcctgtctcagccttccaagtagctgggattacaggcacccgtcatgactaacttttatattattagtagagaccgggtttcaccatgttggtcaggctggtcttgaactcctgacctcaggtgacccgcccaccttggcctcccaaagtgctgggattagtgtgagccactgtgcccagcctcattcactcattctcttatacctctacctcctcaaatcccttcctgactttgtatttctccatagaatccgccaccccttatctgcagaggagttcgcttcatcatcttgttttccctctgcctcccctcaccctccttggctagaatggcggctccaggtgattttgtcataatttgatcgctcattttcatgctgaaaatgacgtgagccacagagacctagaaaaatgcacagaattgaaccagctatccaacaaagttgagccccaaggcattgactcttaaaacataaggaagagagagcatgagacagagtggcctctgtgacagacagtggctgcctgtctttgcaaaatgcattaatggccaacagcaaattaattaagtcatttcaatcccttcgcttatgtagacaaaatccaaagatccgtgtcatatagggttagtaagtacatgcatgcacatccttgcatgcatacacatacgacaactcatccccaaagggttaaaaatggacccgacatgggatctcctccccaatggcatgcataatcagtggttctagtgtccatccagaagctcttcctgaatacagatatttaagatttttaagctcatcacagcccagatcctccaagacacatagtcatatagagcccaggggccacagggctgcctgccccgcctctaacgtagattatcgttttccaaaagctgttcccaagactcagtgtccctgcctcttaagcaggaatgattacatctgaaatcaggctttctggaaaatcaagtcagcatccctgcttcttaaacatgaacgattacgtctgaaatcaggctttctgaaaaatcaagtgtcctcctccccctttaagctcatcacagcccagatcctctgtgttaaacagatctcaaatctgtttagcttggggaccaaacagagtggggctgttttcccttaaacccatcggaaggagtttattcgtcaattttcactccactatttgactctcagctcaagcaccttgagacgtgcttggccgtccactcctctgttcctgtttccttccagtttgatggagaagtctttcctccaaccttagagggactctttcaaagccacaggttccttctggatctctctgcagaacacactccctggttccttcaagccacatctcagaagagaaagcggaccctttccttggtcagggaggatggtggggcttccaattctttcccaaaggaaaccagggtaaaagcaaagaacccccagcccatgctcagagatggccccgggccctctgtgagtggattcatatggcttgtttcacaaggcagggggaccctgtggagggggatattctttcatcaaggaggtcctgaggcatgaagcccagcctttgtagatgcacctaagaaaatacatgggcctgggcccccctggtccttggagctggatgagtctgcagcggctggtgacattggggaccatcagcttgcagagagcatggtaacagccttccttccctactgctgcctgtcacagccttgtttagcttggggaccaaacagagggggacagttttcccttagatgaccactgggactgcccctacccgccttcccaccacttcagaacagttggaggagtgggctagggaaagagtagggggcgtgccagcgagagagccccttaccatggagcagacataggctaatggcctcctcctcccaggagttaattgtattctcttgggctggacttcatgtttcctgggagctgtgaccctccttccctcctggctcacgtctccaagccttctgctaagaaaccacctttccagggtctgccctggccccactcccagccccttccactgcttccccgcatctgttatctgacaacttattattctccctgcaccaggaaagcagggacctttgttttttgttttctctgtattctcaggacccagcggagcctggcacacagtaggtatgcaaagtatcctttgaaaggatgaacaaatgagctaatgtcctttgtcggtgtccacagattctagcacccgcctagtggaggacaatgaagagtttacccacaggtcaatttttacccgattcaaccaacccctgcacggacacttgcctcttaacaggaggctgtggaatctaaacaaacaggttctccctaggggcaaggatggagttgttgtcttaacattttccagctggtggagctgctggggaaagctgctgaggccactgccacccaccacaaaagccccattgagagccccgccttctccaatacgagggctcctgtccagggaggaggtgggctgggtttttctggcaggagcgtgtcccctccacaggggcaatcagcctatttattaaggtccttctacgtgttaagctgtgagcccagggcacagacccgcaggtgtgaggctgatagtctgccaggaagtcagaaatctgacagccacagaaaaatgctgaaggaccaggggaggaaaggtcatggtcaattccggaagactttgcacagggagtggcttctcagctgaatcctaaacggtcactggtaactaggaagatgaaaaggaggggtcgactgcccaagccggggcagggggtcgggaggtctggagggacgggaaggctgggaagggccttggggctgcctgtgcatccaccgggtgcctgtgagcatcttctcaaggttgccgggcactggggaagaagcagccagcaaaacacgcacaggccgggtgcggcggctcatgcctgtaatcccaactctttgggaggctgaggcagacggatcacttgaggtcgggagttcaagaccagcctggccaacatggtgaaaccccatctctactaaaaatacaaaaattagccaggcatgatggcaggcgcctgtaatccaagctattcgggagactgaggcaggacaattgcttaaacctagggggtggaggttgcagtgagcggagattgcgccactgcactccagcctgggcaccagagggagactccgtctcaaaaaaaaaaaaaaaaaaaaaacacccacgattccttgtccccttggagctgctgtccagcgagggaggggcaggcagaccatcgacaaaacagaagcaaatgacacggcaggtgggatgctcagaggtggttaagccccacggggtagaggggtttggacatggctggaaggtgggaacagcagtttctcatggtggccagtacagaccttgctctgtggggggcccttcatgactgcttgatataaggaaactttgggaagacttagacaaccaggctccatttttatacaaataaaaggatttttggtcacatgagttaggaaaacagcagtgccggtcatgatccctggacaccccggacagactggcctccccgctggggggctgctttttcaagtttgttttgggcccctttgcatgggcctgggagtggggacaggcacttccttggctggactagcagcatccatgggcctggctggcagcaaccaggccggggcagagtgtccctcctggggctgactggtctatgactgtggtcaggttgtgccaggacagcctccggggtgctttgctccaccgtggagttacggtgatggagctggcagcatccctgccgctgaagggggtctaatctccacgggagaccagacgtctctgctgtgccgtcattcagggaggccaaagtcagggctgccacccaccccgcccccgccaccaaatcaccaaggagaggaggactccatgtgccctcaacacattgcagacatttggcaaatgtttgtgggggtgattgtcccaggagactgttgggcatggctgactcatctatcagaatggaactttctagagactgatgatgggtgccaggcacaggcctcctccccctctgtccctgcaaccctgcagggtgtctttggacaagtcatgtgggctctgggacccctgtttccaactcagtcccaataagaagacaggctgttgagatgttaagagtgggccccaaacaccaagcatggggtcccttgggaatgcaagctcagggcctgggacccttagtgcccacgagggcagctcggcatctgaccccctgcttgtaatcactgtttattatcacagctgtcacagacttggccatctgctccagtgacctccaaacctgtcactctttcattcacacaatggacattcattcattcattcattcagcgacacttctatgtgccagacacagaaccggggctgggtcacggaataaacaatgcaaacaagtccctgctctactcccacagagcttaccttccagcggggaggcagagcaaaaccaggagccagaaaggcaaaccgatgcatacacaggaatatcagatggtgatgactgctgtggaggacggaagcaggaagaggggacggcgggctagcgagtgtgggggcaggcgtggggagacacgacgtgggtggccgtggaaggcccttccggggaagtgacatctgagcagagatcttctccccaggagccagccctgacaagactggggaggaacattgcaggcagcggcacagccaggtgaaggccttgaggctgggaagagttgtgtgtgctggggacaagaactgaggtcagccaggctggggcaccctccagctagggggacgacgggggacaagggcagagaggaggttgggagggccaggccaactagggggacgacgggggacaagggcagagaggaagttgggagggccaggccaactagagggacgacgggggacaagggcagagaggaagttgggaaggccaggcctgcagggccttcaggccaggagggcactgggatcctctgctgggaggaggggctggaaaggtggcccccacaggggaccgatgctgtctgaactgtgaggtcacaatgatcccggggctgctcctggattcagcgagctgggggtagtgcccaggaaacacattttagtcaaggcccccaggtatctggcacaaccccggcaatatgcaaagcctcctctaatgatggttgaatccaggagaccccaaccgctgtgatggaaacctcgccacctccagaggcagccgatgactcctggggcagccccacccggctcaaaggcaacctgctccacagagccagccccatccctaggcttggagccaaacaggattgctccttcataagaaaaaaaaatcagagctacagagtcagccgtcttaaaaagctccctgcattcttgccttgcccagccaagcagcctcaggtccccctgctccctgtacctggctgggctcagagccactctcaaccacatattttttaagtcctttgtcccagactatgaacggcatggaaaccaattgaggactgggggtggcagcttgtgtgtgtgactgcttgagctctggagggtccttctactgtcagcgcctccccatcccccacccccattcttctgtgatggccccgagtgtctgtaatgcatccctcaacttttcatctgccagtgagactcacagagcaaatagcccaaggaaagacaaactatggatcaaactcatactaaagtataaatgactttcttctcccagatcattttgatagtgaacaggacaatcagcatcaggcccacagacggcgagggatggaaggagtggaggaagagaacttcccacggcaaggggaaagggaagaaggaagaggcttggaggaagggggacaaggaaaacttttatttccttctcatctggcctggactgagccagctcttccttacctgctgccccaaacagggaggccagcatagccagagagggggccagcgtgtgtctgatcccaggggcaatattaaagtttgcctcagtccagggcgcccatctgaaaaatcagggcaaaaacaggactaagaacaaaggagaaaaaggctaagagcaagggaccacacaggaactgagaaatgatttctcagctaagcgtctggcctttggagatgcctccctgcccatctgtgtggctggggtcagagaacccccaccaggagggtgagggggagtgaagaagggtgaagaagagacctggggctcttcccggagagtgtgcgtgagagccaggggctggctgagaggccactggcttccagatgtcccagcctccatcaggccagacctactcctgcaggccagggttgcaaccccatcaacatgatatagggagcccgagggaagcaggacaaactctgcctgatgttccttccctccatcagccatcaatcccccagtacaatgagacggtcctctcagctgtgcccagccacagaaacagcctctgtgccttgggaaaaaatgatgttggcgggctacaccccattcacactcatgaatccactccagaagtctgaagactttttccccaggtaaaaaagaaagaggaatcaaagaaaacaaaggaagggcagaaaataaaagaaagaaaagtgagaacaaggaaaagagagagcaagattcagaggcagggaagacctgagtctgggaagagggcaggaatgtaccctgtggggctgaggcgtgtcccttcatgtcacatcctggtgctggtggtgacctgattttgactcatccaaaaaatgatcaaaagagagggaaacaaagactaggtatgaccagttcttatttctccagaacaaacggggttctgaagaactgggttcgcgggattaggaatccccatcttcagaggatcacagtggtcctcttaggggcttttggcatttttgctaccatgtgtaatgaggcaccaagaacatcataggtgaggtacatgggaatgctcggcttcccagcaaagggcaatgtccttgtggtaagacttggagtcacattaatttaatcttatctttaagaaaggcaaaaattcctcagctaaaatgctcttgccgaagggtcactggtctccagaccactgtcaggggattgggattgttctgataagatgacaggtctgggcccgaggagctgaaattctccctgatcttgcctttctctaccctcatcccattctttcctcccctccctgctctttattcaacaaacatcaattgatgcagtaaaaatcattatcggctgggcgcggtggctcacgcctataatcccagcactttgggaggtggatcacgaggtcaggagtttgaaaccagcctggccaatatggtgaaaccccatctctactaaaaaatacaaaaattagctgggcgtggtggcatgtgcctgtagtcccagctactcaagaggctgagggaggagaatcgcttgaacccgggaggcagaggttgcagtgagccgagattgcaccactgtactccagcctgggtgacagagtgagactctgtctcaaacaacaacaacaacaacaaacaacaacaacaacaaaaaaacaacataatagacacattctggtctatggcagtttcgtgccccagggaagtccaacgtcttgcccaatatttacagagtgctcgtctagatagtcactgcttcacccaaggagctttcaaatatccacattctagtacttcccgctcagagattttcaacagtccctagtgggcccagaggacaggcaggtttgggaacctgcccagtctcatggaggagagacatgcacacaggtgacggtgatgccagaacccccttgctgagacaggcacggagcacatggtagtccaggggagggggacactgggcaaggctccagagggaaagcagctcctgaaccctcccccagctcaccccagcatggtccgttcaaaacatgcggcccccatgcacacaagttctcagttgttctgcttcatctgtgtctactggggggtgcaggatcctcacacagcaaatggttcttgtcctgaatgtgtccctatatttggagtccattgtattttcatcatttaaaaaaatcacctcggccgggcgtggtggctcacgcctgtaatcccagcactgcgggaggccgaagcggatggatcacctgaggtcaggagttcgagaccagcctggccaacatagcgaaacccccatctctactaaaaatacaaaattagccaggtgtggtggtacgcgtctgtaattccagctacttgggaggctgaggcaggagaatcgcttgaacctcagaggcagaggttgcagtgagccaagattgcaccattgcactccagcctgggcaaaaagagtgaaactccatctcaaaaaaaaaaaaaaaaaaaaaaaaaagaaagaaggaaagagaaaaaaatcacctctctatttccaaagtaccattggttgcatactctattgctcatcctcacacaaagtctatgaattacatggcctttgtattattagacccattttgcagatgaggaaactgaggccctgacacttcctgtggtttactcaagatcttgcagttggaagcaacagaggtagagaccctcccctaattggttgaccctaagatcagacttttcctctgttgtcggtctgaagctctagctgtcacagtcactcctttatgtgtacaaccatctaaggcataaggtgctccagtaggcaactgttaagaagcatcatggggagctctgcttctggccacaaaagagtagctgctgtgtcaagaacatctataaaggctggattaaaaaacaaacagagaaactcagctgctataggtagctgctagaaggaattggaagaaaaccaaggcagacaggacttgagggctaagagaagggagcttcagagaaataagctcaacattctggaggagagagagagaaagggaggaggggagagagagagaaagagagagggggagggggaggtggggagagagagagagagaaggagagagaaaagaggaggcaaaaattggagttctggcacccaccaatcccaacaactcacctggaatgttctgcccaaggcttcagggacagcccacactaatttggccaggccctttctcatgatctgctttcttttcgcccatctgcctcccaccttattcaatattttgatgatcttcctctttgcagcccctcttaccaatcttcccagcaggacactatcctgcttcttcaacatctctactcaaaggggtaccgagtatccccctccaaggcacagatttcttcccctagcgttacctatctcggtataatcccccatcagcatacatgcacccttcctgcacgttcagttaatgtcccagaccccaatctccaccaccaaacaacaacttctttagttcttaggcgttgttggatatttccgactctgtatctggataccaggctttgctatcctaaccaaaccactttacaaactcacaaagcgtaacttaactgatctcatagaccctaagttttttccccattcctccttttgctctctcagaaaggccctggagacaactcccacactagcactccctgactcgtcccatcctttttccttacacacagctgaaatccaaggctgtgctgctggagccctcacacaggacccaggcccatgacctgttgcctttctatcagaacaagttgacctcacagttctaggctggctcttatgtctgcgtgtggtggcagctgccgctttaatacttctagaggccttcaaaatcacaggctatgctccacttaccctttacagttctcacaaccttcaagcattaatatcctcctcacacctttcacatttattgtctgcctctcgactcctccagctctattcactatttgttgaaactccaacagtagctattaccatgggcccaatttcagcccagtttctcacttagcacccaacacaagtcctgaaccacacgactgtgtttccctaatacatatagcatcttctccctttcttcagggttctgttcttccaattccaaacccagaccacacttggtttatcgatggcagttcttctaaacccaatcaattttcaccagctaaagctggatatgctgtcgtgtcccacacctccattatggaagctgctgcacttcctccctccaccacttcccaacaagccgaactgattgctttaactcgtgtgctctctttcactgaaggaatgcacattaacatttatactgactccaaatatgctttccacttcctccataaccattttgccatctgggccgaaagaggcttccttaccacacaaggctctttcattgtcaatgcctccctaataaaggctctccttaagactgctctcctgccgccaaggctggagtcattcattataaaggacaccagaaacctactgatcttattgcaaaggaaaatgtctatgccaagaggacagcaaaaaaaaaaaaaaaaaaaaaaaaaggccaacgcctccacacccgctaatatcccagcccccactccagaaggccagtatttttctttctcctttatcagtcccacctactcttcttctgaaaacctgctctaccagtcttttccaactcagggcaagtggtccttcgatcatggaaaattcattcttcttgcctcacaagctcagtccattctttctttccttcatgatcacttctacgtgggatacaagcctctggcttacccacctcctccttcccttcatggaaatccatccgtaagaccatcacctctcaatgttctgcctgccatgccactagcccccaaggctttctcaggcctcctccttttcctacgcatcaggcttgtggatttactccaacacaagattggcagattgactttactcatatgccccgtgtccgtaaatttgagtatctcctgatttggatcaacaccttcatcggatgggtcaaggcctttcccactagctccaaaaaggctactgcagtcatcccttcccttctaacagatataattccccgacttggcctccctacttctattcaatctgacaatggttcggctttttttttttttttttttttgacagtgtctcgctctgtcgcccaggctagagtgcagtggtatgatctcagctcactacaagctccacctcccaggttcatgccattctcctgcctcagcctcctgagtagctgggactacaggcgcctgccaccacacctggctagttttttttttgaaacagagtctggctctgtcgctcaggttggagtgcagtggcacaatctcggctcactgcaagctctgcctccctggttcacaccattctcctgcctcagccttctaagtagctgggactgcaggcgcccgccaccacgcccagctaattttttgtgttttttttttttttagtagagacggggtttcaccgtgttagccaggatggtcttgatctcctgacctcgtgatctgcccgcctcagcctcccaaagtgctgggattacaggcgtgagccaccgcactcggcggacaatagtccagcttttattagtcaaatcacccaagccgtctctcaggctctcggtattcagtggaaccttcataccccttaccgtcttcaatcttcaggaaaggtagaatggactaatgatcttttaaagacacacctcaccaagctcagcctccaacttaaagaggactggacagtacttttacttcttgcccttctcagaattagcgcctgtccttgagatgctacagggtacagcccttttgaacttttatatggatgtgctttcttgcttggccccaaccttgttccagacaccagccctctgggcaactatcttccagtcctccagcaggctagacagaaaattcaccaggctgctaatcttctcacaaccttccgtagcttctctaataacttctctgctagcatcgcagacatatcacaaactttattaatccttcaggcccaggttgactctttagctgcggttgtcctccaaaaccgccaaggccttgacttactcactgctaaaaaaggaggactctgtatatttttaaatgaagagtgttgtttttacctaaatcaatctggcctagtatatgacaacataaaaaaactcaaggatagagcccaaaaacttgccatccaagtaaataattatgctgaacccccttgggcactctctaattggatgtcctgggtcctcccaattcttagccctttaatacctgtttttctccttctcttatttgtaccttgtgtcttctgtttagtttctcaattcatacaaaaccacacccaggccatcaccaatcattctatacaacaaatgctccttccaacaaccccacaatatcaccccttaccccaaaatctttcttcagtttaatctctcccactctaattacccatgccaccacaatcctgctcaaagcagccctgagaaacatcgcccattatctctccataccacagccaaaattttttgctgccccaacacttctccactattttgttttgtttttccactattttgttttgttttgttttgttttgtcaggcctctgagcccaggctaagccatcatatcccctgtgacctgcaggtatacatctagatggcctgaagcaactgacgaaccacaaaagaagtgaaaataggcagttcctgccttaactgatgactttccaccattgtgatttgttcctgccccgccccaaccaatcaatcgaccttgtgacattcctcccctggacaatgagtctcatgatctcccctctgagcaccttgtgacccctgcacctgcctgcaagagaaaaccccctttaactgtaattttccactgcctacccaaatcctataaaactgccccaccccatctccctttgctgactcctttttcggactcagtctgcctcgcctgcacccaggtgattaaaaagctttattgctcacacatcacacacacacacacacacacacaaaattggagttcagggtactctaaggaggtggagtcctagtaaactctccaggctttcaatcaagaactcagaaaaagacctgctttccataagtccttaaggctaatctcaaatcatctccaaccctgagagaaaccagctggtctttctgcattctgcctgccaaaaagacaagaatcctctcggaagaagagaacatcatctggagcctccgcattgtccacacgtgatatccaagattcaattaaaaatcaccacacatgccaggaagcagagctaaatgattaagaaccacagaaacaaaacaaagtaaaacaagcaaacaaaaaccaaagggcaatagaaacagaccaacagcagatccagatattggggtaattagacacatctgttaatatgatgaatacagtaaatgggaagatggacaatttcacttgagaatgagaatgtacagatagaatccatgggaattccaaagccaaaaatgagaattcaaaaggtaggtataactgcagattagacagaatataagagattagttaaactgaaagatggttaacagaaagcattgaaattgaagcacaggaaaaaaaaaaaaaaaaagatgtaaaacacagaaaagaccatgagagacatccaagtcttttgaacatacctaacctatgtgcagttggaactctgaaaaaaacagaagggagaaaatggggcagaagcaatatttgaagtgtctgaccaagaattttccaaaactgatgagagacaccaggccatgtttagttaagaatatgatatgctctatgaacccaaaacagggtatatttgcataatgccagttttattttttccttttcaatccatagctttttatttatttttcttgcgttattttttttcctaggacatctagcacaatgttgaaaagtatggcccagaccctatcagaataatcccagcccatcatagcaaaattggtgaaaacaaaaaaaagggaaaaatgacaaaacagccagaggaaaaagacatctattttcaaaagattaataataaggcaaatggctgacttttcaacagaagcaatagaaaccaaagacaatagagtgacatattgaaattgctgaaagaaaattactgccaatctagggttctgtatctagagaaaatatctttcaaaaatgaaaacaaaataaatatgtttttggatgaacagaaactaagagaattcatttccagcagacctgcactaaaagaaatagtaaaaggaatttttagacagagggaaaataatcccatatgaaagtatgataaggtagaagagaataaagaacattggaaaggaaaatatatatgtgagtaaagctaaatgaatattgattgtttaaaatagcaataacaatgtcttgtggggattaaatgtaagtaatattaatacatgacaaaaataaacaaaaggtggggtgggagggaaggtaaatgaagttaaaagcatttctaaaagttaaggttttcacattgtccaaaggtggtgtaaatattgttttaagaaagactctaaaaagccagggatgcatgtggcaattctagtgcaaccaattgaacaataataaagaaatgtataactaacgaaataatagaagagatatggcaattaaaaaaaagaattgattaaccgaaaagtcggaggtgaaaaagtccaaaaaacaaatggtacagctataaaacttatagtaatatagtggttgtaaacccagacatatatcagtaattataataaatataaatggtctaaatattccaattaaatgacaaagttatcagactgaattttttaaaacttcaactatatactatatacagaagacacactttaataaaaagaaccagaatgattaaaagtcaaatgatggaaaaatactaatattccatgcaaacacttgaaagaaacttgctgcagctatagaaatatcaaataaatatatttcaaaataagaaattttactagagataaaaagggatgctttatagtggtacatctattcaacagaaagatataataattttaaattatgtatatatcaaaatacataaacccaaaactgacagaactaaaataaggaataaaccattaattgtgattgtatattttaacttaaaatttaacacaactctttcaggaaatcatagaatttcatacacacacacaaaatcaacaaaaattactgaatatacatattttttaagtgcacaaaaaatcatttaccacaatagaccatgttaagccataaagccagcctcaacacagttcaaaggactgaaatcttgtcctctgataacaacagaaacaagtaaagaccaataacaaaaggacaactataaaaaaactcagcgtttggaaattaagtgatactcttctaacttatctataaaacaaaattaaatcacagtgaaaatttagaaacagtttgaactggatttcatgaaaatatgatatcccatatcgtattatggtatcatcatatgtagctaaatctgtgtttgaaaataattgtacagccctaaatgcatttgagcctaaaaagaaggctgaaaattaatgatctaaatttatgactcgggaagctaaaaaaggactgtatattaaatccaaagtagaaggacacaaataataaagaacagaaaccaacaatttagaaatcaaatttataatggagaaatcaacaaaactaaaattgcttatttaaaagactaataaaattgataaaactcaatcaagactcaggcctgcccctcacaagagtggagaccacatgccacatgtctaaatagttaagttataaatcaagctagcaaacaattgaatgacatatttgctgtttctactttgacaaatataccttcctacaacagagaaggctaggttcaaatttaggagtctcagactccttggagatgtgtgccagcagctgaggtggtggggagctggtgcctgccacccactttcactaccctggcaccgtcctgcactgtgaggagcctgtgcctccaaggtctgaccacagccccacaacatctgccccttagctaccttcttggcctacaccatgttcccatggcttgcctttgaaaggacaaacccagtggggatgacttgcaggctctgggagcaggctggggtccattaacatctaggcatggtctgaatatctaggcatggtctcggaaggggtgtgtgggccctgggtgtgcagtttccttagctccatggactttacacctgtgacgaggggtgaggaggaggaggaccagagcagggcaggggcccctcttgcctgggtctgagggccatactggagacagagtatgaaatagagaagacagacacaaatgatagataacaagaaagagaaagcagacattacgacagtttctacagacaggaaaaagataatgtcagtacattattaataactattcaaatacattggaaaatctagagaaaacggaccattttccagaaaagcaccacttcccaacacttgcctaagaagaggtaaacaatcacaatgtcctatatctacaaataaatttgatttctaattaaaattgtttttgcaaagagaactctaggcacatagagctccattggtaaaattttctagacatttcaggaagaaataacaccaatcttccagaaactcttccaggaatagggagagagaccatttcccaatgaatttgaacctgaaaaggatattacaagatgagacaatatttcttataaatatacatatatcttataaatcctaaacaaaaataccagcaaaccaattccattaacaaggttaaaatattatgaccaaactgaacttatttcagggatgtaagtttggtttaatactcaaaaattaacaaaataaaggagaaaaaaacccaaatgatcatcttggtaggtgctacaaaaagcatttggtaaaatttaacacctgtgtataagaactcttagcaaattaaagagaaatgactaaacctacaacaaatggcatgttaaatagtaaggtattgaaagctgtaccctgatgttggaattgaaacacagatgtctgccacgtccactcctattcaacattgcactggatgttctagggatgtaataaggcaagaaaaagaaataaaaagttatggattggaaaggaaaaaataaaactgactttatccccaaaagcatgattttgaaaggagaaaatccagatgaactattggaattaaaaagtaaatttggcaaaccagatgaactattggaatcaaaaagtaaatttggcaaagtcactgaatacaagattaacactcaaaagtcaattgttcttctatatactaagaacaaacaaaatcctaaaaactcatgcctttttaaacaacattaaaaaaattaaatgcataagaacaaacaaaaaagatgcatgacttcaataaagaaaaatcaccaaacattactaagagagacaaaagaaaactggaatgaatggcaggatggtccatgttcatggattggaagactcaatatagtataaccattaattctctccaaactggggccgggcgcagtggcttaagcccaggactttgggaggccaagatgggtggatcatctgaggtcagaagtttgagaccagcctggccaacatggtgaaaccctgtctctactaaaaatacaaaaaaattggctgggtgtggtggcagctgcctataatcccagctacttgggaagctgaggcaggagaatagcttgaacctgggaggcagaggttgaagtgagccaagatcgcgccattgcactccagcctgggcgaaaagaaaaaaaccctgtctcaaaaaaaaaaaaaaaaaaaaaaaaaaaaaaaaaaaaaagaaaagaaaaagaaattctccccaaattggtcttgacctatagattcaatatgatcccaattaaatgtcagaaggcatgtgtgtatgtgtgtgtgtctgtgtaagagaggttgacaagctgatatggaaatttatgtggaaatgccaaaggccaacaagactcaagactccctcaagggaaaagtcagaggacatatattatctgatattcatatcgaccaacaatagttataacagtgtggtattcaaggatacatggatcaaagcagagattctagaaactgacctgcatatattccacaatttgatttactgcaaaggtgctgctgtagtgcagtgtgggaaaggactgtgttttcaataaatagtgtgtaatcagtaagtggtgtgaaatcaataagtggtgtggaatcaataaatggtgtggaatcaataaatggtgtggagagtcatagggagaaagctggaccttgaccttatgtcatacacaaagccaattccagatgcaaaaaggccaaccataaagcttctagaatataccacaggaggctaccttcatgaccttaggatgcacaaacatctcttaaacagaatacagaaatcagtaaccataaaggaaaagactgataaatcttcaataaaattagaaactctgttgatcaaaagacaacattaagtaagtgaaaagggaagacagagtgggagaagatatttgaaatacatataaatctcaaaggacttgtctccaaaatatgtaagccactcttacaaaggaatagaaaaagacaaataacccaatttaaaaaaattcttgcatgagcacttcctcaaaagaggctcttcacatgatccatatgcctatgatttggtgaccaccagcattagtcctcaaaagacacagcgtaaaaccacaatgagataccacaacacacacaccagaatggctgaaagcaaaacaaaaccagaccccaaaacaaaacctgacaatgtcaagtggcagggaagatgtggcgtttctagacatctcacacacctgctgacataagttttcattggtacaaccactttggaaaacttggcagcaactcctgaagggaaacaagcttgtcttacgaccctgaaatttcactgttacataggagtccaaactggaaacaacccaaatgctcatcaacaggaaaactgtggtgtgtttatacaacagaatactctagaacaacaagaataaaggacttctacatgtaactatgttgaagaatctaacatatgaggttagagcaaaagcttgcttccacctgaattcaaaaacaggcaagttgaatccacagtgatgggtgcagggtaatgactgggggtgggtgggcatcataaaggaggcttcaggggagctggtaatgttctttagcttgatctgggtggtaatcatcagatacattcatgttgtaaaaattcatcaaactgtaaaattatgatctgtacactttcatgaatgtctactgcaataaaaactgtttgctctgaaataaaaaagtgcatatggcaatggtagtttcttgaagcacaaataagcccaggtaaatgctgacactggtggtcagccatgcatcacgttgctttccatcctcaagagaatttccaagcatgtcctctcccttagttttcctataaccttgttagtatccccatttgacagatgaggaaattgaggtcagagatgtaagtgaacttgccctaggtcacaaagctagagaatagcagagtaggatttgaacccaggtcctatcttcaaataccacgtcttctgccttttaatttaactactcctgaggggaactagaaccataagcactaaacatttgtgaggtgccttcagggagcactgttcctgatgttatagaagttaggaggaaaagcttgagggcagcgcaggagagagggttggggcccccaacagtggtgcagcagttaccttgaggatggtggaggtgggaccaagctcaacaaggaaaggaaaagcacagggagcggggaagttggaaaagcctacagggaggaggagccatagggctgggcttgggagctgcctggggaacgaggaagggggctccgggtgagaagcagcaggagcaatggtgtgaccaggtactaagtaagtgggccgtggcctgcacctgtactgtggggcggaggacctggccctccaatcctgcagcctgttcccagcacttctgtgtcaatagtcaccgaaattcaaacctcacctgtgacaggtactaaacagctctgttaccacagctgccatggatttcagggtttggctagttttgtcattatgtatcttgcaccccgaataggatacaggggtttccaggtgaagggaccatgtcaggaggaaaagctccaggcaacattcaagagattttcccagaatgcagtctgtcatctccagggatggaagagtcattcctaaaacagcccagggtgccatctctattgcttaaaacacagacagcagctgggcgtgatggctcacgcctgtaatcccagctttgggaggccaaggcgggtggatcacctgaggtcaggagttctaaaccagcctgaccaacatggtgaaaccctgtctctactaaaaatacaaaaattagccaggcgtggtggtgggcacctgaaatcctagctactcaggaggctgaggcaggagagtcgcttgaaccagggaggtggaggttgcagtgagctgagattgcgccactgtactccagcctgcgcaacagagtgagactccacctcaaaaaaacaaaaacaaaacaaacaaacaaacaaacaaacaaacaaaaaaacatagaccgcatgtagattcatagaagattaggtagacatattgcttacttattcgttcattcactcacttcctggaatagttatccccaccattaccttttagcatttatcctccatccccattgcccataacagctcctggaacacaggaggtgctcagagcatgacctgctgaataaatgaaccaactgccacttattccatgccagctatgtggcaggcattgtacttcatgctggttgttctggtcatcttcaagacaacttttgagtcagggacaatcatatccccgtttgacagatgaggaaaccaaggcatagagaggcaaagtcacttgtccaaggtcacctggctgtgaacagcagagtcaggctttgaaacctgatctgtcaactgcaaagccagagcggctggccatatgactacaggggcttctgctgtttccggtgggtgacttgggagcattgagaagcgctggtggtgggagctgagcttccagctcccacttcatgtcgggtcatggtttagcctgctgaggtgggcttttggcatctttatgcatcttagatttccacctaggagatgtcacagccagctcctctcataagccaccagaaagcaatcaggggccagcatcattggcaattgctgtgaaaaacagttgtggttcaggaagaaaacgcatcctgcttgtccgggaagcgtatgcccagttgttcacaggacacacacacagatccaaagacaccaggcgtggccctcgacattcaagaagaacctgtttccactggcaaacacactgtccaggatcctgtctgtccactttctgctgaggcaagtaggcccccccaagggatataatttcttgaggagcagaaaccaatcaccaatgtggagaggtctccggcacgcacaaaacagcacctagtggccggaaaaggtaactgtgcatcagtaaccagggctggggggtggtcagcggtggggggtggagaagagtggggagagggggagaaggggaggagggcgggaagtgtgggaagacagagagagagaaactgagacagagagacagacagagtagaaaagagagagggaggtgggggagagagaggaagagagagagacagagacatcccaggacaaaatttatttcaaggtttggattttctgaacttcaatcttatgtctaatcgataaaccacaccacccccccattgcctaatctcaaaaacttgattaagcgcaagcagagatgacttccataaccatttttgaaacaagttgggggaaaaaaagaatagaaactgatctgttaaaaaaaaaatctatgtgaaccttaaactttattcaaccttaaaagaagctaaaacatctgataaatatctgatagagtttatagaaactagatagattattaaataggaaaatgtttactatgtttcaaaaattcaaatccaccagttcaaccattgggtaaatgtttatctaaaagttcaggggcaaagttaaacagttgaaataaaatggaattaagccttaatattttgttttactttgagtgcaaatggaagacaaaaataatatctcataaaacggaaagtttctattttcaccaaaatatttggaaaagccattttattttaaatttggacacctagattcaatataacttttgcaaggaaggtttcagcagaatccaggaagctggagcatttggaagcgggctttgattatgatttaaaacattctcattccacaacgatacaatttatttcaaaaagtgtcctaccagccagaaactgcctgtaactgcagtacttgtaaaaccctaatgtctccaaagaaaataccattcttcctttttgtcatttgccctgtctcaggtaaaaaaggcaggacctatggggactgttctaattgatgctgatgcctccatttttgagatatttctgggtctttaaaaaatgattttattatgcaatcatcaaaattattttagagtgtcatgagaaggctgaatggcaaaaagaatcattatgattcaaaccattgtacagaaaatgttgtctctgttttcagttaagaagaaactctttagagatccaaaatataatcagaagttattcttgatcaagagtctttctttggtcttttgttctctatccccattgaagggaaagagttctttagccaatttttctatcttcttcatagtttatgagagctttggcctctcatgttagctctctctctcatcattcaaagattgttatatctccaatgtgtttcaatctattgtagccataattcttatttctccatataattaaaattatttttgtagaatacttttgggtttatagaaaaataagatgatagtagagagcttcttcatacccaacacccaattttctttattgtcaacatcttacattaggatgatgtatttgttacaattaatgaaccaatcctgatatattattattaaagccttatactcaatcacaatatattattattaaagtctcatacttcattcagattttcttagtttttacttaatgtcctttttctttctttctttttctttttttttttttttttgagacagagtctcgctcttgtcacccaggctggaatacaatggcgtgatcttggctcactgcaacctccatcttctgggctcaagtgattctcctgcctcagcctcccgagtagctggaattacaggtgcctgaaccaggcctggctaattcttattttttgtatttttagtagagacagggtttcaccgtgttggccaggctggtcttgaactcctgacctcaggtgatcctcccatctcagcctcccaaagtgctgggattatgggtgtgaaccaccacacccagcttaatgtcctttttctttccaggatcccattttacatcattattctttttgatgcccaaattgcatcatttttggccaagaagagcccctccaagagcccctgtgtctttctgacctgactcattcagctttgaggagttctttgccacctggaagagcaaaatcctccaggatcattaagtcctttctcgccctgggacctggaattggccacttctctcagtggccgggtagtctcatgaatctcaaatggccatattcctagaaaagcttgaaataacaagctacattttatttatttcttccaaacactttactgcttttgagatactcttagcctcttcttttgccctggtaggttttgctaagctgtctcccaagtccactgtcactggaatacgggggtctcagagctgcaggtatgttaacagcctcccacccccaggcgtgaagtcttagattgacagcagtcaatgaccagctatggtgtgtgccatcttgccctggcatgcaaatgcttgaataaataaaaagagtccaagagtcctgcaaatcattttacagggaaccatacaagcttttattaaaaagatcagaaaattggcacaatgacatagactaacactgggcatttttgctgaacccaatgagctcaacctttgtttcataattattcctgcacctctgtcatgcatcgagtcctttttgctcatccctctgcagcccatgttaacttgaatcatggccagactcaaggacagagtcccagtgatctggggactgagctccaccatcctctccctcacttggtttttgaacagtcgtctaagttgacatgagttagatgtccagagcaagaaaagactggatggaggggtgaggcacattccttgttctctaaagtccagttcccaaatgaacaaaaccctcaccatcttacattcatatctttctcaatttttctaacatgagtccattccatctcacacaacacaggagtcctccttttggtctgaagccagtatggttctggctctgctgaggagagctcatcttgaaacatcttttcacgtggatattgtgggaagagagccttggaaagtgaagatcttcccttaaacacccttcccatatgatacggaaaaaaaaaaatcagttgtatgagtcatgtccagcctcacatccagacaagctagaccctccatcgatgaacagatcaagcatttgccctggtggcctggcctggaatattttctgattttgttgctgttgttctttaatgtcaccaatcatagaattttagggccgagtggaagattattgatgatattttttctctcaagaaaacgtattcttcagatttgttttctttctatataagcagagcttcttaacatcctggcagttccagagattttacttctagggcatcatggcagtttcagaaattttgcttctagagtacttgtgagttggacttctaccaatgaaaaaggaaatattggatttttaaaaatgtgtatgtcacgtatgtttttggtaactctttatattgatataatcccaaacatatagaaaaattgccaagatcgcacaaggaatgcctgtttagcctttacctggattcactagctgttgatgctttgccacattttctttatcagtttgttctaccttatatttcttacttgccttctatcttatgtttctgtcttctcatatccccatttctagttctatctttatatttgtatatatctatgcattttcccctaaaacatgggagtgtaatttaaaaactacatactttactgaatatttctttatgtttgaagacattgcaatactgtaatctaatctatagtctttattcaaatctcatgcactgttccaataatgtctttaacagcttgtttttccaggtccaggattcaatctaagatcaagtattacagggagttgtcatgtcttcttagtctctgttaatccggaacagtttcagcctttatcatcgtaacagcctttgtgatcataacagttttaaagaatatatgccagccactattttgacctttgtaattaataagaaattgatgaggagatacttcatgactatgtaaatatcctgttcctcatcaaacatttactatcagtactagctttagaatctattgattgtttccttctatatttataagttggcattctattgtaaataataactttccttcttcattatttatttccatttggactaatagattcctattttactcagtgggttacaatcaagtactatcattatttattttgatgaataatttgttctatacctggcccatggtagcaccttccagctgacttctttgtccctttgagggaaatagcatacaattgggttttgctttttgattcaaactataatctctgccttttaattggagtgtgtagaccatttacatttaacgtattaataaacgtgcatataaatctaccattttgatatataatatatatacagcacatgtgtgctttttttgtattaaatggatattgtttgttattccattttatctttactgttggattcttagcactttttgctttattttacttttatttagtggtcgcttttgagtttacaacatagttgtaaacttataatggtatattttcaaatattataccccttcacatatagtttaaaaacctttcaacaatatacttccatttctctccttcctttgtgctactgtcctattacattttatttctatgtatgtcatagtgctataatacagttattatttttggtataaacagctaattaacttttaaggagattaaaattgagaaaacgttttatattaacatgcacatttattattatatactaattctggtacaatccatccttttgtgtatatcccaatttcatctgttatcattttccttttgcctgaataacttcctttatcatttgttgtggtataggtctgctagcaatgaattttctcagattttgttcttctgtaaaagtctttatttcacctttatttttgaaatatatttttgctgagtatagaattctaggttggcgttctgtttctttcatgctttaaagatattgttccattgtcttctgactagcatatactttgatgagaagcatgccaaactcttcttcccctacataatatgtcctttttctctgactgctcttaatatttttttattacttgttttcagcagtttgattataatgtgccttggtgtgttttcttcatgtttcttctgattgaaatgtattaagctttttagatttgtgggcttatacttctcattaacaaaggaaagttttttatcactttttcttcaaatacttttttctgcaccccacttccatttcttggacttttagcacaggtatgttggactacttggtattgttccacaaatctatggtgttctgtgtatttttcccagtgttttttctctctgtgttttattttgaagggtttctattgctatgtcttcaattttgttgatcctttcttctgccgtaccctatctgttgttactcccattctgtgtagttttcaaccataggagttccatttggattttttcaaaaatagctttcattcttttccttatcagttcatgattccctctacttttttgaacagatgcagcacacttttaatcattttaatattcttttcttccagtgttatcatttgtctcatttctgggtctgtttctattgattattttttcttttagttatgtgtcatattctctcacttctttgcttgcctgctaattttttattaaatgccagacattaaaattttatgttgttgagtgctagattttgttgcttgttctttaattcgtgttagaatctgtatgagcatgcagttaagttgcttagaatccatcgaatccattcagggtttgctcctacactttgatagggcagatacagagaagccttgaatcccgatgatactcttctgggaatcctgctcagtgatgccctgtggatcttttcacctcagctggtgagaccatgagctattcccagccctctgtaagccctcagaagtgctgaatctactatcttctggtggttctttccctagccctgggtagtttcctctcatgcttatgtagattagtactcagccaaagacttaagggcacctctctgcagatttctctctctctctctctctctcaatctctcaatctctctctctctctctctctctctgtgtatatgtatgtgtgtgtgtgcgtgcatacgcacgcatgcatgaatgcaacatccccctcttgggtattctgattcacacactttaactttttgggctccttgaactctaatctttttgtcttcaatacagtgagactgcttggctgcctgagttcctctccctgtgctgcagcctgaaaactacctctaggaaggaagattggacaattttcatgccttcaacttgtttgcttcacttttctcaggaatcagccctgagctgcctcagggctgctgtcccacatttcaaagccactgcttcctatattttgtctgtttgttgcttaaggctggggaagggacagattaagtctgacccctgttactacattatggtcagaattgcgagcctctcatgcatccttctgctgtgttcttacgaccatcgagctcacccctgctttctcatgcacactgatgctcaagcctctcctgtgcttttcctacctcagcccaggtatcagtcatttctctgaggtgccctagttcctttttatggagaatgatagttagaagccacaatccaagtaaataggcatgcttattgctgatggtatgttggtaaatttttaaaaatagaaattaaagacatatgcgtttaacccacagcaggaaaataaccaggaacttgaggagagttcccctgttctttcctcttgaaagaaaacattgcaggttacagaaaatttcctccaacatcctctactaatagggaaggaagtacagcaggattactgttttttcaacatattttcaccgagaacctccttcccaccagggtttgttctagatgctggggattacagcagctatcaaaacagacaaaaatgtctgcccctgtggtgcttacacgaatacctactgctattatgttgctgctgttgttgttatttgagctcacatcttttcatgaaagtcagtttagttctttctacatagttctgccaactggatgaaatgtggcaatttaaaccatcacttaaatgtgtgtgtgagtctagaggtcagttttcccccagcctaaatagttgtgcgtgtgtaaatttaaatctccaatctcaatattccatgtataaatgtccccatgcaaaaaatcaatgacacaaacccagatgtgaaatatcgaataaaaagagtaaatattggtatgaggggtaaacccttgctttgtgatccaggggtcaaggttcacagaaaacattaatttacttgccctctcctgtttgcaactgccaaatagcactcacaagacccatttatttttttgcagataaattgaaatgtgatgtggttgccaatgttgcttgtgatttaggggagctgaggtcggcatcccctgcccctactgtcacacatggggtggggtgggtgtgccccaaagcatcacagcctcatggagtctcagggctggagggcaatggagagtcccccttctttaaaccttaatcagtgcctgaaccctgtccatcaggtccccaccaagctcccagaacctctccactgacagggccctcgagctatgatgcttagaaagttctttgttcaacttgacatttgctgatggcttctttaagacttacaccttttcttctaagttctgttttctgacagcacatggaatctgtgcagctgttcattcatagccctggccttcagatggcttcatagtctcctttccaaggcagctccatctgctctgattgacctgtcttcacagatcgtgctgcagcagtcagtgtccttcgaccgggctctgaactgcctcatccaatagtcacattttattttattctatttgagacagagtctcgctctgtcacccagggtggagtgcagtggcacaatcttggctcacagcaaactccgcctcccaggctcaagcgattgtcatgtctcggcctcccaagtgctgggattgcaggtgcgtgccaccatgcccgactaatttttatgtgttcagtagtgacgggtttcactatgttggccaggccactctcgaactcctttatcttttgtaacttttttgcaatatctggccaataatttgtaacaaaatgtaattttaacataccttgccctagaggactattaggatctaagtcagcataccttctcgtctgttctctcaacctgtctaaaaagtgcatgggccctttgtctttctcttgctgcacatcaaaaccttagtaagacacaaaaccttagtaaggttttgtggtctgggtgcagactctttaatccttatgattagctcacacaaatcttccatattttcccaatgagctgcattattattatcccattgtgggtcttgagcagggaatttggtatccgctgccagattatcttggctggcagggtgatcacgttcttaggctgccatagcagctctgtgaatcatgtttcactcttcctttgagaagagaatacccaggatcgacattaatttggtccaggaatatagttggggacctaaaaactgatcgatttgctctgctactccttctgggtcatctagcagaggcttgagttctttctttagaccctgaatttcaggagcagttaaggggggatttatgaatccagttgcacccccaccttgtggcacttcctttagaggaaagagctgaaaagctggctctttggaagtgggaggaaagggaagattctgaatatcctttctgcattgttctattgctctttggagtcctcattttgaagagaaatgacagcgatcatgctcttcagggacttctggacgccctcttccagaatcagaatagtcacttgaggtggagggggaggtgggactactacctgcggaaggggaggtaggactaccacctgcagaaggggaggtaggactaccacctgcggaaggggaggtaggactaccacctgcggaaggggaggtgggactagaaaagggggaagatggtttaaagggtcctactggatactttctgactttttgcctgcatctatttcttgttttaagtccttcaagggataaagagaaacctgcccttgctgccagcatagggcataattgaggatgcaggagttttgctattaacatacattattaaaagttggcatacctggtcttcatctgagccatatttcggccagaagatggcaggtttcaaaataagctcttgggtccaaagaaagcaacagtacttaatcattagttgctttttcttatgtttggtccttttgttctctttccagtgtttaagcatgagtcctaaaggactatcaggaaggattcgatcactctgatctcctttgttacctgccttacttcctattccagacttactagaagtattccccatgttggatgaaaacctttcccagcagactcaatcccccagatcctccagaccagggatgtcttgcctgtcctatccttaatggcttttttaaggctaaatttcttaccccagaaatatcttgcctgtatcctttttccctgagagataacctttctctcttccattttttctcctgtattgctttttccctgggagataacccttcccccttctattttctctcccgaaggttatacacactcctctcacactcactctgtcttaactgaaaccattcactcatacacacattcccttcgagaactgaccatcaaggaagtactttactgctcctctgaggtttttcctaccttggctcatgcacgaggtcttctggtcctgcggttttgaaagtctctccttctcccctgcattgctgagaatccaaatgtgtttcttgcaccaggtaagtcctggctctctccctgggggccactgcaatagggtggcagggcacctccccacaagagaggaccaaggactgtcccagaggggaaacagagtccctgtatggcccaccaaattgttggaaatgggtgctcggtgtcgcaaaatcaacactgagacaaaggatctctcagcaaggctagtttactttctgcagaaagggtgctgctcactagcagtcttgccgtgagagcacacccgaacaaaggagatggggatgtttataatctttgtaacctgatgcaattgtcctatggctgtgtcacatttccattggtcggaatgggacctcacattctaagcttgacccgattggctaacagcttgaaacttttctaaataggcaaaggggaaagagaacaaagaaaagaggaagctagtcatgagagggtcaggagggtttccaaataaggaatggcatgcactatggtctgggtcttgcttaaccttgtccaagaatgccaggtcaagtcagagcagctgcattggaacatatatagatatgcatagagcaaagaaatgacaagctctttatggttttaagaaactttgaagaagaacttctccattcctcacacaaacctcctgcctcagcctcccaaagtgctggaattacaggcatgagccactgcgactggccacgacagtcacgttttaatcctcatgctcactcaccttttctttgcagcaggagtagcagttcactgctttctccttgggttgtaattcaagaccctgccatggaataagatgagtgaccatagacaagtttcttacctgcctcagtttccccagctgcaaatggcagtaattgtgctcatcccaggggttgatgtgagagtcaaatgactatgtggtaaactacttgcccagagcccagcgcctagtgagtactcaacaagcagaaaaaaccgggtttcctggcagctgttccatgaggtgcttcgggtatagagtttcaagtcttcaagcaaccttttcagaagtcaaagctgaggctcagggagcgcctctcccagggacccctcagctgtcatgcagtagaggcaggtttgcatccatgctggcttgcccttgaaggttgtgttttcccactaggccacctgggtccttccttggcgtctgtgacccaccttcatgcttgggcctccctctgccccgcgatggtctcctgcctttcctttctctgcttgctttctgcgtgtggtgtcctcagaaggtgagcttggtcctccatagccccatttgtaatcatatcttgctcatttgttccaaccacccctatacattaactattcccaaatcccaattcttctctttctccacagttcccaacagctcctgagaccaattccaaacccccacctgccctgctccactgagtattgcccaggtccctgtcacacctgtccttccctgcctgcaaatctcaatcaggaggagcaaaacaggctgggccgcctaagctggatttctcagggtggagttccgagaggcacttccacctgggtgtacctcttgaaggcagggacttctgtgttagggaagatggatggcactaaaggccgacagatgagagaggaaggaaccctacaagtcattcatttgttcgttgcacacatgtttattgagtgacagtcaggcacagctgctgcctgagatgttgagcacacagacatgcctgagacatggccccagcctcgggagagaaaggcaggcatgtaaaaaaccacatacaggctaggcacggtggctcacgcctgtaatcccaacactttgggaggctgaggcgggcagatcacgaggtcaggagattgagaccatcctggctaacacggtgaaaccccatctctactaaaaatacaaaaaattagccgggtgtggtggcgggtgcctatagtcccagctacttgggaggctgaggcaggagaatggcatgaacccgggaggtggagcttgcagtgagccgagatcgtgctactgcactccagcctgggcgacaaagcgagactctgtcttaaaaaaacaaaacaaaacaaaacaaaaacacaaacaaaccacacacagtcagacatcagggccagcatagaagagagagggtcctcagccctttttgtctttattgtcaaggaggaagagtcaccgagcaggccttccttaccagtgggctgagcagtaccccagaaaactgagcctatgccctaacctcagaacctgtgaccgtgaacttatttgaaatgagggttttatagagtaattaggaatttcaagatgagatcaccctggattatccaagtgacccccaaatccagggacaactgtaaaggacacacagaggagagacacaggtagaagaggaaaaggccaggtaaagacagcggcagagattggggtgatgtgccttagccaagggacacctggagtcaccagggactgtacggggcaaggaaggattctactccagatccttccaagggagtgtggcctgattggcaccttgattttggacttctggcctcctaatggtgagggaataaatttctgttgctgaaggcccccagttgatggtggtttgttacaacagtctcaggagactcctacagctgggtatatacccaaaggatgataaataattctgctataaagacacgtgcacatgtatgtttattgcagcactacttacaatagcaaagacttggaatcaacctaaatgcctatcaatgatagattggataaagaaaatgtggcacatatacaccatggaatactatgcagccataaaaaagaatgagtccatatgctttgcagggacatggatgaagctggaaaccattattctcagcaaactaacacaggaacagaaaaccaaacaccgcatgttcttactcataagtgggaattgaacaatgagaacacatgggcactcacacaccagggcctgtcagggggtggggagcaaggggagggagagcattaggacaaatacctaatgcatgcagggcttaaaacttagatgatgagttgatgggtgcagcaaaccaccaatgcacctgtatacctatgtaacaaacctgcacgttctgcatatgtatcccagaacttaaagtatatatatatatatatagcaacagcttactgggctaccagttaaaatggttgagaatttgcaagaataggacaaaggtcaggtaatatgtatagaaagaagaaataatctacaaagtaatgaattattattttggttttgcttaaagaaaaaaaaagcagggtcataataagtgaaaagttcgccagcgcagggcttggccccttccttttctctccacacgctcagctgctgagtcttctcccaacacactcctagctggccatcggcagctgatgtctgcatgggtggacacaatcctcctggagggctggacctgacactagccctggtcccgctgccaggcagctccacgggtcatagctctcggctggctggaaagcagcaccttgtttccctgtgcacagccccactggggatttccaggaaagaaaaggaggcttggccaagaggggctgtggtaccactgcacccctggtccttggagtgtctaacagcaccgagtcccatggggtcccccaacataggagcccacttggctgcagagaggaaggtgtggcccactagatcctgttgttctgccccttcctggtctgggatgcggcaagaacaatagtttgtcaatacagcaaatattgactaagcagagtccctgctgggctctgttcaggctttcctgcctctggctgcccctgtgtgttcaaatgttcttttttgtctttgtcttttgcgttaagtgcaaaagccccaatattttaaactatcacttgtgcagaaccttgcgcttctttatgtggggggtttgggaagagtgccttagctctctgctcatcctcacagggattttctccttctgatgccctttgcctatatcctctgtatatgcagtgcctgcagccagcccctctcctgcagtagagaccatccaagcttgcggctacaacagcaaaataaatgccagggcaggtggacagaaatcaatgcataattgctcctcttctcttctagatgaataatttttgttggttttttacatactttgctttgatcatgaaagaagaaaggttgactccctctcctggcatggtggtatctgagctgcccttgtggtctgtccatatttgtgtcttccacccaaccgccggatgcctcaaggtgcccagggctgctgcagtcatcacgtctagaaagcttcctgagcccctcagctatgaggggtttctctgtcctgcagactcctgagacactgtgcctgcccctcccgacagcatgtggcactttctagcttgaatttgtcataagtcaggggcctgtttgattttctaggctaggtatcggctgactttttctgtaaagggccagatggtaagatttttaggctttatggttcatatgcagaggacctgctacgtaatgggtggggctccatgcgcaatgaaattacagggtttgcgtagtgggtggttggcaaagctttgttgaatggatggctgcaagagcgcatggatgggggatgcttgccctcaaggaactcacagatgtacggagcaggggttggcaaactcccatccataggccatttgtatgaattcttacttatttcaagatagtgacagcagatggtcaagatagtgacagcagatgttcaagatggtgacacagaccccatacaactatacaactgtacaggtcacatacccacgaagcgaacctgtattggcctcttggcaatgactccactctaatgcaaaagcagacagacaatatggaatgaatgagcatggccatgtttcaataaagtctgatttatacaaatggcctatggatgggagtttgccatcccctgctctatacatctgtgagttccttgaaggcaggcatcccccatccatgtgctcctgcagccatccatccaacaaagctttgccgaccacctactatgcaccaggcatgtgctaaccataaggccacagggagaagagaaagctattctctgtcctcatagacgcctcaggctggaggggacacagaagcatcatagtgcaacacgatatcagagacccaaggcaggagcctggagggaactgaggtggaattcatcctcacattcccacagaccctcataggcaggagtggaacagatacgcactcagtggcgaagtgaatcatgaatgaaagcgggttttgctgatgtagactctcgatcttggagggtttgttggaaccacagagaagagctgggtccagtcccacctgcgccttctatggctttgggaaaatgacttcatttccccaagtctcagcttccttgtcaggaaaacgggagcaagcaggtcccttggcagggtctgatgagaagatcaagtgaaaccgccccgtgaaggccccaaacccggagcctgacccctggatctacatcaccgagctcttgtctttccctggctcacacccatcgagctggagacacaagatcacaagatgtcgttaaagggacctgtgcaaatttgtaccacgtgaaagagcatccataagggaaccgggcacgccgtgtgcctggtcctcacccagggaggctttcactcattccttctgtggtggttcagtttctgttcatttattcctccttcctccctttctcccttctctctctccctccttctctttctccctccatccacccttctactttccctctttccctccacttctttccctcctcctcctatgtgttctgttttttcttttacaaagaacctgcatcatcttcccaatttgaagacaaaaaaggcagctctccttcacacccagatgaacagatgaggttaaatcagcgcaaggaccctggagctgttcttccttcttccagatgggcagaagccacagtccgggggcctcgtctcagtaaacggcaccactggccactcagacactgttgtgggctcctcccttgcccaccccttcacagtgggttctgcggattctacccttcagagaccccccccctctcccgcctccctctgctcactctcccatcttttttgctcccttcccactaatctcctctccccacccagggagtcctctccagacagaatcacaccagcttcttcagctacttgaaaaggctgccctgggcctttgaggtagattcccagcttctcccaggggcacctgcctgcacccgcctctccccgacgaccatcactggggtctcttttctggtcctcaaacttgccaggcccttcccagccctgggcctgcagtccgtccacaatgagactgcttctctcctgacagaggagatgatcagacctaatctggggtcatgctgccccagccttcccaggacccactacctcatcctgcatttccgtccttcacagcacagaccacagttggaaatggttctaacagcccaggtcctttcctgcctcctccttcctccctggactgcaagcttcatgggcaggggccacgtctgtcctctccctgagtgtctggcaccctgcagagggcctatcacagagtagccacagtgaatatgtccaacgaagcagtgagtaaatgatggaccgtgaggagggggggttgggtgccagtgaggggaccggtgccacacagattccctgggccccgggagttcaaggtgcttctgcaggcaggaaggacactccctgatgccagaggaggcttgctggccagtgtggatgtacgtcggaagcatccaaggaaattgatgcctgagagtcggctggcggcctggccagtgctcaggtgtgccctggtgcccggtcaacacctgtagtgacagcggcagtgacagccactgcgcctcagagcactgaaggggtctttggagactatcctgctcatctctgtaccctcatccccctggcttgggcacgaggtccctccctcccaccagtctcttggtccccactctggccctcaacggctcaccttgaatgtgtgcaatctagtaaggttgaactcacagaagtaaagagtggaaccagggcaaccagaggcaaggggatgggaaagagggaaggagaattgccaatcaaaggatacaaagtttcagataggcaggaggcacggggcctttccacttatagcacaccagagggactgcagtcaatagtatgctattacccatttccaaatagcagagaatttcaaatgtttcaaatgtctcaccccaaacaatgaaaggaggatgaggtgatagatatgctaattagcttgatttgatgataccatgttgtatacatatatgaaaacatcacattgaggcctggatcagtggctcacacctgtcattccagcacttggggagaccaaggtgggaggatcactcaagaccatgaattcgacaccagcctgggcaacatggtgaaactccatctctacgaaaaacgcaaaaattagctgggtatggtggcacatgcctgtaatcccagctactaaggaagctgaggcacgagaatcacttgaacccaggaggcagaggttgcagtgagctgagattgtgccactgcactccagcctggatgacagagtgaggctctgtctcaagccagaaacaaaacaaaacgaaaccaccacatcacattgaacctcgtgaatgcataaaaccacagtttgtcaattaaaacggggggtgtttctcttccttctgcctctgtgggatccttccagctggtggaggggtggccatcgactggatattggcctccagagatgtccatgttcccatcctcagaacctgtgactgtgtggccttacgtggcaaaagtgctttgtattaatagatatgatgacattaaggactttgagatggggagattattcgggtgggtcctaatgtcaccacaagagcccttgtaacacaagaggcagaggagagctgatgacagagaggacatggcagagagctgggtaatgcagccaccagcccagcgtcgctgacaccagcagaatctggaagcggcagggacggagcctgtgaagggaccagtcctgcggatgacttggttttaccccctaagattcactgtggacttctgacctccagggctgaaaagaatgaatttctattgttttcagcctctaagtgtgtgttcatttgttacagcagccccaggaaaccaacatagcagctccgagctacagtctgggctcaaggagtccggtttatgggctgagaagggagaacccgatacctttgcccagtcctcatccccggcagccacatcagcagccctggctggctctcggctccagatgccaatttcccacagccggtgacttccaaagcaataagcctgggctgcagcccccaaggcgtcttcggtcatctcaggccaagtgtttttggagactgagcaactttcgcttccctgagagggccagggcctcccacaagcaggacttggtttttgcttttgtttccctctgccctgagcaaaggtaccctccccacccctcctggtggcaccacctaggagccatttgcctccctccaaaaagctgtgccagcctgccttccccagaggggagtgccctcttgacccactcctccagtggccctaatctaatgagtggagtttttataagaagagggaaatttggacacaggacacagacacacagaggagagagaaggcccagtgaagaccgaggaagaggctggagtgatgcagctcaagctgaggaacgcctggagcccgggaagctcgaagaggcaggaagggccctgccccagggcctctagagggagtgtggcctgctcacactctcattccagacttctcacctccagaaccgtgggagaacacatttctgctgtcttaagccaccagtttgtggaaatttgttacagtcgttgcaggaagcgggacacacactgtccctccagagcacctgggcgccctcagaggcctgtgccgtggccgtgaccttcatggctttgaccctgatcaggctacagtgactggtgggttgaaagtttgctgggagaaaggattgaggtcatctgggggtggagactcctccctgccagcagccagcaccagtcaattcagctggcagcagcacttggccccaggaaacaccccctacaaatggctcttgaagcaaatgagccgagtgggcttttgagggctgtgaatgagtcagctctcccctgggcagggcaactgcacaggcccagctcatgggggaggcctcatctttgcgcagagcaggcctgtgtgcagagggaagagggtgcccctttgcctgcaaaggagggaaagcaccacaggacaaccccaccaccaggcatggaaggctctgctcgtgcctcatttgctcacccatcaccccagtgaagcttgtgccattcatgcatcgagcacccacaggggctgccagggacccagcagagccctgccttcaagaaacttaggatctgggctggacgcagtggctcatgcctgtaatctcagcactttcggaggccgaggtgggtggatcacctgaggtcaggagttcgagagcagcctggccaacatggtgaaatcccatctctactaaaaatacaaaaattagccaggcgtgatggtgggcgcctgtcttcccagctacttggagggctgaggcaggagaatcacttgaacccaggaggcagaggttgcagtgagttgaggtcgtaccattgcactctagcccgggcaacaaagcaagatttcatctcaaaaagcaaaacaccagaaacttaggatctggcttgacagagaggcggtcccacctccacgatctgtcagagcacggagcagaggacccaagtctgcccctgctatgctcgcgcccttcaagacccagacagggaggaaggaggccctattaggagaaggaggggaagcttcagctctggggtgtggtgggggttggggagcctgaagactcaggagctggattttggggattcagacatgatggagctgagggagtgtctgtccaggagagaccatcaattgagtcattttaaagtctcagtgctggcctgtcagggatcaggcagtagaactgggggtgggggagggcagaaggagccagtcaggaggggagtgaagtcagcatgttgtccctggggtggcagagtgtggacttcagaattggacctctgggcttgacatccggacatggactgaggtgcacaggcacctgcccttacccttagctcagcatcagagaaaggcgcctggtggagcggggaggggactgaacccagcggtcccccttgaaataaacattaaatccccaggcactgcctgctaattatcaacagttagtagggcctaaatgtgacagactcatctttaaagacacttcgggtcacacctgacagattttaaaatgtattcatctccctttggcaaccagaattggcgcttattcggatctatttcttctgagggaaatcagtagtaccttaacttttattgaaatcgattttctaagatcacaaaaagaaaatgcttcttaaaaaacccacgggtgtactttaattattttgaataccaacaaaaaaccacagagacccaaaacccagatgacttaacacaaatattgaaatggctttctacagacgaagatctttatgatgtgcctaaagctgtgctctaaggatgcgcctccgtggtggcagcttaaccacgtccagtgcaggcaagcaccacctcacctttccccactagcaagaagggcgtgttccacccctaggaagctcactgtcatccctcacctccctggaatcacccctgccctggcacacgtggccacaacagtgcctcctgcccagacctgactgtcactatttccaggtgacagaaatggcaactgctgttgattcaattacagactgcggacctactgtgtgcgagatcctgttccacatgctgggggaaaacagagtccccacctccatgtggcttaagtgtttgcagtttgatgaatgaaaagccatccaacccagatgggccctggcttgcggtagttccgctgaggattattcaactttacaaatgtgtcaaagcacgaaagcgagacaccttcagtagaaactgtacctcgggtacccacacaaacattctgtttttcacttccagtattcaataagttacatgagctagtcagcattttattataatataggctttgtgtgagatgattctgcccggctgtaggctaatgtaagcatttggagcacggtaaggtgggctgggctaagctaggatgtttggtgggttaggcatactcaatgcatttttgactcaacaatattttcaacttacaatgagtttattgagctgtaaccccatcataagttaaaaagaatctacatatggtttgtctgggagtgatgagtaccgtgaagagagacgaagcaggcaaagtgcatagaaagtgtccagtggagtgtgttgctgtcatcctgaggaggacttaggacacacctgactgaggaggtcacatttgagcagagagacttgaatgaggggaggccatgagtttcatggatacaggggaaaagtgtcccaggaagaggcagcagcaagtgcaaaggccctggggtggaaacacacctggtgtttgaggacctggtgttaaggtggccagtgtgggtggtggtgagtgaaaggcaaacgccctgggatgtgaggtcagcacagtggcagtgccagaccaggcagggcctttggagagtcgagagctggggaggtgcaggatccgcagctcagaaaggctcagcacttggtaagaagcctggaacagaactctgattcaaggtctgtgtgctcattgcaacctcctgactacagtgtgtttcatcaatttgagaaagtgaccctggtctcttgaatgatggcagcaagggtgatatcagtcgccactaccaccaccaccaccatcatcattactgttgtcatcatcattattgtcatttttatcatcatcattgtcatcaccaccaccatcactatcatcatcatcattgtcaccagcatcaccaccaccaccatcttcaccatcatcaccattgtcatcaccaccaccaccatcatcattattactgttgtcatcatcattattgttgtcatttttatcatcatcattgtcatcaccaccaccaccatcaccgtcaccaccaccaccaccaccaccaccatcatcaatgccatcattaccactaccaccatcattatgatcactgtcatcaccacctccatcatcatcatcattgtcatcaccaccaccatcattactgtcatcatcaccatcagcaccatcaccaccaccatcatcatcatcaccaccaccaccatcatcaccatcatcatcatcactgtcatcaccactaccaccagcaccatcgtcatcatcaccaccaccaccgtcatcatcatcatcatcatcaccaccaccacatcatcatcaccaccaccaccatcatcaccatcatcatcaccatcaccaccaccatcatcatcatcatcatcaccaccactaccaccatcgtcaccatcatcatcatcactgtcatcaccactaccaccagcaccatcatcatcgtcaccaccaccaccatcatcatcatcatcaccatcatcaccaccaccatcatcatcatcaccatcaccaccaccatcatcatcatcaccaccaccatcatcatcaccatcatcatcatcactgtcaacaccactaccaccagcaccatcatcatcgtcaccaccaccaccatcatcatcatcatcaccatcaccaccaccatcatcatcaccatcaccaccaccatcatcatcgtcaccaccaccaccatcattattgtcatcatcacaatcaccaccaccaccatcatcaacaccatcatcaccaccatcattatcatcatcatcactgtcatcactacctccatcatcatcatcatcattgtcatcaccatcaccactatcattactgtcatcatcacaatcaccaccaccatcatcgccatcattgtcatcacctccatcaccaccatcaccatcatcatcatcatcttcactgtcatcaccattaccatcagcaccatcgtcatcattgtcaccaccaccaccatcattattctcatcatcacaatcaccaccaccaccatcattatcatgatcatgattgcagcagacaccagttcttccttcataacaggcatagtgctaaggtgttggatgctactgtctaaccctcactaccaccttataagttgtacattctgtcacatgcccttgtttggatgagaagtctgaggaccagagaggtgaagtaacttgcccaacgtcatccagctggcaaggagaagagctgggcatggaattcagatctgaggccaaagctgtgttctgaggcacagctccagcccatgtggtttcctgaacagccatggaaggcttttattttcattttcttgtccatcttttttcctccaactgagaccctcagatgctcagatgtcactggagcccagcatttcagcaccaagtccttgcagctgtctgtcccaccccacaactccctggctcaacagagcttccctgctgcccttggagtgtgcctgtgtggtccctgtctcacaagctcatagtcaataggagaagcagacaagtctatctatgtgcccccctgctaggcccaggtcctcctttcaggggaggcagctcgggcggtgggatccgcctatgtctgtccaggctgtcagcggggctttgtgcctggtgaccatccagacagaggcagctctgcaagctgctgagagtggtggtggtggcgaagaacttgggagcccgagtcaaaatcaaggtctctgagcccgagtttccccatctgtgaactggggagagggccacaaactccagcttcccaggggtattgcaaggatgaaagcagacggtgcccagggagcccttggcacagtgccaagcccatcactggcataagaaaccttagctgggaccactctttgggccactgtctgaagctccgttgagaagagctattctctgcaggggaagcaggtctagcgggcgaatgtcttctgcccggcactcactccctcccttgtgccgttcttgtcctggttttccttaaggaaacaccactgccccctttcagcccatgtggtttatgggctatgtgtccccccgctccagatggtctcagggatctgctagtgggtacacacagctaagcatcccccaggccattgcgactcatttagggagggtcaaagacctcaggcaggaccgtcagagatagccttgggctccctgctggagtgcccaggggcaagctctctgtccactggggctgcccaaggtgaaagccaggagctgtgcctgccatctggacactaagagagtagtcctgagggtggacccaacccaaagaacagcagagccaagaggaggagagagatggagatttggaaacattagacccccggattcagctatgtctgaagctggtcttgggttttctgtcttttacaacccaagcaatcctggatagtattggtaggttgcagtgaaccacctgcattttctcgacaagactttggtaaacttgaaatccctgaaatgtaaagcacagagcaactacaggccagtcttcttccccatcctcttctcaccactcttttctttctttgattcttggcccacacatggctgggataaagacacacactcctatgcagatgctgggaaggaaaggtacattaacatggcctttattgtttaaccatctactgatggtttaaatatttggcatttcttaaaagaaacagatcttccccaatgggcagccttgcagtgtgagcatgaggctacaactcctaaaccaggacagaacaaaagccaacttccctaagccctgatgttggcagcgactagaccatctcagtactgggccgaatctcacccctagaagtaaagaaagtgcccctactcccacccaaaatgctccatggtcatctacatttggggaaggctatattctgcactgttggacattcattgtgttggcatctaagaagcctctgacaagacgtgccatgaacaaatccactagacatggtttagcctgggatctcccaaatggcgagctctggagggcagagactgagtctgacttatacatggccatgctcctgctaaatggagtcaatgcggaaaggtgcaggcactaacacatgccggtccaacaatgattaagcctcagagccatggcatgcatttcccctcatctcccagcgcacgagtttcccactgtgcagcgggagatcaacaaagcttagtggcttaaaacagcacatgattattatcttaaattccagaagtccggcatggatctcactgggctaaagctaaggtgtcagcagggctgttccttctggaggttccagggagagcttgtttccttgccttctccagcttctagaggccacctgcagtccttgccttgtggcccctgcctccatctcaagctggcagtgcatccctctgacctctgtttctgtcctcatgtcttccccgactctgcttcccctgcctcctcttacttataagctccctgtgatgatgttgggcccaccagatagtctggggctatctccctgcctcaaggtcagctgattagcagccttgattccatctacagccttaactcctccttgaagtgtaataaaagagattcacgggttctggggatcaggacacagacatctttgggggtcgtgattctgcttgccacacccactaagtgaacacactcaaatttgggggaaagcaagctaggtgaggctggctctatggggccatcagtggcttcactcttgcattcttttttttttttgagatggagtctcactctgttgccaaggctggagtacagtggcatgatctcggctcactgcaacctccatctcccgtctcccaggcttgagcaattcatctgcctcagcctcccaagtagctgggactagaggcacctgccaccacgtccggctaatttttgtatttttggtagagacggggtttcaccatgttggccaggttggtcttgaactcctgacctcacgtgatccacttgcctcggcctcccaaagtgctgggatgacaggcgtgagccaccacacccggcttccattcagtaagtccttattgagcacctactgtgtgccagaaccttgatgtgtgctgaggtccagagtcgtgaagaggccataccaagaccctaccttcatggggtcttttggttaaaatagaggcaaaagcagacagatgaatccaagttgaataagtcccagagggtgagttgggccttccatgggcctgtctcggaaagcattttttcctctgggatttctgcccaacgtgagatgtcaaagcggcaggaagtggagcaaggagggaaggggcccaaccccagggagaagcaggactctctcagtttgggtctgatctgagcacacagcagcacaccttatgcttggtttcgtctgctcctttttttggacattctggtctttgggggaacaagttcttgtgtgacagcagctcagttttaaaatactctgcgcactctttgggattcagttcgcacgctcctgcctgtgaatgtcacaggcagtgggatgtgaaggggctcctggcagggcagtggacacagagggatgagtttacagggctctggcttcagtctctggagccttcctgggcaagagcctggctcccgaggccttgcccagccttgggctgatgtttaacaaatgtcaccgctggaatttctcagacgatcgacatgggaaaaaccgaggaagagagggaccaggaagtggatgcattaaaaataatgaggccgctttaaatggaccaggttccgggggacaatgggaaccacgtcctcagtttatttaaaaatacactttattttccattctgtttctgtttaatttcttctgatagagctaaaaaaaaaaaagaaacaacaacaacaaaaagcactctccttattctaaaaactgaagttggtatatagctttacaaagaaaaagaaggggtgggagtgaaaagtataggtcacgacagccccctgcaaccaccacgctccctcgcatgcacgaggcctaaccaacgttcgtcaagtcagtgagcacgttggcatttggagtttaggatgaaacagagctttagtcttaagcgggatgacaatgtttggcatattaggaagttctatcatttttctttctctttttgctgatcaatattttttctccactagataattccatggggacaggaggattatgggcatgcgtttgggagcgtagaagatgggggttcgaatccctcctcccccttggcagctgagtgagtttggatatgagtcattcttccttgcagaagaaatatgaattcccacagcgagtccacgtgctcacttatggcctgtctgtaaaggacgcacccagcccgacgcccgcagcgaagcacctctcggtaagtagcagttacgaccgcgaacgatgactacgaatgagaggctgaatggtcactgggcctgtttttctaaaaaggttagctctttgtttgttttgaatagtccagccttttgatgcttggagaatgggaatgcgtttcgggcttgtttctgggtttagttctctgctgagacacctctgggaggcttcctctaagtctgccccctgggtctaaactggcacccacacccagcactctgtccccctctggggaacccatgtcatcccaggctgtcgagatggactctgtgggattgggttaggctgaagcttcacaccgcagcagcgaagaggggtgtggagtgtgttcttggggttggtagggaggtggggacaaatacccgtctggtgacccttggccggacccactgagctgggaaggaagagggcctttccagctgtctgagggaggtgctgcttttcctcctcctgccaaggctggagagaggctcaaggagccccaggggctgggggagggtggaccagtctgactctttcttcaaaggcatctggcaagagggtggcataagtgtcctgtgcagtggagtgcggctgtcctgagtgagaactgaccccaccaccagcagagatgatgagggtgggtggtgaggatggaagaagggtgtgggggatttcctgtggataggaagtgggctgttgggcaggaactggcaggagtgaggggtcccaagctttcgctatcagacacatgtgctcatggggtccaatttggatgttttcattaccccatggactaaacaatccacaagagtaccctcaaatgagtcagctttaaacatctgccccagctggggggatagaagcccaccagatcacctagcgcccgcccaccaagcctgacctccctgccctgctggcctctccccaaccttggagggtccgggggaagcctagagattggggaggggagagggaagagaagcagaagcagagagacccagagccaggggccctcggcccccttcccactccgaggcctcagcctggggctggctgggccggtgaagccaggaagatgacggttttcagtgaagacgtgcgtgggactggacatttcagtgatccacatgagaccatgtttttgtgattaaaagtggctgggaaagctttcattatgagacgaccaggaagtcatgaggcctgccctagaattacccaaggggctgagaagagccagccccagacagtggtgggtgggtaaactggcccttggaaagaaaacacatgaaagctgacttagagtgtttgccaattgcggaggtgtaaaccttcccatcatggcccattttaagctcccagggtgatgtcactgaatgcatacttgggaagatacaattggctcgggtgagctgagtcctggtgagcccgtgtgaattgggtgagccggctcctgcacacccagagggcaggtctgaaggggcactgggggaaaacctggaccatttcctgcggcaccctctcgagtcctgttccttaatgtaacggtttccttgctttctttccctttagaacatccctttcctcctcacattttatgtttgcatgcgtgtgtgcatgtgtgtgtgcgtgcgtgtgtgtgcatgtgcatggcatgtgtgtagcgtgggttgtgagtccatagacgggggagtgaatgtgtgtgtgtgtgtgtgtgggggggttcttctttccctcccctgcatcccaaggtgcaggagaacagcacactattttgatcactgctaaaccccttccacagaggcctgcttaggtctggctcagaacaggctctcaacatttgttgaacgaatgaataaatgaatgaatggggcacctcctccaagaagccctccctggcacccaggtgaggacaggcccccctccgccacatggctgcacaatgccatggactttgcgtacttattgccgcaggattttctcccttccatggactctaactgtgtgtgaacggctgggaggaagctcctctgcagctgagactgaggctgcctatttttggccatgtccccggtactgagctccatgcccagcacttagcaggtcctcagtaaatattcccaccagatgaacagatgcataatgaatgtgtggtctcttgctggcacagactcaggggatgggcttcagcctgaggcccaggtttgttcttcagtctttccgttgccttggagtatctgtccgatgggctacatcctgctgcagcaacagtcatgccctggtcctcagaacttccaaaaacactttattttctgcttgtgcttccaatgtccaagccaggttgggagggggttctgctcagtgtagtctggaagggtctgggcaggtggtgcagctacggtcccaaacactgtcaggcacagagagtgcagtggagtctagaagcagcggagaactgctccagctcagaagcgagccatgtcacctccactcacggcttgagagctaggaccagctcacagcccacctgcccacaaagggccaggaagcaccatccatccatgatgctggaagggtcttgaaattctttatttttttttcatagagacaaggtctcattctgttgcccaagctggagtgcagtggtgtgatcacagctcactgcagcctcgacctcctggactcaagagatccttccacctcagcctcctgagtagctgggactgcaggtgtgtgcccccatgcacagctaaatttaaaattttttttgtagatatggggtcttgctctgttgcccagactgatctcttactcctgggctcaagagaccctcctacctcagcctcccaaagtgctggaattataggcatgagccaccatgcctggcctcttcataagttttgagcaaagcctgcatttttgttttggactgggccccacaaactatgtaactggttctgatgggatggatggttggggaagctgatctttcttggaggggattgaggaaaactctcagagaccatcagggaaagggggctggagttgcaggcagggggtagctagaacctgcccatgagccactgaggataggcatatgggtttgtttgtgtaaaaggcttcattaaaaatgggaaaataggccaggtactgtggctcatgcctgtaattccagagctttgggtggctgaggtgggaggattgcttgagcccagggagttcaagaccagcctggacaatatagtgagaccctgtctccacacaaaaataatttaaaaattagctgggtgtggtggtgcacacccgtaatcccagctactcggaaggctgaggtgggaggctcccttgagcttgggagtcaaggctgcagtgagacatgaccatgccactgtactccagcctgggtgacagagtaagacaaaaaagaaagaaagaaaggaaggaaggagggagggagggagggaagtaaaggaggaagggagggagggaaggagggaaggaaggaaggaaggaatgaaggaaggaaggaaggaagaaaactgttgcccaggctggtcttgaactcctggccttaagtgaaaaaaataaaaatgaaaatcaaaatgggaaacacgctctgggctgaaaaagaatttcatttgatccccaaagagtttcctttatgattcattgtgtagactttttgcagttccgttggggtaggggaaaaagaaaccacaaaaactgtaagttcacaagaaaagcattattagggcgtctggcctttgttcggaccgctaagcctcatcctcctccggatggggagagaagacacaccttggcccgcgtgggattttgttcattcatcaaacaagtatttggctgagccctgctctgtgccaggcatctttctaaggaagtgggcagtgagccctgcagacaggaatccttgcccccggcagcctggattctagaggggaagaaagaccgggaaaagaaagaaagtaaactaagtagaatctctagtacgaagcacagtgacacttggtagaagagttaagcaggggcaggatgtctgagggacagagggctgcagtgtgagacaagcagctgggaaatggcctggtttagtcacagatcttggtagaagccctgtatcgatagcagattccctatctcctttgcccacaatgtctagagtgcagccagattaagggtgagccccacagccctactttggggcctggcttgagccgtgaccctctgcaactcttttgcagaccctgaggtccctggcgggattgtgcaggaagacaaatgaggctgccactgaaatgcatgccccgcgctcccaggagctcccaagcctgacggtggcagagcggagcccctacagcgtcctagttttagctctctctgtggaattccccatccgcagcatcccaggctggccactgtcctgtgaccacaatcacatgaccccagaggggctgaggaatggtgcttggaccacctcatcttctcttcacttccagatccaggttcaacagcataggtaagccgccaccatatccgattgctggttttcactcccatcacgcattctcaaattccattacttttgccaaaatgcacatagaaattgcaaggacgtcaggcctggcacggtggcttatgcctgtaatcccagcactctgggaggctgaggtgggtggaccatgaggtcagcagtttgagaccagcctggccaacatagtgaaaccctgtctctactaaaaatacaaaaattagctgggcgtggtggcgtgcacctgtagtcccagctacttaggaggccgaagcaggagaattcattgaaccaaggaggcagaggttgcggtgaaccgagattgcaccactgcactccagcctgggcaacagagtgagactccgtttcaaaaaaaaagaaaaaaaaaaagaaagaaaggaaaagaaatcccaaggaagccaagcagttcatcgtctgcacccctgttgctgtaaggtctaccagcgcagatggcagggaggcaggatagtgtgtccgggaatggagtgcattgctcacggctgtgtggctgtggacatgtctcagcatctctccttgtggagtcgcgtggaccctgcccagcaccctctcccaggcccttctgggtcccttgtggggctgcaggatgacgtatccgaggacctggggaccacagctgctgcagtccctgggtgctcccatctttcccagtgatgagccaggagccgaggaggtgatctccgaccactcggcacagtgccctagacagaggtgagaagacagcttgggcaaaagtagctctccagatggcccagtgagccacgtggaagtggtgacaccagcaggagcccgtatcagagtgagctccaaggcagggccaaaggaaagtgcagtcccaccaccctcagacacatcaagaacagggtctcctctgccccacccgcccagggctgggctgcctccgggtcagtgagtgagcacgccgggtgacacttcttgcgatgaggctgaacctgcgctgggccatatcccggtgccttctggatcatatccccctgagggcagggagcacctggattgtttaaaaaaaaattgccctgcacagagtaggtcatcaatacataaatatctagtcactgggcccaaagaggagggaaaacatttcctgagaaattaactctctggtatttaacctgcctttctctgtggcttggggattttcaggtttttcagcagacaatcacaaccatgaaaacgcccaaaatggctccatgaatggaacgataaaaagaccaaagagatggacactagcacaaaaacttacgagccaaaagggacagtggcctgccgagccctgggcacaattattgagaattgctattggtccacgtgtctccatccccccggcctccaccctagacctggccacctcttctctcccctggattccctgaagcaccctcagtctggccttcccactcctgttgcccactctccatgccatagccaaagcgatcttttataaaggcaagattgtgccactgcattccaacctgagcgacagcaagacccagcctctaaaaaaaaaaaaaagaaaaaaaaaaaacaaaaacaaaaataaaaaaggacaaacaagtactgaggatgcagagcatccggaactcccttgcagggctgtgggagcatcagctggaaccgctgctttggaaaacggcgaggtatcatttcttagagccgaaactgtatgaacccacaacccagcaatcctgctcccagcatactctcaacaggagtgttcccagacgttccccaagagaccttcacaagaccaccagatagagcagcactgctcccagtcaccccaaacacccacagaccagcagcagcagcctgggcaggccacgtgtggtggactcccaagtgcaagaggactcggcagtgacggtgagtgaactagaactgcacagagcagcacggaggaatctcgggagcagagggcttgcgggaaaggagtcgggcacacaaggataagctctgcaacggcattgatgttgacatcaaaaccaggcaaaactgctctatggtgttggaggcaaaggagcggctcaggggcggggagtggggtgccctgaagagctcctgcacgttgtccttggtgggggggtgggggggttgcaatcttttcctttatcttagtgctagtcacatgagtgagttcacattgtgaaaatacgctgagctcctaaggagtgaattgtgcttcccccccagttgatatgttaaaactctcacccgcaatggaactgtatttggagaaagggcctttaagggggaaactgaggttaaactacggccccatgggaccctgatcagataggactgtgttcttataagaagaggaagagacaccagagatctctctctctctctctctgtccgtgcacagagaagaggccaagtgaagacccaaggaggaggtggccatctagaagccagggagacaggcctcagcaggaaccaggcttggcagcgccctgacctcagacttccagcctttagagctgtaagacaacacattcatgctgttgaagcctagtcagtgacactttttcttttcttttcttttcttttttttagatggaggctcactctgtcacccaggctggagtgcagtggcgcgatctcggttcatggcaacctccgcttcccgagtttggacgattctcctgcctcagcctcctgagtagctgggacttgaggcatgcgtcaccacacctggctaattttttgttttgttttgttttgttttgttttgttttagtggagacggggtttcaccatgttggccaggctggtctcaaactcctggcctcaggtgatccccctgcctctgccttggcctcccaaagtgctgggattacaagtgtaagtcaccacgcccagctgacactttgttatggcagccctcgatgaccaataatgtatgcctgggacatgtgtgcttttctctatgtatgatagattcaatcaaaacctccttttttaaaaaaaaggcaagcctggtgtggccctgctgtttgcaatcttcccctagcttcttgtcttctcttaagatcaagtccaaatttgcaacgtgatcttgaaggccagtatgatctggcccctgttggcctctctagccttggccactgctgtggctacactgacctcatttcagttgcttgaacatgccaggcacttcctgcctcaggacttttgcactgctggcctctctgcctaacacactttctccatgtttttgcccggcaagtttctactcatccttcaggtcccggattaaatgtggttttttgttagggaggttttcctgatcccacattgggtcagatccctctggtgtaaattctcaaagcacctgcccttttccttcattgcgcccctctcagttggaaataaatgaaatattgttgcctattgtctgccttccccactacacagtgaactttctgagggcatggttggtcttgttgtccagtgggaccgccctgctcactgtgaatgaaaggatggatggatgaaaaagcaaatgaatggatggacgtgtggatgaatagatgaaataataatagatgtatggatggatgaatagatgggcaaatggatggatgaatgtgtggacgaatagatagatgaaagaatggatggatggatggatggaataatggatggatggatggatggatgaaggaaaggacggatagatggaataatggatggatagatagatggaacaatggatggatggatgactagacaaaggggatggatgaatgtgtgaatgaatagattgccagatgaatgaatggatagatagatacaacaatggatggatagatagatggaacaatggatggatggatggatgaaagaatggatgagtgaatagatgtacaaatggatagatgaatttgtggacaaatagatagatgaatgaatggatagatggatggagtaatgggtggatggatggatgaatggatgaaggaaaggatggatagatggaataatggatggatggatggatgaaggaaaggatggatagatggaataacggatggatagatagatggaacaatggatggatggatgggtgaaaggatggatggatgaatagatggacaaatggatggatgaatgtgtgaatgaatagatagattgctggatggatgaatggatagatagatacaacaatggatggatagatagatggaacaatggatggatggatggatgaaagaatggatgagtgaatagatggacaaatggatatgtggatgtctgcatgaatagacagattgatagatgaatgaatggttagatccaacaatggatggatagatagatggaacaatggatggatggatggatggatggaaagatggatggatggatggatagatgggtggatgaatagatggaaaaatggatgaatggctggttggttggatgaatggatggaggaatgaacttatggaaaaatggctggattggtggctatcaattctcagtaaatagatcttccacaagtaacaattcttatttacaacgactttgctattacagccatctattgatcctttgaggtgcgtggatgctgcaagaatgagtcaacactcagcactctgcagattttcaggggatgatctaagaatacacttccaagctttcatcgatgaggcaaatagtggacctcttcaaatatttatgttcttaaactgctaatgtttggaaacacctagaaaatactcctaactgagatgcttcatcttagaatccctacatgaggccttccagctatatagaagttgtagaggtggggggttgtgggagagtggaatttattgaaaatggatgaaggatatgtccccagtaccagagtgggtgatgtgaaaagattctggtctgagtacctgggtgtgtgggaagctggcacatactggcagcatggctgctgtgggtaccagaagcccaaagggtgctcctgtgtgagctgcaaggtcagacaggcagagatggggtaggtcctaaactcacctggctgacaggcactaaatgtcctgacacccacttaactgctgaaggacacttcccatccttccctcccctgctcactccagccaaactccatgtctctgagttcctccaccctgctctccactccccgaccccaggccattgcacacgctgttccctctgcctcgacacccttcctgcacctttctgcctaactcctactcattctgcatgttgtgagagtaaaggtcactccctccaggaggccctcctgtactcttctacatatcatgtcagactctcccccaaccaaatcatggcactgggcacatcccttgtatattctatctgcattcacagagcagtgtagacatctgttcaggcactgggtgtgcagtagtgagcgagacaggcagtccctgccccagggagcacacatggttgtggaggaaacagtagccactataaatatgtggtaagtcttatggacaacagagaaggggaggagaatcctcagaagatgtgggaggttgaggaaggcatctctgaggctgtgccaagtgagatgggctgtgcccctctccagaggagcacatcccaggcaggaggaatagcagggaccaggacccctggtgggagcgggggctttgagtgtttgagggacagtgatgaggctactgattccattgctgtttgagtcactgtctgtccatctctcccatgatgccccaggcctctctgcagcccctgtctttgtgcagcttcctgtataccactgagcccctcatctgcctaggatgcaagccctcaggccttgctatggttagtccctcaagcctcatgtttaaatgtgatccccagtgttgcaggtggggtctaatgggaggtgtcccggtcacaggagtggattcctcatgaatatatctgtgccctccctaggggtgagggagctttcactctagtcatttccacaagagccactggttgttaaaaagagccagtactgggtatctacccagaggaaaagaagtcattatgtgaaaaaggcacttgcacacctgtgtttatatgtttccatgtgtgcaattgagcacaattctcaattgcaaaaatatgaaaccagcctaaatgcccatcaactgatgagtggataaagaaaatgtgatatatatatatatatatacacacacacacgcgcacacacacacacacacacacacacacacaccatggaatactactccgccataaaaagaaatgaaataaggatattcacagcaacctggatggagttggagatcattattctaagggaagtaactcaggaatggaaaaccaaacattgtatgttctcacctataagtgggagctaaactatgaggatgcaaaggcataggaatgacatcatagactctagggacttgggggaagggtgggaggagggtgagggataaaagactacacattgggtgcagtgtacactgctcaggtgatggctgtaccaaaatatcagaaatcaccactaaagaacatatccatgtaaccaaacaccacctgttcccccaaaatattgaaataataatttaaaaagagcccaacacctctcccctctctgcctttctctctcatatttatctgcacaggctcatcccctttgccttccaccatgagtagaagcttcctgaggtctcaccaaatgtccagtcttgaccttcccaaccattgaaaccatgagccaaataaacctttttatttgtgaattacccagcctcatgcattcctttatagcaacgcaaaatgcaccaagacaggccttttcaaaaagcttctcaaaatcctctttcctcccactgccctgcagtgtggctggacccacatgaggatggagaactcaggtccagggaaagaagaagtcacttggtacagtcagacatgacagcagcagatgtcagaggccccaggtgatgccaccagggactccagtcatggagcactgttcacctgcctcctctgagagtttcaaggaactactctggcagagctgctatcctccctccccgagaaagagatgcttgacctcacacaaccacattcgtagactgtccctgatctgtgggctcccagctagtcttggctcgtgctcggtgacatagggagagaccactccactgtgtccctttgtcctttgatttccaaattggcataaattctgctgggtgttaagagaaggaaataataaaaacctgctaaggacactccattgtctccagatgaccaggaatgcgggaaatgtctgtggaggtcctaaaaggactctccgggggccaatgttaacctcatgtggaacaggccttagtctgcctggaaactctgaggctgggccacgctcatcccactgattcctcgacattttcccattcagatgtgtgggacacaggctgcatccatgtgggtctcctggacaggtacctgtgctcctggagtgtctgtgaaggtccccactcaacaagagggaagggagagccggccttccctatggccagtgacctggacagcattctggatggcacaatcactctttgtaaggtgtccatggtcatcatgtgccacaaaatctaaagggcacttgtttcattaaaagttgggcaaaaattgaagcagtttgaggtgcatgttgccaaagatgaaggcaaatatcacgccttaaaaaaaaaaaagagctaaaggagtaaaacagttggcactggcagaaagaaagacgcataggccaatggaacagaacagagagcccagaaataaaccctcctggacatggtcaaatgatcttccacaaatgtgccaagaccactcaatgggaaaaggacaatctctttgccaaaggtcgctgggaaactggatattcacatgcaaaagaatgaagctggatccttaccttacgccatatacaaaagtgaactcaaaatggattaaagacctaaacataagacctgcaaatacagaactgctagaagaaaacacagggcagaaacttatgacatgacttggcattgtttcttggatatgagaccacaggcacaggcaaccaaagcaaaatgagactgtatcgagctcaaaaacttctgcacagcaaaggaaataaacagagtgaaacggcaatttactgagtagaagaaatatttgtaaggcatatatttgataagggattaatatctaatatatataaagagctcctgtaactcaacaacaacaaaatcaaatactctgattttaaaatgagcaagagaattaatagacatttctctaaagaaaacacaaatggtcaagaagcacatggtaagatgctccacatcactagtcatcagggaaatgcaaagccaaaccacaaggagataccacctcacacccactgggatggccgctattaaaaaaagtaataataacccgaagcataaaataacacgtttggatgaggatgtggacaaactgaaacatttgtgtactagaggtgggaatgtaaagtaatgtcactgcagtggaaacagcatggaagttcctaaaaaaatgaaaaattgatccagtaatcccattgctgggtgtctccccaaaggaatttaaagcaggatcccaaagaggcatctgcacacctaggttcgttgcagcgttattggaaatagccaggcaaggggtggaaacaacctaactagtcatcagctgatcaatagagaagtaaaatgtggtctaccatacaatgagatattgttaagccttaaaaagaaaggaggtggccgggcgcggtggctcacgcctgtaatcccagcactttgggaggccaagatgggccggcggatcacgaggtcaggagatcgagaccatcctggctaacatggtgaaaccccgtctctaataaaaatactaaaaattagccagttgtggtggcaggcacttgtagtcccagctactcgggaggctgaggcaggagaatggcgtgaacccgggaggcggagcttgccgtgagctgagatcgcgccactgcactccagcctgggtgactaagcgagactctgtctcaagaaaaaaaaaaaaaaaaaagaaagaaaggaggttctgcaatatgctaccagttgaatgaactttgaggatattatgcgaagtgaagtaagtcagatacagaaagacagttactgttggattccactcatatggggtatctaaaacaaccaaactctcagaaacagaaagtaaaatgatggttgccaggggctcagggagggggaagttgctgttcaatgggtacagagtttcagtatgcacagcatcatgtgcatacagttaatgcacagcaatgtgcatacagttaatactattgtactgtacatttaaaatgattaaaatgggccgggtgtgatggctcacccccgtcatcccagcactttgggaggccgaggcgggcggatcacctgaagtcaggagttcgagaccagcctggccaacgtggcgaaaccccttccctactaaaaatagaaaaattagccagacttggtggtaggcacttgtgatcccagctacttgggaggtcgaggcaggagaattacttgaaccagagaggtgaaggttgcagtgagccaagatcgcaacactgcactccagtctgggtcacagagtgagactccatctcaaaaaaaaaaaaaaaaaaaaaaaagaaagaagaaagaaagaaagaagaaagaaaagaaagaagaaagaaagaaagagaaagaaagaaggaaagaaagaaagtaagtaagaaagaaagaaagaaaagaaagaaagaaaggaagaaagaaagagtgaaatacaggctgtttgagagatcagcatttgtaggccagggtctgtgtgtggggttcagggcagagagcagaggtaggggaggtgggtgggcaagcatcatgtcagcctgggcgcgcccaccccaggcagtccctggacttgcaaatttgcttacagggctggggtcaagttcagataaggaagagctgtaggcaggaagaagccatgagggataaaatgtcatgatgggagggggaaaaccaggttgacaatgggaacacacgcttgggtggaagaaagttttagcatcaaattggatgtgaaagtcctggactagttcctgctcactggacaacatgcccagtggggaaattggcttgcaggtggagatgggcatcctcactcctgagatggcacataagacagctgggtaggtgtgtttagggaccggagcgtgtctccacgtaggtaagagctgaagatgtctcttcccacaaacgtggtcattggttgcctagctggttacacctgccaccccagagtttgcaaagcttgtatgtgttggtgtttatttccccagactggtgcaaagtgttttacagactgaaaagtggaaatggatttatcacttggtccacaactgttctattgctgtcagttaaaagaggaagagtcttcacgtaattactactaaaaatgatcagaatccatccccagacaggacagacgtctgctcttaacaaggagtcaaaagccacagctttggtggtcgagatggagagacactttaaaggctggactgtcccttctcggtcagtcccaggaatttttccattttgaattctttggagctggtaaactcattggattggtcaactcacttgtgaatcgtgcacaggaaataaaatgagggggagaaagacatggctttatttatagaaacctcattttgctattcatcgaataaataaacacaacccacctcacactaaaaatatgcctctgaagatcaacaatgaggccatgtttggctgactccacagaggagcggagattgcaaaccctaggaatttctcacagatgtgtcctagaataattcaggacagtgtgccaacaagaacgttttatttccattgacattttaagcaacatgccatctcctccctggttctgaagctggcagagaaaagccttatgctctgatatatcagtttgggctgtgtgacttctgccatgttacttcacctctctgaaccccagcttcttcacttgtaaaataatgaaaatgatatcaatctgtgaggggatttgggtggagtaaatgagaacataaacacataataaagttctaaagactaaagagatgttcagtagccagtggtgacatttgtaatgcacccatgataagaatgtttctgtcaccaattttttttttttttttgagttggaatctcgctctgtcacccaggctggagtgcagtggcacgatctcggctcactgcagcctgcgcctcccaggttctagcaattctcctgcctcagcctcctgagtagctgggatttcaagcacctgcaaccacacctggctaatttttgtagttttagtagagacggggttttgcaatgttggccaggctggtctcgaactcctgacctcaggtgatccacccacctgggactcccaaagtgttgggattacaggtgtgagccacagcgcccggcctctgtcaccaattctaattccccaagtcaaggactgttcaaaggtgcgctagtgtaaatcaacctcacttgtgcccactgtgttaaatctctcccagtagcactgaaagcttatttgccaagtctagaagaaagcagggcagccacacaaaagatatctccattgctccacgatattttttgagggcagtgtgatggagaagcctgtggctgcaagctctgagagccaggagatgctgcgtaacgtcgcgacacgctttattctcatagcccccatctgacagtggcctggaaccctgtgttcccactgtgtggatttgagcactggctccaccacatcacaaccatgtgagaggttgcctcaccttaaattggggaaggagcagtacctccctcgaagggcacaatgactagtcatgagatggtccctgtaaaagtgcacatataagcatccggcgtgtggtcacacacagcaaatattagccattgtaatttctaatagctgtatctttttgtaacctgttctttttgcacacactctctctcatgtaactgtgttctggactacatctcactactctaaagctcacgtctagcacagaccagatgcttgaaaaacatccagccaacaagatgggaacacagcgctgcccttgtgaagacaaagtcaggtggggtgcagggtggtgagaccactgtgtgaggacctggggctttgggggccgctgaaggagcccctggtgggctcctggggactgggaagaggttatgagggaggtccaaagggtcggagcaggaggaaaagtgcctcaggctgaaggaggagctcgtgggtggtctggacgggacagtgtgcctggattcttccagaagtggggagaggctgtatggttggcacgtggaggctgggagaacatggcaggagctgagggccaggatatagcagcctcacactattccctgtggggtgtccacaggtagccatccagtccctacttagggtcatttctttttcactgttctatgtgaaacagtctttatccacctgctcaatcaattctgtaggatatgtttctaggattggagtgatttgatcaagtggtaaacatctgttttatttactccatcctctccatcaatacaattacctatccatccacccattccattcatctacccatttatccatccatccatccatccatccatccatccatccatccatccatccatccacccatccatccaccaacaatttattaagccccagctctgtgctaagcactggacataaagggtgatatgccctcccagcacagagtaagcttcctgcagcctgaagagggctgtggaagggaacactttccatacaagaatgccctgcatacaggaggtacacagtaagtctgtgggagaattggtgacgacatgctgccaagctgtcctgagaccagtgggaccatatcagagtcaggagacagcttgttttccacaggctgaaccattgtaatattgaccgattttgcctgtttgatgagcatctcagatcctataatgtggatttctctgattatgagtaaagctgtcttttctaaatagttagccattttggtggtaagttgcctattgtggtcatgccgattttcccattggtgtgttggtctttcattttaaattggtctgtaaatatgtgtattttagagtgataaaaacaattctttattggatactcagcaaatagttacccccagcttgatatttttctttctattttgtttacggtgttgtttctttttttctaatctgtggaagttaaaaatttttcctcgacagtttttgggtttagtattgtgctcagaaaatccttcctgaagataatgtaagtgtccatcttattttcttctagaatatttataattttatttttatacttaatgattttgttttttgcactcagatctttactttgcctggaactcactttggggtattaggggtatagaatcagacaggaaccagagtttgctttaccctcaatggttgttggccgtttccaacagaggaagtgctcgacggcacccatgacttctttaaagctgtttcctgacctatatcttctaactgaattagaaaatgcagtcatgcaccacttaaccacagggactctgagaaatgtgtcattaggtgttttcatcatagtgtgaacatagagtgttcttacacaaactgagatgacgtagccaccgcacagctaggctgtatggcgtggcccattgctcctaggctacaaaccttcacagcatgttactgcactgaatactgtaggcaacataatcgtaagtgtttttttggtgttttttttttttttttggtggagtctcgctttgttgcccaggctggagtgcaatggctctatctcggctcactgcaacctctgcctctcgggttcaagcaattctcctgcctcagcctcctgagtagctgggactacaggcacatgccaccatgcctggctaatttttgtatttttagtagagatggggtttcaccatattgggcaggctggtcccatattgggcaggtttgggatcctgacctcatgatccacctgccttggtctcccaaagtgctgggattataggtgtgagccactgcgctcagctggtaagtatttttatatctacacatagaaaaggtacattaaaaatatggtattacaatcttacgggaccacctaagattgtaatagcacagattgaggccatccaatcttatgggacggtttgggaccaccgttgctctgtatgtggttcgtcattgaccaaaacatcattacagcacatggctgtaatttaaacactccttccaaaatggtgtggtggtgggcacctgtaatccgagctactggagaggctgaggcaggagacttgcttgaactcgagaagcagaggttgcagcgagctgagattgcaccactgcactccagcctgggtgacaagagtgagaatctgtctcaaaaaaacaaaaaacaaaacacacacacacacacacacacacatcttattgaagtgtcacagatatatacagaaaagcacctgcaatacgtgtgcaactcagcatgttttgctaacacatgcccatgcacccagcacctggcagcaccttcctttccctcagggcactcttctggtttctatccccatggattcatttgcctgcttttgtgtgcgatagaaacgggatcatgtacccttttgtgtctggccttttttgttcaacgtcagatttgtgagagtcactgtggttgctgggagcagttgcaggtggttccttctgttgctgtagagggcagcatggtgggaagggagcatgggatagtcatccatcctcgtgtctgagtgtggacaggccctgcggagcttccagttgcgggctttcatgaacaatgctgctggggacactttcactcatggctttggatgtgtgtgcatttctgttgaacttaagggtctggtacagttttctcatctcaactacccatgagtagaggcctctgcctctttgtttactgagcattctatttagaatgtaggccagctagctgcctgaccaagcagcaagctggggtttctcagactacagctgtatgtgaggagcaggtggcctctggccatggctctgccatagaacatcccaggagcagcctccagaagtgtccaacatttgctgcaactgccctaatgctggccttttacccttgtgcagggattggggtggctttgctgggccacagactatgtgtttgttaatagtaaatctgcctatcagtcttccagaatatcagtctccacacccatgagcagtaggcaagggttccagttgctccatgttcttgccaaagctgggtatctcatgtacccttttgtgctggccttttttgttcaacgtgtgatttgtgagagtcactgcggttgctgggagcagttgcaggttgttcctcctgttgctgtagagggcaacatggtgggaagggagcgtgggatagtcatccatcctagtgtctgagtgtggacagtctctgcaggagcttccagttgcgggctatcatgaacaatgctactggggacactttcactcatggctttggatgtgtgtgcatttctgttgagtaactgctcaggggtggctttgctgggccacagactatgtgtttgttcaatagtaaatctgcctatcagtcttccagagtatcagtctccacacccatgagcagtaggcaagggttccagttgctccatgttcttgccaaagctcggtatctcatgcgctttgaaatttcagcccctcaggtgggtgtatgatggtaatctcagggtggttttgctttgcatttcctgatgactaatgaacttgagtgccttttcttatgcttatcaggccttttcctttaaaatgctttttagtgacctgacatgacttttagattggtggggagtgtgcatccccccccggcccatctctatctttcactaacaagctttcccttataaagcagatgtcacattccattttcttcctctgtgagtgcctcaaacacacaaatgaaacatctagctaattacaggcaaaaagaaaacctctccgttcattttttttcccaagggctcattttgggtagctatgtccccactttattatctccatccaaaaagtgacctcacttggttgcagttacaaaggttttcttatgggaattcccctgggagtcctctgtaagttccttcctgagactttatcttggcagcagcgagcatttggttacacctggctcagaaactttcacaataaagcagtatgggccgtgctctgaatagaactctttggggcctcccttccctttttcccagtgctagggaaacccctagtactctcatcagacactccccagggtggccatgtgatagccctccctcctgcctccaatgcctccacattcacaaaaggataggaaccccagcctgtttgatcctcagtaaggcacgtgggtccctggccaatttgcagcagaaagaaaagctgcagtacaaatgcctcattcattcagcaaatgtttattgagcacttagtaagtgacagtccctgtgctaggcattgattcagagatgagcccaagagacatggcccttttcccctggcgtttatgttagcgggtgaggagggccagatggtgcgtaaagccaacacattagaatcctgttatgttctcagatgctgctggtgagcacggaacctagcaaagcactctggcaaattgtttgggagtttcttaaatcattaaaggcgctttcatcctatgtcataacacagtgatatagtttggacattgtccccgcccaaatctcatatcgaaatgtcgtccccactgttggaggtgggacctggtgggaggtgataggatcatggggacagtttctcaagcgtggttaatagtgtgtccttggtactgtcctcatgagagtaagtgagttctcatgagattcagttatttaaaagtgtgtggcacctccatgctgtctctcttgctcctgctctggccatatgatatgcctgcttccccttcgccttcctccatgattgtaagcttcctgagtcctacccagaagctgagcagatgccgccatgcttcctgtacagcctgcagaaccgtgagccaattcaacctcttttctttgtaaattgcccagactcaggtctctctttctttctttctttttaaaaaatctcttttttttttttttttgagacagtctcactctgtcacccaggctggagtgcagtagtacaatcttggctcaccaggctcaggtattccttttattctttcaaacagagttttgctcttgttgcccaggctgcagtgcaatggtgctatctcggctcactgcaacctccacctcctgggttcaagcgagtctcctgcctcagtcttccaagtagctgggattacaggcacctgacaccacgcccagccaatttttgtatttttagtagagatggggttttgccatgttggtcaggatggtctcgaactcctgacctcaggtgaaccacctgcctcagccacccaagtgctgagattgcaggtgtgagccactgcgcctggccaggtatttctttttggcaatgggagaatggcctaatacacccaatgattccagttgaatatatttatcagagatataaaaacacacatccataaaaatatttcttccttgcagctttattaataatggcttcgaactggaaacagccccaggatcttcctagaagaatggataccccatgaggacgcccacacaatggggcactgggggacatactactcatgaacaccaaaacatttcccctgaaccgaggacgctggacacaggagaatctgcactcatgcttttatttataggaagagctagaataggcagaattatgccatggggcaatggggcggggggattggtggggaaggggcaagaggccacgttctggggtgatggagctattttatatcttaatggggtgtagatgtttagatttgtgttacaattgatccaattgttcacttaagatctggacattttactgtatgtaaattacagctcagtctaaaacacctagttacaaagtcctatacaggagagaaacccgtgtgaggagtgtgctgaatgcatgctcacagctggatggagtggtccaggagggtctctgtccaggtgacttttaagccaagagaatgaggaggaggcgtggagaaagatgctctgggaaggatgtattaggccattctcgcactgctataaagaaatattgaagcctgggtaatttataaagaaaagaggtttaatttggctgatggctccgcaggctgtacaggaaacatggcagcatctgcttctggggaggcctcagggagcttttactcacggcggaaggcaaagggggagcagacgtctcacaggcaggagcaggagcaagagagagagaaagggtgaagtatgacacacttttaaaacaacccgatgaaaactggttcgtgagaactcactatcactatcgctaaggggaacggttgccaaaccattcatgagaaacggcccccatgatccagtcacctcccaccaggcccctcctccagcactggggattacatttcaacgtgagatttgggcgggacacagctccaaaccatatcagaggagaatgcttgtgcaaaggccctgtggctgccgttgggacggggggagagtggctgggggagagcttttcctgagccatgggttgattttcatgtctggccctgtggcctgggggaccagtaggtctggcctctcagagccatggtcctggggctcactcctggcatgctcccttcctgcccccatccttgacttcttttatttttgtctttcatcctgatgtaatttataagcaattttcttatattttacccgcctatataaactgactgtaatattttatgcagtggaggtgggggtgggggtaatggcaggacagggcaaggtaatgtttaaaatgcagaatgaagtgtaaaatgtaaaccagctcagagtatgctttggagccatccttattcttcctgtggatgcagtgaatatattcagatttaactagaatggatgctttcccccaaaagaacagtgataaaagcaaaaatttaagcactgcaagttgttccacccaccacccacaacccagggagcagactcctcagagggtgcctgagttgcaggaggtgaccccactgttccacattaaggtctcatggcctggtgactctcagcatgcagacatcaccccacaccctgggatctttgtgttccaggtgacctgtgcattttccgtacaagcttccctctaaacccaagcttagaacttcatctggcattctgttacagagacaggcaggaggaaacacttaggtgctagatctgtgttagagatgggtctccaagatggccttcctgagaggttttcagggattattgtcctcagactctaacctcctcatctgacttggtatttggggagagagaatgctggacttggagccagtacacccattcctgccaccaaactgctgtgtgacctgaggaatatcactcaacctctctgagctctactttccacctgttaccagttcaaggacgaggttggacctggctatctcattcaggggtctctggatgaaatgcaggccattcattagcctctttaagggcagaaaaacacctgttccaatgactgtttattaaaatcaataacatgatcatttaaacatttctccctttgaaatggaagttggagagcctctgtgggtatcatgaggtggtcagtagaagtcagggcacaacttactgttcagccgaacacttctaaccacctgcagagatttggccaagggagcattttaaattgtttttcttcttactcacctattgtttaattgataactctaatgagttaggaatgaggaatgctgatgtgaacatactagttaaggaggatcccagtgtgatcaatgttcagcaaattcagctcaggatggtctcataagtttcatagattgatggttccaatctaaatccttctatatagtctattaagaaatctccagtacttcattttttattggttggttggtttgttttgagacaaagtcttgctgtcgcccagggtggagtgcaatgatgcaatatcggctcactgcaacctctacctcctgggttcaagcgattctcctgtctcagcatcccaaatagctgggattacaagcacatgtcaccatgcctggctaattgtttatttttagtagatacagggtttcgctctattagccagctggtctcaaactcctgacctcaggtgatccacccgcctccacctctgcctcccaaagtgctgggattacagacgtgagccactgcgcccggcctgaaatctccagtacttcaaacaccagtgctagtaacctgacggtggagaagcagccaggtgatcggggtccataccagcagtgataagtcatggtgacagtatgtacccttgatatgatgccatgagaatggctctttacctcggtggtcttcctccctcaaactaataatcccagctgaataatgagaagaaagttccagttgagggacagtctacaaaagacctgaccagcacttctcaaaagtatcagagtcaacagaaaacaaggaaaatctgtgaaactgtcatggccaagaggagcctaaagagtcatgaggactaaatgcactgtggtgttctggaggggatcctaggacagaaacagatgttagataaaagccaaggacatctgcatacactatgggctttagataaaaacgtgccagtggccgggcatggtggctcatgcctgtaatcctagcactttgagaggctgaggtgggtagatcacaaggtcaggagttcaagaccagcctggccaacatggtgaaagcccatctctactaaaaatacaaaattagctgggtgtggtggcacgcgcctgtagtcccagctgcttgggaggctgaggcaggagaattgcttgaactggggaggtggaggttgcagtgggccaagatcacgccattgcactccagcctgggtgacacagcaagattccatctcaaaaaaaaaaaaaaaaaaaaaaaacagtgccagcatttgtgcattagtggtgatacatataccacactaacataaaatgttaaaaacaggggaaacggtgtgcagtatgtgggaattttctgtactatctttgcaataattctgtagagctaaaactgttctaaaagcaaaagtttatttaaacaaaaacaaaggaatgatggtgatgattacaatctgatgtgaatatacctggctggaagtgagcccgtctcatgcctactgtgtgtgtctggtggggaagagattgtgaaaagcagtctgaactcacaccacttgtgtcattatgtagaaacaagtcatgaaaaagacaaaacccagttggctgactttggaaatgtaacatgcaagctgatggaagcagtttgggtctatttttgatgtgacagcatcacctcaaaccagttataaaatgaactttcttgtttgcatttgacaaatcatgcttcctgtttaccaagtattgaagagagttagcactgagcttttcttgctaaatgagtgaaaattaaaaattgccatcatatatatatagatgatgtctatagagattatctatattattcaaaatatatagaaatctctctcttcctccctccttttatctgtctatctccattcctccattcttccatctctctatccattcatttattcatccatccgtccatctatccatccacccacccatccatccattcatccacccatccatccacccatccacccagggagaggcgaatgaacacaccaattcacacctttcaataatagatcagcatccaaaatgaaatatttatgcttaaaatcacttctttatcatatagcacaaaaatgaaacaaaatggtgggtttaattcccaggagtcttctgagaccaagaacacggtgcaagggtttcctgaaccccagaggtgatgctcagctagcccatgcaccgcttaggtcccttccagctgtgactgtgggggggggttaacgacaaattgggggtgtaaaatcaaattggcaaaaacaagcctggacctgccttttggaacttgatcaagtgcagggggagtgacactgaccaactcctcatgaaaatgaatgtggggcagatgcgtgagtgcccagggagaggggcctgtgccgcattgcagagggagagatggagctacaggccgaggggctatatgtgcccaggccccaggagcagggaagaggggatgaagggctataggaaggccagtgaggccagatggagagggcagctgggggagaaaaaggaatctggagaggcaggtgagccccgcctgcaggcaggccatgaagacagaaagagtgaagtcatcttgtttgtctgtagatatggaaagcagtggacagattcgaaaaatgcacaggaaggggcgccagctgcaccaggtggtgggctggaagtggggacacaaaccaaggggcaaggatacagtggtgcccacagttttgtgacttgaataagggatggaggctggggagatctgaagaccgagctgggactaggaagcaaacgctacctttggcctagcacacaccttgatcaatttggcaagcaggaactggaatatagcccgaggctctctcccttttcccctgaattcccagtctgtcccaatatccagctgttgatggtccaggaaacacaatgcaataaacattatgccagattatgcctcctttctaattgctcacatcaatagctccatttccaccatgttcagacttttgtgttgaagtgccatgtaaatgcattaaaaaatcattacacaccagaggccatatgtgggcagaaataattctgattaagtgtaaaagggaaagaattaagtcttgggtatcaagggtagtgtttgcacaccacacccaggggcaaacaagggtgcagctgaagacagggcgctgtctcaggagggggtggctggccccattggggtggggctggcattcccagggttgtgtgggtttggctgcatgtggggacccagagcccagacgaatcatggcaaaaggcccagaggaggcaaaatgtccccatgagctgccatgagaaaggaagctgaaattaccaggagggcatctactgtatgtgtgggtccccttccagggctaaatagatgaaactagtaatttgtctacctaatggccatgtgaccattgtcaaatggatctctgagggctgggaaggcttttaatgcttcattacacagcatgaaaaccctggcatgtgtgcccagtgctgaaggctgagggccatgatagacgttgacgaggggaacaatgccaggcagaggcaggcacggggagagacgaaggcctcaccaaacagtccagcctctccagtgtggctcctgcagcaacaaggcaatcacagagacatatcttctctccagagagctagggaggcagcagctgaattagtgaggacctaggttggagccaggagagagagtggcagtccttatcctgccatacctaactggtaggccttttctctcagcatctgagtctcagggtcctcccctgcccagccaggtgtggctggcccatcctgatggattcaccaagagaacactcttggaggtgggaaattaggcacattccttgctctttgagttcctcagtttccttgtctggagttcaaagtggctcctaatataacttaacgtgagtattaaagggaatgacatgagtaaagggcttgcaatagtgcctagaacaaaatgagttgtcaacaactatcaattaccatccatccatccatccattcatctatccagctgtccatccatccatttatccatcatccatccatccatccatccatccatccatccatccatctatccattcgtccatccatccattcacctactatccatccatcatccattcatctacccacccatcactcatccatccatccattcatccacctgactttcaccaggcctgccatggccaggccctgggctagggctagagaaatgaacgagacttttttcttgccaccaagtaaaccaagtccatcaagggagacagaagtggtggacgaaattaactgagacccaagctgctgcatgctctaagagaagtgggagctgagctcgcatggcatcagcacagagggagggggcctgggatattggggtggacccactattggcacacagagcttacttagccagaattagaacccttctacaacacagatcataatataaagctgcatagactgcactccatgagagcaagggctatagctacactgtatccccaccttctggtcctatggctacattatatcccagctcctggaattgtggatacactgtatccctcatttctggtactgtaactgtcctaaaggagatgcatctatgtctgtttagtttgatttgaatgatgcatccaattgcagagacagaagtttcctcagttatttacatcacaatatggaagagaaactcactgtgtgaactatttccacagaacatcgggttctgttcacaactggtacttgcccatcactgcaggtggcatggtggtcccctgggctatgcttcctccagcctttgcatttggtcacagaggacaggggggcaggctcctctctagatgggtcattcctacccctgctgtcaatggaggaatctgtctctgggcttggggttaacattgagtctgtctcctcgtgaatgtccacagggcatcccaaacctaccccaagttcaaatacaccaagtgctctgaatgacagctggtgtgcaggaagtgtgccaaatgtcagcttttgtgattgttgtaattattaacatgctcaaaagcaaacccctacagaacagtcttttcaacaaattgtgctgaaacaaatggatattcacatgcagaggaatgaatttggctctctagcgtactccacatacaaaaattaactaaaaatggactgacctaaatataaaaactaaaagcataaaactcttagaggaaaacatcggggtagatcattgcaaccttgaatttggcaatggattcttagagatgactccaaaagcatgagcaacaaaagaaaacgtaggtaagttgggcttcatgaaaattaaaaattttgtacatcaaaggacattatggagaaagtgaaaagacaacctacagaatgggagaagatatttgcaaatcattcagctgataaaagtttaatatccaagctctataaaaactcctacaatccaaccaaaaagacaaacaactcaattagaaaatagacaaaggaattgagtagatatttctccaaagaagataaacaaatgatctataaatgacatagtgattaggcagtgaaaatcaaagccacaatgatataccacttcgcacccacaggattgctgtaattaaacagtatatatatcaagtgctgctaaggatgtggagatactagaacccgcatacactagtagggggcctgtaaaatggtgcagccattgtgtaaaacagtttggcagttccttaaaaagttaaagataaaactatgtgatccagcaattttacttctaggtatatacctcagaaatttgacaataggaactcaaacagacactcacatgcaaatgctcattgcagcattttcaaaatagccaaaaggtggaaataacccatgtctgtcgatagatgaatggacaaacgcaatgtggtatatccattcaatggaacattattcctccataaaactaatgattactgatatatgctacaacacggatgccttaaaaacataccaagtgaaagaagccagacacaaaaggacaaatattttgtgataccatttatatgaagtatctagaatagacaaatttatagaggcagaaattagaatagatagaggttaccaggggttaggagaggcagggcggggtggggaatgggaagtgactgtttaatggatacagaattcctacttggggtgatgaaaaagttttgaaaatagatagtgatgatagttgtatgacatcgtgaatgtatttaatgccactgaattctacacttaaaatgattaaaatgttatggtatatataatatctaacacaattttaaacaaaacaaaacaacaagtagtaaacctctcacttatccccacccaaacctctccttgtggtcttttccttcttccagccactcaatctggaaatctcagaaccatttttgactactctcctgctctcagcccctacattccatgtgctggcaattcctgtgggccctactttcaaaatagacccagggtcaccctcccctacctgcctcgtgcacctggattattgcaagagcctctgagcaggcttctgcccctggcccatcagccttttctctgtaggacagccagagggacctgttagaacccaagtcagctcaggtcccttccctgctccaaaccctactgcagtagcaggtggtggggagggggtggggagtgttatttagctcccatggttccagtggccctggagacccccacactggctccacaccttccatacctcttgggttgcccctcctgctccctctttccctccctctcctggctggttctggaatccatccagcacactcaagaagaagacgcacgtgctggggcttctgcactggctgttccttctgcctggaatgttcttcccccatctctttcaggtgttttcccacaccacccactcaatggcacagagtaggtgctcaatagctctgtgggtgaaagcttcaggagggacaactctttctatcctccctgaatggtaagatagcaccatgattaaatgaacagcttgcttgcttggagttcaaatcctgcctctgccacttaccagctacaggaccttaaataatctctctgtgccatagtttcctcaacataaatggggggaaacaatgggacccacctcatacagtgagtggggattgtacatgatgatgcaggtaccagggcttccatgggtgactggcacgcagtcacctgctcaaccaacattagctaacatcaccttccttccctccctccctccgtccctccctacctccctccctacttccctccttccctgtctatttccttccttccttccttctttccttccttcctcattccttccttcctcattccctccctccttcacttggtgcccaggatactattagtgcagagaggcatgtgggttgatttccaagagaaggggatataccagctgagttttgagggttgtgcaggagtgagttgggcagacatgtcccagtggagggatgccgcagacctcaccctaactccacctgcccttgtgggaggttcagaccacaagcgtataaataagtagcttattaaagaataactaaggagctgctaagtaggcagaatgggagggggcatctgtaccaatcaattgctccctgggagagtgggcttgtggttttgcaggggagcgagaatgagcaggttataggatcagtcacagagcactcggtgtgacttcacacctgggtcatatggatgaagcttgcagtgatgacattgatgacaatgatgataatcctcactcatgcacagaacagagccaggcactttggaaaggctatgaactcaagtccttttcacagccaccctccggactttacagataaggcatagagtggttaagtaagttggccgagggcacagggctgcaggcggcaaagctgggattgagacctgggaggctggctctagaattggggctctctgtacttcacaagataagtgcttcctctctctgggtctgggtgccggtggcaggaaaaagtgggaacccagacctctttctgttctccaactctgtggctttttaaatttcctatttacgggcgaagccactgacggcctccaggtgtaaatgacatggacagagcgaaagtggcgtggtgctgtgaggcttcccatggaatttcttcatgcctactgcggtggaatggtgcatctggcagcaaacccaagaaccgaggctgggacacccgtcctggggtcttactcctgacacggctgctacccacagcagggggcacgattccaccccacacacagccgaggtgcagcggggtggacaggaaaggcctgctctccgggagtggaggctgtggccgtcatccatccatgattacagctcagatctgatgagctgaatcctccagtaaggaacactccaggtcctcacatctgagacatgacccatgcccaaatgtaaagcctataaagaccaaagcacaggcctccagagtacaccctcatgcacagggaacggtttcctcaagatgtcctagaagcattgctgggtgattctgcctggggtggggaaagggagaggcagtggcctcacagcaactggactcagacaccctgggttctagtcttttttttttttttttttttttttttttttttgagacatggtcttgctctgttacccaggctggagtgcagtggcaagatctaggcacactgcgggctcaagcgatcctcctgcctcagcccctcaggtagccccgggacaacaggcctccgttctaatcttggtgccatcagttactggctgtgtggcctcagtttctttgtctgcacaatggggaggattatacacccctttacagggtagcactgaggataaatgtgtgaagcatttgaatcagtgcctgaagcttggtgggctggtcatacacagtgagctggggctgtgtttccagtggatcacagaacggatcatttctacacgtgagcttgaggaagccgctcaggaaggcaggacagcctggccgcacaagagtaggccctggtggcccacttcagcgcccaggttttttgcctgctctggctggaggggcccctttctctttcttctgggcctttaatttgatgagtatacagtgtcacttctagaaagaagccagacccggctgtttgaaaggcacgcatcagaataagtttctccatgggaattcgaaaagaagaaaagtcgggggagggaggggggaagaataaaaggagggcttcccatgctatagttagcagtcccgggttggcggtggcatcctgattgcagggcactgcctcctaaccagggcttcagaagggcagagctcagcgtgtaattaaataaaacccactgcacactgcggcccccttgtcactatcccactcttaggtttatttaataacctctgaactgggaggggagaatcatccaggaaacagggcttgggtcatttattttaaaattattggtacaaaaatatcctgggtggtgatttatgtgcagccaggggggaggaagtcagggactccccctccggcctagcgtccaggcctcatttgtctccggctctctaagttcctctcagtttccattatgatttcgagtcatagtagtgactttatatcacaaataaatctccagaatagcacggaaatattatgtgtattaatagcgcctgtaaaaacatccgaaaacctcgtatccgctgcaagacgctcccccgggattgggaacagcctgggccggcctagcagatgtctccccaggggccgcgcaggggcccctgcccggcggcgcccccagccccagcccagccccggggctctgtctgtcgtctgtttgtctgtcagtgccccagcgacctgtgaccgacacagtccctcccctctcgccttcaccgggagcagcgcggaggggggaggactgtccccgccaccagaggtgggggtccctgcctcctgctcctcgtgcgcccctgagtcctccgcaagccactgcccctggggcgtcccagatccactgcggccgcgctcgcggtccctcaccccccgtgccgccctggatactcaccgactgtggggacttccctggggggcagcccctccaggccgatgtcgccctcctgcatggcgcgttcgctgcgcgactccggtgcacccgggacctagcgagtccagactagggagcgacgaagtcacccctggaggtctgcggcggctctgggggccaaggtccgagcctagctcgggaggggactgtcccctctctcctccccagaggcaggagcgaagccgcgcgtgctgtagccaaacttggctgccctcgctcacggccgcgccgctcctccccctcggctttttggtctgggggtcccgggcagacctccccaccccccgggggttacctgcggacaccgccctcgccccgccccgcgctccccggactcccagcgagcggcgcgggacgctgcagaggagcagcggctggtccccaggtcccggcccgcccccggcctcccgctgcgcggggcgcgtctccaccgctcccagaccgtcttatcagttggggcgggcagtggggccccgagcggccctgcgaggtgcacccccagccagggccccagggaaggggtgttgactacaggagggggccttgagccagcccccgagagacgggcgcagccctgggcgcggggcggttccgtgagtggccctggttcccgcatcagaagagcgccctggccccctcccccaggcggcaggaccccgacgaatcactgtcaatttgtcacacgaggaggctgaagcccagggatggaaaggagagctggaggttacaggtcactggggtcctgaacttgaatccagaaattcgcctctgcccacccccctcccctccccgggttccctcccgcaagccacagcctgtgcagaatgtagaaatctggataaagtgagaagggtttcaaagtgggggaatgtcctgttatgtgaagattccagttaactgcggctaagaggactggacccgggggtgcatccagggacgaggcagggactctgatgcacagcctgtccccgacccttcctcttccccgcctcatgggctcagggcaggaagccgggattgcccctctccagccctgtggggtttagaaaccaaggtctggacaattcagcatcctcagagacagcagcaatgtgggccctacggagggcgggcgtggggaactgcagtgccggcgcctccttgtgtacccacaaacctcacacccctgacatctccagataaataccataaattctcaggcagaactaccataaacagaatgctaagtggctccgtgaccacaggagaggccgtgggggacagggcagccgcctcatcttttgaaaggtcatctgacaacttctgcaccccaagggaggagctggtttggtgctgaggaccagcccatgccagggacccttggatcacttgccaaggtaacacttcacctagtgcccagctttggctgggccctgagggagacagacccggctacccctggaggacagaccacatccccgcggaaggcatctggatggaggaggagctgtcctcctccccaccaggcctgctgggattggtacctgaggacactgccccaggaggaaagcgcttgctcttgaagcggcaaacccacaaagacatgtttcctgccgggtctccttccccgcccccacctcagcgctgtactgtaaaaggagacgagaggcaagattccttcctcgcattgagtctgaaagaaaggtgacctgccattttccttagcaatgatctcgtttcagtccggactcagaaatgatctcgtttcagtccggactcaaaatcccacacaggcactcaagtgggattttattctccgtgggcggcaggctcaccctcaggagagcatgccaagaagccccgggacgtgtgccccaggagggcaaaagaggatggatggaaatcagagccttcctggacccttgcaggggctacattcatttcacagaacttttccatctgaccattgtgcagaagtcgagataaaaactcatttttcttggaagggtctgatagccaatgtgatacatggcaattgctcagttatgtaaatacacagagaaaattttagaattcttacccttggaatgatgaactataaaccaaaaaggctcagggggaaaaaaaaatgtaaatacgtcctgggactatttttaactgtcattatttacctttttggggcagggatggactattgtatatttagccagatttaaaatgcacacattatttaatgcatgattattagcagaaatatgttaaacagccattaatagatgttgattcattccgattgaagccgctttttcttcttttcattttcttggctccaattaagttgcgttcggatgaaacccttcagctgtggccaacatatgcaaaaatgccagtcgaagacccagacgtttaaaagtgatattttagtaaatacctgaaccagctcatttttaaaaagattgctctcggctgctattttggtaagtggcatcacgtgatagtgatgccaggctggggaaggctgggctgcccatgtggcccgcaggagagggtggcctggaagaggagcacccggagcaccctgcttattttctggggaaccccacgctgcagaccctctgaagctgagggcctccccgacaccctgggcatggcaggaagatatttatgtcaacagcagagtggggccagtgcactggctcggggaggtggcgtgcctgtcattacaacacacagccgtcattacggaatacagtaatcacacagcacaatgcttgtaattacagaaaaatggtttccctttttggcgaggcggcgagggagggagagaaggcagctcttggtgaggccagcactggtactcatcccctgaattgggcggggtttaaaataggtttcgtagggtgaggccttgggcctggcttgggggtaggcacagacctaccccaagccggagcatgatcagatgctggggacttgcagggactctgatcttgctgtggtttcatcaaggccaccagcaccatcatgcaggtctcctctgctccccaatgctgctgggtctcagcagatgtcagctcagagctgactcggcccacaggcgcaccacctgcaatcacgcctccctctgtgcatttctcctttcctcattgaccttctctggaccctcagatgactcaggacaggatagattgtcacgtacaccctgcccccactgtcactcatcatcagaacacatacaaggccacaggtcatttaaatgctgatttcgcatgatctcaggaagtctgttttcagttcggcttggctctttgaatgcctgccatgggtagagccctttctcaggttggaaggggaatgggaggcgcaaagggagcaaaacaaagccccagccctccaggtccagcctccagcctggaggagtgagcaagctggtgcagaagccgggcctatggcctctgcagcctaacagagtcagtcccgtctggaacaagcttcttctcagcacccgggtttgtgcatctgtaaaatgggtcttggcaacaggttggaattctgtagggataggacaagaattcagcttccagcccaaaacctgacatgctgtagggattagagggcattattatttgcatcatattcatcctagtcagacagggaaacatggtagaacactgaaatgcaggtggaggctgctcccagaagagccgattggagctcttggtggcccctgccctggggcaaccggagagtgggtgggtttttcaaggtggacggtgacttttagggggttctggcagaggctgggtggaagcaccaaggtggagaagtgggcacccagacagggatgggagcagcccagtgtagcaggttcaggtggggcatctggcgagtaacgggggcccctggtggctatactcaacagggttaagggggtcttattgtaattaaacaattcactggggtgacattcacataagataaaattgatcatttttaagtgttcaactcggtggcatttagtgcattcacagtgttgagcacccacatttctatccagaatattcccattcccgcagagtacagctcgaacccgctagcagtcactccccatctcccccctcccccagtccctggcaaccattggcctgccttctgtctctatggatttatccattctggacatttcatataaatggaatcatacattacatggtctttcgtgtctggcttctttcattatgtttggagtttgctccacattatagcatgtatcagaatcgcatttctttttatggctgaataatattccatggtctgggtgtactacaatttgtttatccatttcttcttggatagccatttggactgtttccaaagggtctttggaagggactagagagagcccacaaaggcgcctgcaggggctggggtggggctgggcagagagctcagtggctgcgcagggctagcgggagaggagggctggaggcagctgctgtcagcccagcctccgaggcagctgctcaccactgataccaggggctcccagcagcaaagcgctgttgctggagtgacagtcctccgctctgatacagaggacctgcagctgaagcaggctaaacttgcagaggggcccttggacagaagaggcaagatctctgcctgggcttctccttaggcaagtctgtttatttaacaaacacttagagagcacttattgtgtgccaggccccgttccaagcgcttaataaatatcggctcatcgaatccgtgcagcaagtctacgtagtacgtgctcctatcattcctactttacagataaggaatcagaggctcagagaggtgaagtgacttgcccaaggtcacacagcagtaagtgggagagtggggcttgcacataagcagcccagctccagagtttgtgctctgctaccgtaaggtagaaacacagcgtttcccaaaatgccagtcttccaagctccatgtccctggtttgagccagattcatggtcttcctgtgccataactgccttcatatttttctttaacccagctcactaggtcactctttatttatttttgattttttatttttttgtaaaggagtctcgctcctgtcaccaggctggagtgcaatgacatgaccttggctcactgcaacctccacctcccgggttcaagcgattctcctgcctcagcctcccaagtagctgggattacaggcatgtgccaccacacccagctaatttttatatttttagtagagacggggtttcaccatgttggccaggatggtctcgatctcttgaccttgtgatctgcccgccttggcctcccaaagtgctgggattacaggcgtgagccaccgtgcccagcccatactttattttttaattgtgataaaatgtgcatgacataaagttgatcattttcaccatttttaagtgtgcggctcagtggcattaagaccactcacattgttatgcaatcctcacagccatcaatctctacagttttttgttttttttttgagacagtcttactctgtcacccaggctggagtgcagtggtataatctcagctcactgcaagctctgcctcctgggttcacgccattctcctgcctcagcctcccaagtagctgggactacaggcgcccaccaccacgcccggctaattttttgtattttttagtagagacggggtttcaccgtgttagccaggatggtctcgatctgacctcatgacccacccgccttgacctcccaaagtgctgggattacaggtgtgagccaccatgcctggcccctacaacttttttatcttccaaaacctaagctctgcacccgtggaatgctcactcccattccccacttccctaaccccagcgctggcaccaccattctagtttctgtctctgtgaatgtggctgctctagggacctcagatgaattggaacatgtggtgtttatctttttgggactggcctctttcagtgggtgtaatgtcctcaaggttcacccatgttgtagcctgtgacaaaatttcctccctttttagggcttatcgaactttatttttaaagaacccaatatcactactgaaagtggagaggaagaagcactggccatgaacggaagtttcataaagcaccataaaaatgagctaatgttattcaattccctgggataccctggggaggccctgaaccacggcacggcacagttggccagggagacgggtgtgctatggaggcatgatggacctcctggcaccaagctgagactttctccatgacatccccgaaagacagaaagagaagggcaagtgaactacgttctcaccacgtgttgcaattctcctgttggccaagttcttgtgccacttcacgttggctccctttgcccctaaaagtgttttgcaggacactcatggctgggctgctgcatttggaggaaaaggaagaatgaggattgcttctgtgtgttacgcaggctttgtgagctgaccctgagtcccgcatacttgatatcttccttttaagatgtagggaggagtccccaggctcagagagcctgggcaatgccatacagctagaattaaatatccactttattatttttatctctgttgtctcattcgtatgaagtatgaattattgtccccatttatagctcaggaaactgacgcagagaggaagaatggcttgctcaagtccatgcagctggtaagcggcagaatttggattaaaatccgggtccaactgattctagagatttctagtcaactccaaagctctttccagagcaccatgccaaccttctgcttatctctctggaatttggaattggcatgggtgaactcaatacaccagttgcaaaatgttattaccaggagcaaaaagaagggtatggaaataataggaaaaagctcatctttagtccctgtcattcactacgttcaaaatctgtctccggacccttggcctctcttcaacctttgtttgtttgtagggctgagacaggtgaaaggctcaagggaggcctctcagcatggaatcttgcaggtatgactaacatctagaggcctgtttaccattagaggttgcccgcatcgctcgagtttttggaattaaactgactctaattaatggtgcaaatatttacactcaatatatgatcaaagaaaacacagcctggttgtttcagcataaatagcaccaatgccaagactcttggcaataagacagagttgagattacgaactctaaataggcttgtaagtcattatttgaggatggtagcttcatatagaaagtgctttctgtaattgaacacacttgaggggttttctcctcacatggttgcaggaataattcaattcgtcctgaatagagagattaggcttccatctaggagtccatgggagaatgactcaagagaggggacacctcacatggagattagtttacaaataggacaatcaagaaggaggcctgggcagggtgcggtagcttacacgtgtaatcccagcactttgggaggccagggtagaaggattgcttaaggtcaggatttggagaccagcctgggaaacatggcaagaccctgcctctaaaaacaatgcaaaaattagctgggtgtgttggcgcacacctgtagtcccagctacctgggaggctgagctaggaggatcacctgagccctggaggtcaaggctgtagtgagccaagatcgtgccactgcactccagcctgcactaccgggagtgaggcctgtctcaagaaaaccaaaaaccaaaaaacaagaaaaaacacagaaggtagcctgcaggcacccagtccatccgcttctagggctgggccctctcggaggtgctctgccaacaaaaacacttgctgttttcgtcggacccgaggtggcagcctggtgaaaaggcccacggagtggctccaaatgccacccccttccagaaaccaggacagcacagctcagagttacgtgggttctttgcacagggagcagcgtttgtccccagggtcccggcctctggtttaatgtgggtttaggggatgccagttcccagggaaagaaaacaccgggccaagctgccctggggacaccggccccgcctctgctctcagaaaccctcctcaagtgtccctttgggaagctttccttgaccccctctcagccacagtatgcaaatgacagcccctcaagagaggaccattcacaaaaccccgctttggagaggggagataattcattcccagacatctgaagggaatctgagaaggagaagctaaacccgacctcagatcactccaaagtgctcagagcagccacagcctctgcccctgtcttcagagcgctgggtctcagcacacaaagcctcggggctgcagtcatctgggggactcccctggtgaggagctggctgcattgtccttgaaatcagagggtaagtccgtgtccccaggccaccctggcagggatgggcactgtcccccttaggacgcattggatctctcactcagggaaggagccaggcaatgcccagtcctcagacctaagggccacacttccaccatggctgatggttgctcattgtcagctctgcaggctgggagggctgggggccatctcattttgaaagggtcaccctgccccccacccactcacaccaggatctgtcagcccactgctctgtcggcagcacgcccaggtgctcaggccctcgctgcaagcagggagcttggggttgtgggtgggacttgtccattcgtgaccacgtttcatggtttagaacatctgagtgcttacagcatatggactacttccgtggtctttgagtgtggtggctgggaccactggggatggactggaaccttctgactgaccgtgcacacagaaccggactcgctagggtcacgcaagccagggttggtatgacaacttgggtgacacctggggggctacacctgtccccccctcttttaatttcaccctaaaggacttcacaccatttctggcaagctggttggccgcctccctgctctgcaagatgagctccctcacgcttagagaagcagaagagagtgagtgtgcatcagaccgcctggggctggcctcatcactcactgcgagaccctcagcagaattctcatccatcttccaggattaacagcagcccctggagcagccatctcccggggggatgaacatgacgttcacccctgccagggacccggcaaacaccaggcctgacccatttcaagcccctgatattcttagccgtcatgtaattgtcatggcccgggccggtcagggcctggcagccaaggtgactctctctgcaggggctctgcattcctcttatccagctgccatagcagatgctacagatagagtggctgaaaccatagacattgtcttagaggctggaagttggagttcaagatcaaggcgtcgcagggctggttcctcctgaggcctctctccttggcttgcagatggccaccttctccctgtgtccccacatgatcattcctctattcctctgtgtgtgtgtcctaatctctctctctctctctttttttttttttttttttttttttttttttttttttttttttttttagagacggagttttgctctttcgcccaggctggactgtagtggcgctatctcggctcactgcgagctccgcctcccgggttcacgccattctcctgcctcagcctcccgagtagctgcgactacaggcgcccaccaccgtgcaccgctaattttttgtatttttagtagacggggtttcaccgtgttagccaggatggtctcgaactcctgacctcatgatccgcccgccctggcctcccaaagtgctgggattacaggcgtgagccttcttagaaggggccagtcagactgaattagaacccacctaacagcctcattttaacttgatacagttgcatgctgaggtcctggaggttaggcctttaacaggaatgtaaggggacagatttcaactcatgacaggatttattaaaaggaccatttacagagacacggcccaggtgaagggcaaccagcagtgcatccaaggcccagagcatggtggggacaggcgggcacggtccctaagggccagtccttcccgcaccccagggcgcagaggacagcaaggccaagggcagggctgggggcaccgagggtctcaacacagcatggtacatgagtgttttgtccccacctatgtgtgcaacaccatcaaccaaaacaaaatcatgcaaagttcaactgccgtgctcctaccagtcaatgggattctggaccagctgcgctaaaatgtgggttatactacctgccaggtggtgacaggtttcgctggctggtgagctctggtttcaagaccagggggctgctttgtggaagtttgtcctggagagcggatcccggagccagagtcccacagctgccagtggagggagggataaaccccataaggatggtttgcacatttcctaggaccaagtgagggggtgtccctctggcaccccaactgcccacaagcttctgtgctagaaggagcccaaatcacccctgaagggggctccaggggtggtcctcaggggcttgctcagctccctcagtttagaatcctcctttgtacagataggtgccagctccctcatcccccgcttcaaagacagtgagagcctgtggctgttagtgggtccacgggcagctctcctctggggactcacagggagggcgtagtaggcatttgccattttggggaggggggctgtccagcaccaaactctccttccatctgggggatcccccactggtgtcagattgatgggtacagagcccactgtggggagggggtagggaggccactgctccatctccctggcagctgggccaactggacaacatggacatgggacccaggcttggcctgtcgggtgcacctgtgagaggctcagcctctgacccggagagagcaggttaggattcccttggtgccgtcagtggccatggtagccacgtgcggttgtggggttgtcctgcagcagcgtggggtgggacgccagcccctccagctccagcccctcccaggctgcctccgtagctgcctctcagggcagtttagtctttttgcagacggccaccttctccctgtgtccccacatggtcattcctctgtgtgtgtgtcctaatctcttcttttttttttttttttttttagagacggaggcatcctagtctttttcagataagaaccggactccgatcctgttgcttgcagccaggaatcctgatccacagagagcagagctctcctgcccggaaggctgctggtcttggcatcttccttctgagccacaggtgtggccagatttcacaggcaccataaattgtagaacagcttgtgtttctctcctagaactggctgctgggaggctcagagacaatgtggggaggtacactgagcaggtgcttagggctccaggtcatccacaggtgggtcccccatccctgggtccaggggtcagggccaagagcatgaggttctgctggccaagagactactgctgcacaccttgaaccagctcagccgtcttgggcagacgccctttcctttctgtgcctcagtttcctcatctgtaaagcggtcgttcatgatagtacctagcccaaggtttgtcatggagaacatgtgaccaaaaccaggtggaacagcctgtgtcttgcccatagtaaccatctctaagtgttaattaaatattgttattattgttattattttgagacagagcctggctctgtcttccaggctggagtgcagtggcatgatcttggctcacttcctctgcttcctctgcttcccaggttcaagcgtttctcccacctcagcctcccgagtagctgggattacaggtgcccaccaccacacctggctaatttttgtatttttagtagagatggagtttcaccatgttggccaggctggtctcgaactcctgtcctcaggtgatccacccacctcggcctctcaaagtgctggaattacaggtatgaaccactgtgcctggccttaaatattatttttaatatctgactttctgaaccctatcttccctgtgcctcattttttcctgtgaacttccagattgtcttattttttgaggaattaaaaatatgttggtaagctatcttacaacctttttgaaaccagaaggaatccaattttttttttttttagacggagtcttgctctgtcactcaggctggagtgcagtggcatgatctcgactcactgcaacctccacctcccgggttcaagccattctcctgccttagcctcccgagtagctgggattacaggcacgcaccaccacgcccggctaatttttgtatttttagtagagatggggtttcaccatgttggccaggttggtcttgaactcctgaccttgtgatccacccgcttcggcctcccaaagtgcggggattacagacatgagccaccgcgcccggctaaggaaccagaaggaatctaaaggcctgcaataaagtagaagatgctctatgatgcctcgcaccgcctagcaaggataactccctagagcccgagacaggaggagccaaagcatttttcctgtttaatagagtctttcagggccagtggaaaatatttagaaaagtggaagatgtcagccaatcagcatttcctggagcacctccgatccctcggacgcaggtcgaagtgctgaggatacagtgattttttgaaaaagtctctgcttttaagaaaattatatttttatgggggagaaagagaataagcaaatatatcatgccagatcacgagggagttttgaagaaaaatgaagcagggtgaggggacagagtgagatgccagagctgggcgcggtggctcacgcctgtaatcccagcaccttgggaggctgaggtgggtggatcacctgaggtcaggagttcaagaccagcctgaccaacatggaaaaccccatctctactaaaaatacaaaaattatctgggtgtggtggcacacgcctgtaattctagctactcaggaggctgaggcaggagaattgcttgaacccgggaggtggaggttgcagtgggctgagatcttgtcattgcactccagcctgggcaacaagagcgaaactctgtctcaaaaaaaaaagaaagaaaaagaaaagtaaaaagaaaaaaaaatgccagataggggccaggccagggagggtcccactgagtatgggtgtgtgtagaggcctgaatggaggccggcaggtagatctgcaggcatctggggaagaacatctcgaccacgcagaggccctgagtgcagctggctgttgccttacaacatgccgaactctctgaggcgtgctgtcagggtaaggacctgagtcttcttagggttgtgaactacgtctccaggcaaatgttgatacagcgtctttacacaggaccgtcttatcaaaatacagtgaaagcactaacaacaaaacccagtgggtcatgaattgtttcacagctccaggaagacgatacatatcatgttaattatagcactttacagttttcaaaggaaatacgtacacagcaggtgcgtgcctgtacacccctcccaggaaacgaggcgttgcattgtctgcaaggcggttgtctcatcattgagttgatgccggctgcttgtgtgtttgcagtggcactcctgactttcaggactgaaaagtgtgtcctcgagtgactgggcactcatttcaaagacagtctagccacacacggctcatactgtacattttaggctgagataacgccggcattttcaacagtagcctgttggtcaatgccctggcatactggtttctctgatttcaccttcactttttttttttttttttttttttgagacggagtcttgctctgtcatgaaggctagagtgcagtagcatgatcttggctcactacaacctctgcctcctgggttcaagcgatttccggctaatttttgtattatttatttatttatttttttagtagagccggggtttcgccatattgggcaggctggtctcaaacttttgacctcaagggatccacccgcctgggcctctcaaagtgctgagattacaggtgtgagccaccgcgcccagcctcgctttcacttttctttgcaatgggagtcatttctgtcatctcacagactgaagcagtcagtgtctgttttgttctctgcaaagtaggtaaggatgggataagagtcacctttccggcagtcgtgaaggtgagagttacataaacacacggggaggacacccctactgggtgtcaaagctcatccagcattagccacaggcctccccgggcctggagctctgaaagtgagggtgagctttgattctctcacttggcctcctccgacagccccagtccatggtctgggaaggaagacagggaggcagccagtgaggaaaagtctgagtatctaaaaaacaaaaacaaaacaaacaagaaggaagggaggaggaggaggagtaaaaagaaaaagaaaaaatgaaaagtttttttcttagaaactttttagaagtttctcttttttaaagaagagagcaaaagcaagtggcctctatacaaattcaacctgttaaaacaccagccatcattcagctgctcagcaaacacacagaccacgtgccaggcacagttctaggatacagcagagaacagaacacacaaaactctctgtcctagcagagcttcaaatctagaaagctccatgaggcaaattgtgtggaacatagaatcacacgtggtctaggctggagaggacccagagaccatggggaccaactctccccttttacagatgaggaaactgagactcagagggaagaagtgaaaccccaggtctccagctagttggtgcccccccagcacagggactaggaattctgtcctgaacctgtgtcacagactgacagttctcctccccacccccaatatttattcttggcctttttctcagtaagagattgcctagtttttacctgacatgtgacaacccagaacaaaaactgcatgtcctgttctctgcagccaggtgtggccatggactaagttcaggccagggggcagcttccaagaagggagagtgcctctctttgccctttctgtttcctgctggctggaacgcatatgtgatgacttgagcccaagcagccatcttgggccacaaggtggatatccgtgctgagcatgggagggcggcctgagagaacacagggtgtccgatgactgcatgaggcccctaccagccttgggatcctggaatgcccacctcttgacttgttttctgttagagaaattaacttccacccttttaaaggtggcatttctgcctctcactgcagaatcaatggaggccttccctgggtccccactccctgcgaggccacatttgaactcctcccttatcatgacagacatgaaaaaacagccccagagaaggggagtgaccttcccgaggtcacagagttccccttatgtaaacatttcgcttcagacctgtgtgaagttgttgctaaagcaaacagcccctgcctcccgcgtgctggtcgggaccacagttcacgaacctttcctaacatgacattcccaggaggactgatcgatggggctggtggcacttggaaagtgaacaccacggtgctgtcagctcagctctgggctccgggggctgctgttccccgtgggtctgagaaaacccttcccttgaggccaaggctggggctgggaccgaagcacagtgcctgggctctctgcagccgtgcgcactgtggccgcggggttctgctcgggcttctgatgtggagcctcacctctttggggtctcctcgggagaaagaacttcccccagccttccctcctttgccctccccttcctctcttcctgtttgtctgcatttcctgttagcagggattctctctgaagctctgagaacacgtcaccctcacccctgcaattgcatggcaattcccctctcacaccggggaaccccctttctgattgatggggagggacacagttcatcctggccatgctcctgcatccaggtctctctttcgttttgtttgtttgtttgttttttgagatgagtctcactctgttgtccaggctggagtgcagtggcatgatctcagctcactgcaacctctgccccccaggttcaagcgattctcctgcctcagcctcctaagtagctgggactacaggtgcccaccaccacgcctggctaatttttgtatttttagtaaagacggggtttcaccatattggccaggctgttctcgaactcctgaccttgtgatccacccgcctcggcctcccaaagtgctgggattacaggtgtgagccaccgtgcctggccgcatccgggtctcttgaggctcccagactgcctctttctctttaccctgcgacccggcagccgcatttcacaacttctcttggcaggagagatgcactttcccaggagagctggatgctcaggttcctagtctaaagagagacgggggcagtagccagagatagaagcctcttccatctccagcgtcagaccgtgaacatcaccagagaaagcacagccgcttgactccagtccttccaggagtctcattcccatttttccagaagagagagctgagtgcagagagactccccagatttgccccaggtcagtcccagcaccaggatccagccacacctcagaccagatcatgtagttctcctaccacccttctcagcctctgccctaggaggaaggctacccatggctccgaaggagattccctggggctttggggacagcaggagaaggggcacggctttccaccggcagctgtgcaccccggcccctatgagggaccctcccgtggccctgcagcccttgcagtcccgtggctgtctaacatcctgaaggggatcccacttccattcaggcagcagccaccaagaaagaccacggctggcttcatttacactagagtgtgactgactgccacatatctaactgctcctctctggagaggctggagctgtaatccaggctctgagaacctagaggttagtgacaaaggagtgaagactggagggtgcagcttccaacagtgcaacaaagggtcctgccagggctccctcaagggacaaccctgtgctgccagcacatactgaaggctaggtccaaagtccgcgggctgtgtagttggcataagagtaccattccctgctgctcctggacagaaatcctgtccacgaaagagaggtggaggctggcctctgagccccctctgcccttggaggtccaagtgctcatgccctctaggtgtgagtggctcagaccagctgggaagggaccctgcctgaggaatgacagagcgatgccaccgcatccctgcatctcagcagggccatcgggggccaccgaggaagaaacgggtcctcgaacaatctcagttcagggatcacagaactttggcagcacgccggagtcattcgagggctccttggtaaacattttattgcttaattcacattcctcctccctctgtcttgactctccgacacgtcgagaacaaaccaaaaataaaaatccgttcttttccagcgaatttgctcatttttgcaaatgctcaccctgtctgcctctgcctttggaacttgcttccaaaggaggccagagggccccagaggcagagggtcatccctgggggtcgttcctgctttggcccaaggggtctctgggaaggcagctccccacccaccaccacccctggctcaggcctctctcagggaggcaccaagaatggcctcctcctcctgctttgtactacaggagaggacgttccagccagtgttcccgagttcccacagggccaggggaaggtggtcagcttcctcacttgctcatccattcattcattcactcgataaaccttgggatgaaggatggggctggtcggatagatatagtggaccccaaagtctccctgcccacccctgatgccaggaaggccctcagacaccccacctccactgagcaggagtccctgtaagacaagatcaatgcgagacacagcaggcccagcagccactccatgagtgttgctgaaaatggaatctctcatccaacagggacccaggcccagagaggggagtgaactacccaaggccacacaggtagaacagggcaggcctcgggctaggactctgaattctcagcccctcttttcaatgtctcctttctctgcacagaagactctgcagagggacatccagggttactcacagccctcaccggaccagttgtgtggccctcgggcaggtgactggatttctccaggcctcagctttactcttgtgtaaacgggggccgtgacagcatttagcaggtgccaggccctgtgctcagagcccttgacatgttttcatttatgcactttccctactccagagtcctctggggtggatggcattatcagccccgcttactgatgggtaaactaaggcagagacaggccaggcaactggctctgggtggcccagctcatgaagaagaagtctgagatggaatgcgggggcctggccccaaagccttgagtcaccaccagcatcggaccaacctcctaggacctgatgaagctcaggtgcatcatggctgaaggctacgctcagagcctgatgctagctaacgtgcgataccggcgctcagagcctgatgctagctaatgtgcgatacaggcgctcggagcctgatgctagctaacgtgcaatacaggcgctcggaacctgatgctagctaacgtgtgatacgggcgctcggagcctgatgctagctaacgtgcgatacgggcgctcagagcctgatgctagctaacgtgcgatacagacagcgtgtggttctccagggagctggtggactgtgccctcaggggacattgggcaatgtctggagacatttttaggttgtcacaacagagggtaggggtgcactggcctctactgcgtggaggccagggatgctgtaaacatttcccagtgcccagaacacccctaagatgaagaattgtccccctgcagggtcaccagtactgaggctgagcagctctagggtttgtgatcattgttctcaggaggggttgtttgccaccctagaaggtgcttgcatcaactcacccactgtcaggccctgcccaccttgggggcacctctcttgccctcaatcaactgggcagggtgggacactgcttagaagtctgctctctgggtcctccccatgctctctgcagggtcccagggggcaggctgggtgttctgcctaggcagggttgacagcaagtgatgctctccttgtcccctgcctctcaccccaacgccccaaccccatccttacctgccagcagagggtccagcgctgtctcctccatcgccagctcttccatcgctctttcctccatcccactcgcctcccacatgccggcctcgggcttcccagtggcaggtccgaatgccagggccaccccacccggcgacgcagcacctccactgctggaatctcaggtgaggtggcgtggcgggggctggacccaggctgctcccaaattttgcaagtgggatttgcaaaatgagtcagcagggcaagaaggctgaaaaccaggtggcaggtgtgggttaatcattaccccgtagacacttcccctggatgccaatagacccctgagggcagggcctcctccagccacgcccatggtcatgggtgtcccatgatcatttagctgtggacagccagggtcagtgcccaaggatcctctctccctccagggtatggcttcagctttgaaaagccacggttgcaggtggccctgtttcacagcctgcattaaccccctgagcagcgacttccattgcggggccaccctgagtgcctcctttgtttcccaagcagtgtcaggtgcttaacctcctttttttttggatattctcaccaaccctgccctgaggagctgtatatctccatctcatgaagcagcgtggcagggcctggggaggggcctggggaggggcctggggtagggccccgggaggggctgtgtgtagcagcagagctggttaggagcgaggaagaaaacacgtcagggcaagttctttctttccttggggtctctgtttcctcaacggatacacgggggtcacagctgcacatgctttgcagggctgtcttgaggattaaatgaggtaacgagagtagaatgctgagcatggggtcccagcacacagtaggtgctcaaaaaatgttggctgattttcatgtcatggggttgtgtccagcaggccaggaatcctggcctggtttgcttgctgatggtcagcacgtggccggtactgggtgaatttctgttggatgaatgatgatgcccaaggtctgtgcaggccagaggcttgccccgggtgggtctcacgtccagtgatgtgctcctttaagaagtcacactgggggctgggcgcagtggctcacacctgtaatcccagcactttgagaggccgacgctgggggatcacctgaggtttgagaccagcctgaccaacatggtgaaatcccgtctctaccaaaaatgcaaagttgaccagttgtggtagtgcgtgcctgtaatcccagctactggggaggctgaggtaggaatcacttgaacctgggaggtggaggttgcagtgagtggagatgctgccactgcactccagcctgggtgaaaagagcgaaactccatctcaaaaaaaaaaaaaaaaagtcacactgggtccctggtattattggtcatctgggaaggtacattgcccttctttcgggcggtgggtttaaggcagcagtagctaggtgtggccaaggggctgtgcccttcattgtccccatgggccacttgttctgcctgacagtcaccatcatcacagactcagggatggcagagccctagcagcagtgacggcggtgacagcacggtcaccctgcacacatgctgctcacctggtggggaagctgtgcacatctggtggggccgtgagagaggaggtgggagacccctccaggggctgggggcagctctcagctggaagggtgactgccagggggtagcaggcagaacagctgaggacacatttgctgctggcctccccagaggtccactctgggctcaagaattttattctgcttggctacctcagccactgcggatccatcctacatgacctcagagattcgaggaaggtaaattagaagctgtcattggcaaaagatgcaataatacatttcactcattccctcattcgtccattctccttttcagagaaaacctctgctgagcacccacgggttctggaaagggtgtccgggtatggagagaagggatcaaagtagacgcagttcccaacctcatgcagtgcctgaggaagtgcccggggtctcaccggacaggtaaaaatcctattttgaaggtaagattgatgctgttccattttgtaaatctatgccctcaccgcggctctgtaaatgtggtctatgcagacagtacagagttttgctggagctgctagaaatccccttagaattttcttagctggaggttaggctaggccccatccagggtgcaaatgccagcaagttgaagctttgtttagcatttaaagcctcctaatgggttttaaacatttacacttgtcttattattaataccaattactaaaactccaccctgccaactgtgtctctcattttataaatactgtcgggacagaaatgttgcccaaggctattagctgcagcagcaacaggtcttatttgcaaaagaaagtttgcaataaattctcaggggagaaaaaggcacctcacaaatggagctctgaaatttgccctttaagaaatgcctctgttttcactcaagccctgaaataaattttcaggggctctccccacctttaaatcatgaatgtggaagttcaaagccaggtgctgccactcaagggaaccgacggcctggggctgagactgggtcacctctcgggttttagtgtgtatttaaaaagtgacacatggttgtttctgtaaagaaattataactggccttggacagagttattggatgttgggaatggagccccagtgagaactgcatttcttcccagtgccttccaagctgccctgtccagggtctgctataaacagtgaaatgtaatattgccttatttggtcacagagccaacctatcgcttgcagaggcctctttgcctttgactttgtgagaaacgattaattctgtgtccttgttggccaggcagtgggagtgtgcgtgctgcccaggcttcaggccccccatttggatggagttccaagggtctgatgggcttttagtgcatttttcatgcacgcagcggggggtgctgcctgcactggggaagcaaaggacccagatcccaggacctggaggattttgcagaaccagatcaggtgtcagaagagccttgtggggtttttttttttttttttttttggtgcaatgtataggtaacttacacagatttttccctccccctccccccttccccctccccccttccccctcctcctcctccttctccttcttcttattcttcctcctcctccttcttcttcctcttcctcctcctccttcttcttcctcatcgtcttcttcctcctcttcctcttcctcttcttcttttgagacagggtcttgctctttcccagcctggagtgcagtggggccatcatagctccctgcagcctcaatctgctgagctcaaggggtcttcccacctcagcctccccagtagctgggactacaggagtgcgccatgacacttggctaatttttaaaattctttatagagatgcggtctcactatgccacccaggctggtctggatctcctagggtcaagcgatccacctgccttggtcttccaaagtgctgggattacaggcgtgagccaccatggctggccagtttacacagattttataaagccaagctgagtgtctcagagcagagcagggctcagggatggaaggtgtccctggggttttgtggtgtttagggaatgcacaacccgggcagggcaagcgagagtaagaccatcaggctcagggcttgccacttaccatgcaccctggacagagctcattacgtagaggaggggatgatgggtttccattggaggggctgttgtgctgagcccctggggcttgaacttgggccctgttgggaaccaagcagaggactctccttccccaccaggagtagctatctgctgaggaggctgcccagagagggccccgtgcaagttccctgtggggccagctgcctgatccccttggtgcaggcataggacagtcccttgtgcctctctggaaaagcggtcttccctggtggccatctcttgaggggtggtctattgctgggggcccttctcctcaggtcggagccatcatgggggtctctgtaggctcagttgctgttcccatccctgggtgtttcctctaagggacaatctgggatggactgaaccactgccccaggggcgggggacagtgtgattcacggaagggaagaggaagtacaaaggggccatgactcattgggtggcctggatgcgggaggacatcacaaagcaatgggcggggtggagctggggtctgcatccgccagccctgggctcagccttcagtctggccatgtccccgagtgggggccacgtcccccggtgggggccacaggcaagtcagctcttccttagcctctgtttcctcatctgtaaagtaggcttgctgggacctgcctgggagggctgcagtgagaaattcctaagatgaatcggtattgcagagaggccagtagtgcgaaattgatggtgggattaattaatacattaaatgacaaaaggccacctaaattttccagaattccctattatttcacttacagttcattttaatggcacaggagagtgcagcttccaggaagtatcctaaagaaaggggcattctcttcccctttcctctcccagtgccttctggctgaggcagggctgtgatggccggagccacagcagccatttgggatcatgaagccatgaagtggctttgagcatggagacttcgcaacgcagagcggcaaaacgtgagaagcctgtgtctgaaaccgggcgcacccatcctcattcgtgcatcctaggattttttttttttttttcgagacagagtcttgctctgtcgcccaagctggagtgcagtggtgcgatcttggctcactgcaacctctgcctcctgggttcaagtgattctcctgttcagcctacggagtagctgggattagaggtgtgtgccaccacacctggctgatttttgtatttttagtatagatggggtttcaccacattggccaggctgatctcgaactcctgatctcaggtgatccacctgcctcagcctcccaatgtgctgggattacaggcgtaagccaccgggccaggcctaccctgggatttttacatggaaaatgaacaagtttcctttgcctaggacagtgcataaaagtactttgggaactatgaggagctctgcaaaagtgaggtaaggaccccagatccaatttccagggtaaaggacaagtgagtttaccctctgctgctggtttttcaccttcacagtgggtccagcttgaactattattcagcttcccgtctttggcccctcccagcagtgatgcctttgaacccactgtcaccatttggcatcctcactctgtcctctctggacacccagccctccccatgaccccctgcactgtgctccctgccccaggccaattgtcctcccctgttttcagcattcagagtgggactcttacataatcctgggatctgagggggacttcagagagcattggttgcagctctccccagcatgggctgtgccacgtgacatctcccagcctctactgaaatgctttcagggacgtggcgctcaccacctccctcacagcttgatcatcttcggccagctccccatactgtgaaacatttcccacagctgagcaccaactgtatgccttggggcatcctcctccaccctgtgtctgccccttggcatccaggagatccagtctcctcattatttcattctggtaaagcttcccagagcacctgagctctgcagtgctatactaggcagtggggggacaggaacaggcaagggccttgcttcgaggagctcactttctagtgaggaccactacagtgtgaataattatgaaagcaatgagctaattaattgtaacgaccacaagcaccacaaagacgcccacagagctgcgggtgtgtgaaatgggggctatcataaacttggtggccagaaaggagtggtaagggcaggctatggggaccaaccattccgctctgcctgggaccatcctggttttagccctgagagttccacatctcagagaacccccttcatcctggaaaaccggctgattggtcactgtagggcagtctccaagtgtgttcatgtcttgtggctgccataacaaatcacaacaaactgggcagtttaaacagttctgaagactggaagctcaaaatcaaggtgccggcagggtgggttccttctagaagctctgttccaggccacgctccaacttctgggggtagccggcaatcctcggccatccaggtttgcagacatgtgggtctgatctgcctccagcatcacacagccttccccgcatgtctctccaagtcttattcttttctgtcccttacaagggcagccattattggatgtagggggtcaccctaatcccggattatctcatttcgtagtccttacctcaatgacatctgcaaagaccttatttccaaataaggtgatattcacagggacaaggagctaggacttgaacgtgtcttttggggggccactattggacttgctataccagagaaggaagttgttgctgcaaatggaaggacacaatgacttagcgaggcaaagaggcgatgggaattccaggcagaagaaacagcaggcacaaaggccctgtggatggaaggagactgatccattagagaactgaaggaagcctcccagtgtggctgcagtaagagggagaggaagcaggcatgggggcacccatgcaggaccctacaggccacagggaggagtttggcatttttcctgggagaaaagggagcccccagtgaatgacaagctggcagggcctggagcagccctccaagtgccaccctggctgctccagtgcccgagccttgctcacttccctagaaccccatctgccgggccacagttggcaatggccgggtaagcagacagagctacctgcaccacctgctctgggacagtgaaacgtcagctgcagaggctcgccccagagcagcctcgcagctggggatgaagcctgccagggcctgacctccaggccaggagtgcctcctgggggctcggctgctggctccagcccccggtgaggccagccttgcctcttcctcctctctggatggagctgggctgacccacgtgtgtcaggggcagggaggagaaatgcccagctcccatccttgctctgtcccttgtgagccgtgtgattctggagacgttatttacttccttactctggtttcctcatctgtggaataaggtgatgctcgggtccatattctggggtgtgttgtcacgacaaaacaagtgaaaaacctggggcagagctgagaccaggtgagcagtgtgggagagcagagggttctggaggcagccccaccctggcatgcagagctgccttatctccaccatgacctgagatgttgcctgagccatcacatgccactgagcctgtgccccaacatctgtcaaatgaaggaggtgaccttgatgatgataaagatgctggacagtggacacttcctaaagcttcaaaggatgcctggcccttttacaaacctcaatttctcatttgacatttaaacccacttacacccatttagctggtaagaaaactgacacctgaagaaattaagcaactgaccaaaatcgcctcttggtgaaggggtggcactaggacctggatttggatattccaggctagtctcagtgttgagaggctgtggggtgtctgagtctgaggaggccagaaaccccccacccccaccagtcccgacatccctgcctccctgaggacagtggagcttgcacctggctgggctgggctcattcttggttgagatgaggttgttgggtttccagaaacatctctttagaaacttaaaaaaatcctggtcattaagtgattaagtagagaggctctcatggtacaaacatctgatctgagagttgctccttttccaaaaacccttcccataactaagaacagtggatttcattctgcccattaaacttgaaccctgcttatcattttcctacacattatgtggttattttgaattgtctgcaagaatgcctgaagctagcagggtttggcaggcatcccattagatgcttttgtttggacctagagataccatcatagctgtcttacactgagagacttgagaaaaattgaagtgtagtgtttttccccttctaagaccgtcccgggttctgccttctgggctgggatcctgggggaatgcataggagaccttatttgggattattgagttccttggattttatgggcattaaacagtcactctaagcaccatgtcggagctccggtttctgctgcggtaatggcttaggaggctgagctcagaagggaaaggaggtagcagcggatctggtcacagtttggggctgcagtgtggcctgggtgagccacatgacctctctgaactgtctccttctctgcaaggtgctggtgctggtcaccagaggtgcaggacaagataagaggctgtgaaagagagagaggaagtccctggtgctgagcatcttgggaagagtacagagagccaaggcttggggaacactggccatgggccggagctgatgcaggcacttcgcatgctcattcagtcctgacaacagccctattgaacagacaaggaaaccgaggctcggagaggttgggtaacttgcttgagggcacacagcttgggagtgctggagctagagcttgagcgtagatgggtgcctgcacagctggtcctaccaccccccagccactctccaccatttgttagatgcaaagtgcagaggctttgacctgttgctaatagtctccccagcagctctgcaagggaagcttttcagataccttttctgtggggtgggtggcgggggaatataagatggtgcatccactgtggaagacagattggtgcttcctcaataagtcaaacatagagttaccttatgacccagaaattccactcctaggtgtataccccaaagaatcaaagacaggcaggcgtcccgttagatgccttgttagacattcaaaccaaagctgctacatgaatgctcatggcggcaccactcacagcgggcaaaaggtgaaagcaacccaagtgtgcattgatggatggatggagaaacaaaatgtggcccatccacacagtcgggtgttattcagccacaaaaaaggaataatgcactggcatggggcacagcatggatgaacctataagacactgtgcaactcaaagaagccagtcgcaaaagaccatccaatgcatgactccatttatatgacatgcccagaataggcaaatccatagagacagaaggtaggtttgtgtttgtcagaggcagggggagggaaatctgagctgcccctgcaggctggggtgggagccattggaaccagcagcagctgaagggccagggcaccctcccactgccatgctgggctggatgaaggaaggggagcttggggcctggcctgctgggaaagagtggaggggagtgtgcggtcaccccttcctcactgtgatcttaggggccatgcctccttggccatctggtttgggggaaggagtcctgactttggtgccagacccaggtttggctcctccccagccactgtcagctgtgtgcccctgggcctgtaagtgggggactgagaggcccaacacccggaggaggcttctgctcccactgactgggctggcagcctggctcgcatcctgctttcctcactgactagcctcggtttccccatctgtaaaataggggcaataagggcgcctccttcccagggctgctgcacagcagagagaagtttgtgagtgtaaatgtgccaaaaggtggccgggcatccctcggtgaacgccagctgtccctggtccttcctagggccatgatgaaaacaaaggagacagtctgggaaacgtctggggaggaagagaaaggaggccgtggtgctgggcacagaggcgcttctacattcgggtcttccctctgcacaccgctccacccctgagccgttccaggagtcagaggtggcagagctggctgcctccggagtagactgatttgtctcctggtgacagctgtgcctgcaacccttgcccggtcctcagctgtgatgccagcgtccaggaatgcaccatcccacagccttcagtctcttctcaggaagctcatgcattaaagctgaaaggataaataaatgccgcaagctgtgctcaggctgcctgccccgccgatgcaggcatctgcaaacaccagggtgcacgagccacacgctggtgctgtgcaacagctttgacttctccctgttaaaaatggggtgcgaaggaggccctgcagaggacctggcagctccctcattcgtcctggtgggtatggactggcctcacccggcctgaccttggcccaagtgtgtctgggcttctgcagaccctccccaccacacctctgccaggacctccttccctgcacagaccagcctgtgcttgccccctgctctctctcttaccaagtgcctgcctctgcccacgagttatttggtatgtccttctattcttgctttctttcttttctttttctttctttctttcctttctttctttctttctttctttctttctttctttctttctttctttctttctttctttcttttttttttttttgagacagagtcttgctctgtcgcccaggctagagtgcagtggtgcaatcttggctcattacaacttctgcctcctgggttcaagcgattctcctggcttagcctcccgggtagctgggattacaccatgtccggctaatttttgtatttttagtagagatggagcttcaccatgttggccaggctggtcttgaactcctgacctcaggtgatccacccgcctcggcctcccaaagtgctggaattacaggcgtgagccaccgctcccggtccacgctttctcttttcctcctctctctctctcgcatatctccgccttccaccccataccaaagcttgttggagatgtgggccggctctcctcctggtcttcagggatttggataaaagcagattgaaattaaaataagaacctactaggtctagaaaccttgatgttaaaaaaaaaagaaagaaagatattaaattaaatctgtgctcctaattttacccaatgggaagtaactgtactcattaacggaggagcgtatcgtttataggatttttgacctagataggctccaaaggcacacggatctcaggtaagcccattggccttgcacacagaccagggggtcccaagaggtaaggagaagaatgcctcatttcagagccggcctcacaggcgtgggacccctgcagtcccagagagccctgcctcaggcaggccctacgcttggtttcatgctcagcaagctcttaattactttgtcattgaccttgtggttttgagtgagagctgatggagggtgcacgagagcaaaggatacaggtgtgcaaagatgttcacccttcactgccacccatttgcagacagcgtccctggtacaaatactcataaagcacagagtccgaggcacccgcgatgcctgggcgttcagtggagcccaaagtgaggacaaggtcagtgtgcgaaggctgagtgcccgggaccctaacagcccctcgggccacgtattccactcaagccagaattc

SEQ ID NO: 63 - DNA, 169725 bp, Homo sapiens
gaattcatggagtgagctctggtttgaggggtgggggtcaggagagctagactgaaagcctagtttgctctcctgcctgaccttaagccaagtacatcacctctccaggtgtgtgcacctgtgaaatggggactgataaagctggcccccccaggtccagttgacatgcaggtgagggctgctgagaaatctgagagcagtggtgctcaactggggctggttttgtcccctggaggatatttgacaacatcaagaaacatttttagttgtcacactggggctggaggcagagggtgctgctggcatctcatgggtgggtagaggtcaccagggtgcctgcaaaatgtcccacactgcacaagccagctcccaccacagaggatgatccagccccacacatccactgtgctgagacatccactgtgccccacgctagagctcctttattagaagagacctttgcctccctggcctggactcaccaccgccaggcgctgggcctcttggtcctcgcctaccatccaaagggagacacttcagcctcactttacaaaagaggaaatctaggcacaccaaggccatgcggttggttaatggggagcgaggttcttgttccggtccatggtcttggtaaccagtccctgtgtctccataatttggggcacctcgttcttcctccctttgtaaagtttggtttgttcaacttcccactgagttgcagacagcttggcccgtgctctgaggtattcttccctgtgggcaatgccaacgggatggaaataaaatatcgttgaaaagggctcccctgtgctgcctcctaccaggaagccaccctcctgacagcttgttggtctgcgctccttgtcacctgatgcttgcatccccggtgactattaaaatgtccgcaaagtgctcgcttcggcagcacgtatactaaaattggaatgatacagagaagattagtatggcccctgcgcaaagatgacacgcaaattcatgaagcattccatatttaaaaaaaaaaaaaatcagcaaagacacctgtacctgtatctgttggcgcatgccatcaaatgacactgaagagcaacactgtggccaaacaggccagctgggaggcccggagcttcccataatgaaatgcaccatctagacgaattagacaagggttttactaattcatgagcagggaattaatcctgcccacaaaatctgtccctgtggggttttagtgataaaaatcactgagacaaaaagaaaactgggtgcaacagtttatggagagcccccacgtataagcagttagtgactggagtggagagagaatcccagcaaagtgacccataggacacaggcggggacagggaaccagagaagagaaccatctatggaacaaaaaggaccctgtaaacttgtcctggcttgggagatatctccagctacaggaattcttttcccgctcctattttggggggctattgtttttactttgtgtcggtccctgaaatccctagacccacgaacccccggcgaaggccacgagaggcctggaggcagaactggtcctctctggcccttgctgcacagaggccacgctgcatttcctctgcccttgctgtggcatgtccacactgtccacctgggaagacttggggaaggggcgagaggaaacagaatgtggggatactggagagaaaaaaagaaacatagtggcaatagcaaagaaagtggagtcttacaggcaagcagatgccctgagcctggctacagtataaatcacagaaactagaggttaagcactgtttcttgagtaaagccgcaaggggtgctgttggggagaaggtggggccaccttgcctaggagatggccccccagcaggcagcccccaagccccagagccctctcaggccagaaatgtcacttcccaaacctttgggagcaccagtgtgtccagatttggccaagtatatttttactcttttttttttttcatgcaaactgcacctcatagagctctggaaggtctgttggcactcgaacacaaatttgaaaagacagtacattagtattacacaatgttggttgtttaccaacaaagataagtggatggagttacataatcctctgtacatgcgtgtgggattctcccagccctggacacttgaacttttaaggagcagaggctgtggagcactgttcctggcatggatttggccagcctggggcacttctccaaaccctctctcgctgtccaaggtgcagacaaagggtcctttagggccactcagtgcccgttggcaccaccagcctgagaaccaaatagccttcctgcaccgccccaagttcaaggaagtcacagacttgtgcctaaatgggagagtctcactgaggcaccaggaaagggtaggtcatgacaagatgacattagtagtgacaacagtcaccattgctaagcctggcagcttcaggcacgcttaaaactcccatgagaaggcagaggctctgaggcccaggaggctctgaggccaaggaggctggcacaaggtcacaaggctggaaggtgccagagctggagctagaccccaccccttctctccaaccctatcctagctgactccaggttccatgcttggaaccatggcacgctgacgacatcgtggcctttaaagacaattttctaatcacttctgtaggccttgaatgttccccagtggccatttaacaagcaattattgagcatcggctgtgtgaacctggtagacaacccactgtaaaatgagacggaataaatgaagtgctagttggggttcaggcaggttctttggatagacaggaaggcctgcatatttgggtgggaaggggacagtaggggagaatccagcaggacttcctgcaggaggtgctatctgatgcacaccgtgaagaactcataggatgtgagaggcagagggacactttatttccactggatgtggtggccagcatggcccctggggcttaacctgagtatggtcgtcccctggggacctgccttattctccttaggggaagaagacttgaagatctgcagtgtgccagacccctgctaggtccgggggtaagagagatcaaagccaccatcccccccgctccgcccctccagaaagcaggacagccttgcccagcagtggggaaagctctgcaggagccccgccccacctcagaggatgcggactggtccttggccctcctaagcctgagtgtcctctgcaaaatgaggacccgcattccaaccttgcaggtgcggggttaaatgagatgatacacactcacgccctacatcagggacgctgcacgcacctgggcacagaacactaagcactccgtaaactcgggggcaccggtaacatcagtgggctccagggagatgactgccccgggagagactcccccaggagcgcgggcagctggagggggcgggtcggcaggaaccaggcaagctccccggaggaggtgagtgctgagtgacagcaggagtttgccagggtggagggaaaggggcagagatccagactccaatctcagaagcttcactccccccggaggcggaggtgacgcgccacagaagcgcctgccactcggggactttatttcaggtggggctattgaaagttcccccctttcacacccggtatgaaaaccctcaaaaatccaaaggggcactttccctggataaaaataaaacttggaggggcccgcaggaatggaatactttttcttcctgtgtttaaatttctacggaaaatctgaccggcgcggccaccgcccctgccataggcgggcggagagcgcttatatctttaaggcaaaggcgggccggctggcgtccaagttcctgaccaggcgcgggccggcccgcgggaccagcagccgggtggcggcgcgatcggccccgagaggctcaggcgccccccgcatcgagcgcgcgggccgggcgggccagggcggcgggcggagcgggaggcggccacgtccccggcgggcctgggcgcggggaggcccggccccctgcgagcgcgccgcgaacgctgcggtctccgcccgcagaggccgccggggccgtggatggggagggcgcgccgcccggcggtcccagcgcacaggcggccacgatgagggtcaacgagaagtactcgacgctcccggccgaggaccgcagcgtccacatcatcaacatctgcgccatcgaggacatcggctacctgccgtccgagggcacggtgagtgcgggcggccgcgacccgggcgggagggccgcgcacctgcgccttggcgagggcgggaaccgggcggcggcagggcctcctgggaccccagggcgggggccgcaccctccgcgcagggttcgcggcgcccacccgcgcacgtgcgtgccgggaagggcgcgccggccctggccaagtgcgtgcgccccgcctgcgctctgagcgttccgagcgcggcgcccactccgcccagcgcagcgccgggcccccaggcatggcccggcctcggagctctgcggccccgaagccgcctcacccggggctgcagctcggagcccaaccaagagctcacggctggcgccctggatgggaccttcccttcctggctcgcggccaggggtacctgttggggcagccagggtgagggtgatggtgggggtcttgggtgaaggccaagttggtcgccactccacgatgatggtaactgccaggccccactgcttcactatcctctggggccagagtcccgagtcctcacttgccagaaacgcatattgtgcccagggcactgggcctggtaccctggcattggcaccgaaactctcaaagcccagggtgtcaatcattggagattgctttctaccctcgcccctgtctcccctgggcgcccaggcctggttcaggtgggggcactggttggaagccagtcatgtaagttggggaccccatcctgaggtccccaatatccccaccaccctccccagggccagacccagaggtctaggtaaccctatgttttagagaggggggcagaattctcccaggaagggtttggcttgaaggacaaagtttgccggaagaggataggacagggctgggactggctatctcctcttggggtgagggaagctctcagcagcaatttgtgggacctaaggacagaagctcccttctaccttcttcccatgcagaccccatcaaagcccctccccaggcgtcaggcccagcagggctgcttcaagcaggatgaggatggccctggcctgtccctctagtctctggagctcacagagaggcagggaatgaagcgggagcaaagctcctgctttgagtctctgttccagcgacagcagggactctggccttggtcaggccttgcaccccttgggtcacagtggaggggggtggcctgggggcatctcttcaggaaatgagattgcacagagctgccaggagcactgggaacaggtgtagatggagagggagtctacctgtgactcacaggactggccggaggagctcagggattgccatttgatcaaagccatgtgccaggccatgctggcccctgggcaccctcaaagaatgagacagggaaggctccgcccatctggagcttacttaagaaatggtgatggaacgttacccgttatccacggcagtgacagggactattccatagtgctgggccagtgctgtgtcttagctcattgaactctcacaacgtgtgaggtaggtgctattgctacaggcaaggagactgaggcccagaggggcaggtgaccagctccaagtcacccatcagctgggaggacagttaggaagggcccaggacacagaccaggtagctgcagaaagcctgcctgaagaataaacattctggagaaggagctaattctacccataatgggtagggactgagtctttcaaaaacattgcatactcaaagtcccaaaggtgggaccatggaggtaccagccaggagccaggggatggtagtggtggccaaggtgatggagaaatggatgctctgggggtagactagacaagacctgatggtgaactgaatgttcaataagaaatggagcctgtcatgaatagcccccggtctctagagtttttgttccaggacccattgcttatccagacccagaaactatctgcctcctgcaaacccaggtgaaggccataaagtctgcaaagaggcagctgggcccagatgagaccatcagctcctgggttccacacaacacttccgttacacatactttgttttgtgagcttggaaggctgaatcagaggcgcgcgctgtgggaggcagaccctgggagcagcatctgccggtagatggccagacaggctggaggctgcagccatggagcaggggcctgttggtgcagggcaggcagcatggcagggagagcctcccagggcatccccggcaccactcaagccaacagttgttgctcagtcattaccctgagtcacccaacgaaggcggctctgtacacacgagggccagagggcgtgggctgcatttcaaaagttcctatcctgttctcaggtgtgaaactcatacatgcacaagtcaaccacaagataagttcatccaattcaggctgcggttcccagcctgtgacttttgcctctcttcattcccaagttcaagggtggaaatgacttcattgtttctgtgcagagatataagaagaaatgacttgaaagccagaggccaggttgaatgcaatttgtttccatttccctctgttaatctttgagtgtttctactttcttccttgaaactggtggttgtccatggtctgggatctgtgtgccccaaacaagcccagacactccagagatacctgatttgctggtatctgcccagtatttcctggcttatctgctgtgggagatgatctgcttgtagattatggaacgtgccccataatcgtacattgatatgtagtgacctggttttaaaatttttttagaagacaaaggaagtttaaaactgatgttcccttcttaactataatttgaagagtctcaaaaccaaaagaaattttacaggccactgatttcatttagcccattttcagagaaagtgaacattgtagattcccttgagtgatcaagatatttcatatggatatgaattcagttcctggagtaccaactccagagaccagcggaagaaaccagagcccagagtcccaggacagtattaaaggttaaaggacataggattgctttcccccttctgcccttttgttggagtttgaggaaggggttcatagaggcaggtgtggaccagatataggctgccattcatggcgcctgggacaggtcttccaggacactcctgctgtgaagggaacctttgtccttcacattttcccatgtggcctcagggaagtatttctcttccaccatattcctatcttccttagggaggcaccttccaggagtacctccctcagttatgcagaaggaagtcttcaaaataccttcagatcatcgatcacattttatccccacaagaatcctgtgacctaagtccagatgtctttgtcggcatctcacagatgagaaaactgaggctcccagttgggggttgtggtgtttaagttgctggcctgcctgggtctcagcttctgtatccttggatctgatggccacagccagccacagtatacaagacccagcctctgttgttcattcacacatgcctgcattcattcattcattcagcaaccacatattcagtgctaaccatcaaaaagatgaataagagggctgggtgccatggctcacacctctaaatccagcaccttgggaggccgaggctggtggatcacctaaggtcaagagttcaagaccagcctggccaacatagtgaaacccaagtctctactaaaattatgaacattaaccaggcatggtggtatgcacctgtaatcccagctacttgggaggcagaggcacaagaattgcttgaacccaaaaggtggaggttgcagtgagccaagatcgcaccactgcgctccagcctaggcgacagagcaagaattcgtctcaaaagaaaagatgaataagaaactccttaccctcagcaaaggtgcaccgaggggttgcttgcccctttcttaagaatacagaaacagaaatgttctgaagctttcccaggccttcgaatttggaagttatgcacaaagtctcacccacatccctcccactgcaattacatctttgcctttttgtcccgttctacacaagaaaggcacccactccactgctccgtggaagggcaccataaagtcacacgcactggtccttgctatgcattcacctcccgactctctccaagcccagctcaggattgctctccagaccctaggagcctcccagccttttagagtgtagacgggagagagcccacaccttaaaaactaatacctaaacagacaaagcagcttatccagggtcacacagcaaatcagtgacagagtcaggcgctgggactcccacacctgtgcttggtgctgcctcctgctggtcccagcatcacatccagctccttttgtaactttttaaagtctggatttggcactgctaccatctttcacttgtggtccactctggccacaagattttttttcccctgtcctcccctagttctttatgtgcgtgtgtctcagttcccaattagagcaaacttctgttgaaggttcactctatgctaggccctgttggaaactctttacaagatatattaacaggtttcatccttccagcaaccccatgagggaggtcatataacatgaggtaggtcttagggatatggagagacaaaaacacgaagctgtgtgcctggggtcacacagctggtgagtggcagagctggtgtttgaacacaggtaggaggatgcccactcttgatcaggccccagtgctgtctctccctccaccatgcatgggaagttagatgatgtttctgctctcccaaagactgtaggcccctgagggtaggtgtgtcccttgataggcccccagtggacagatgatgggggttcgtattgaacctggtagccttccctgtttcaacttgatagaggatttttggccactccttagtgtaatttccctgctttctggcttggagggatccctgtggaatttcctccctgtctctaaggatttgtttgctattatcattatccctgccaaccaggagtgtttatggagccccaaccaggttctcagtccctgtgtactgaggtcaggttggagctctgtcctaacacatctctagacagtccctggccaggcctccggggtcctgccatccagctttggggctaatttgcaagttaagaacttgtgggtagatggctcagaggcagtcccagcacagagagacctgcagaggccagaggggctggccaccttcagatcccagaggatgctggatttgccctgtgccctgaaaaccaggttgaattacaaagggctgagaaggacagaaagggcgtacagggagggacacagtgtctgcaaaggcaaggaggagggactggggaaggcctgggggagggggagaggagactggggaaggcagtatggggaggagatgaggaggaatagccgaagccctcaggcgcacctgggactcaggcaggtgtgccctccgacccctcgagaccctgcattcacctgctgggcactggcacattccctgcacatgggcttctgtcttccaagagcagcttccggtcgggctcttttgccccctcagccatggggagagaaaagcacctttagtcaccagctccctgtaaccctgcccttgtttgacctccctgagatgttgaggggaaagcgtatctgccattgggtggccatcagggtgacggggatggctcccaggtgcctggccccagaattagatggagcgtccatcctggcacgttctggtcagtgtgtgctgagcttagcagagaccatcatcccctcagtgaagcctcccgctgctccgcatttagcagaaaccaaccctggggctcagagtgtccagagcctcccccaggccttgcagctggagaggggccaagcctagatgtagacccaggtctggctgactacacggcctgccatgaagccagtgccctgtcctgggctggcctcacctgctgccccacactgtccagacatacctgtggcctggtgttgcccaaacctcccgactagcctgtgcttatctgctgtctctactggccctgcttaaccactgccccaggctgggacagaactgaggcctgctaaattgctgcactctccccatgcccctcagcaccagagacagagccctgcactggggtcagccagcaggagtctggtactcagggccactgagctgggcagctcacccgtgggagcctcagtttcctccaggtcaaatggacctaactatagtaaccccctcatagggtcagcttgtggggactcagcgagatgacatacctgggccgagaaacagcgtcacccttagtcgcggctcctactaaggggggccgcaccttgggcgtgcagatgggacttgaggctgagctcagcctcccgcctgcgctgtaacccgggctctcctgccctgctgggcctcagtttcctccttggcgaattgagaagaatagctctttcgtgcttctcctgcagaaggaatgcaggccccccgtgctggctacagacttgcgatactggggtcttccgtgaaccccgtccttcatggggctgggcatgggaacccactgccctcaaaagccagccctcccccacccttccccctgagccctcccaagccacccacccacatgggcgtggtcgtggcccctaagcaccctcagactttgtcacagagggcaaggtgggcggggcacgcacactgagtccaggtcctcctgaaggtcaccagcacagcggggccctgtgttactgtagagagaagtcagttgcttagtttcagcctcctgccggcaccagatgctgaccaggccctcccaggtggtgagcaatgctgtttccaggagaggcatcctagggccagagaggccaaggtgccagggacatggccccaactgtcccctaaccaggggtagaggagtctagacccttgacatcaacacctatgaaaggtggggcagcccccaaccagcagccctggcccagagcctcctctctccttcccctacaactaaaaaggacagcctccactcgaggccttccctccccctctcccccactgcagtgctgactgtttggggaggggctccaccctccggcttccctgatacactttgggttgtatacagcccacctgcctcgaatgagggattctgcctgccccttttcccgaccagtgcacagccatttagagccatggtgcagccggaagctgcccaggggctccaggcgaccacgtggggggaccctccaggccagcgaggcccaagcacagctctgtccaaaggccacaggtgctcgggccctgcctggcgcagcatgccgtccctgcactccatcagggaggccctcttctcggatgatgcccctcgggaactgatagtgccctagggagcgtcctcacgtagccacaggaaactgaggtggaaaccaggcggccagctcgagggatgaggcacagctctgtggaccattagcagcttggagttgcctgttaggttctacccagcatggctttttttattttttcttatttcggaaacccagattgctgatcgacctgtctgtcttgataaccggccaaacccctcgggaattccagcaatgcaggcttggctttagcaatggtcccatcacactgccactgtgggaatatctggtttttaaacaaactgctccatactgctatctcccgtggccccctagagtccttcaaacaaataaggaaactgaggcagggcaggccctgttggagccctaaccccgcccccttggtcaccccagggcacccaccagcggtgcccatccataccagtggctcactgtcctctgcacccaaaggtgactgaccgtgcaggtgctgccgcaggccacgtgtggggaaggtgcaagcgcagggtcattaacaccccaggagtgacccccagccaagaaagggccagagcgggtgcatgatcacccaacttcctcaccctctgggtactggcagtgggatgtgcccttcaaggtcactccgagggtccccagcaggacggaccccagctgcacatagcggtggccgctccttaacccacccctgtcagcctccctccccttcaccctactctggcacctgagatcacctcccaagtaaaacgcttgcacccctggcctctgctcaggctctgtttgggggagagccctgactaagacagtgaaagcctcacctctggacacacagctagttagtggccctgtggccaccttgacatggcactgcctctgacactggccatcagagattgagatttgcacgcacagaacctgagctcagctctgcctcagcccctatccatgtgcatggggagccctcattcacttggtagcttttgccatagcttttgttgctgggggatattttgtttgttcatttaatttttaatttgggtgggtacatagtgggtgtatatatttatggggtacatgagatattttggtacaggtaatgcaatacgtaataatcacctcatggaaaactgggtattttcccctcaagcatttatcctgtgtgttacaaacaacccagttatgctcctttagttatttgtccatgtacaattaaattattattgatgatagtcccctgttgtactgtcaaatactaggtcttattctttctcattattttttgtacccattaaccatcccctaccatagctttttgcaagcagccagggaggttcctgacatccagcctgctctagttccatagaccaggagggcttctgggggaccatatgtggcttggcaccttcatgaatgattagcagtgaatacctccttctcgaagttcagctccctgaaggcagggtcttctgctgtgttcccaggtgtatctcaggccctaggacagtgcctggcccgtggagggcgctcagggagtgtttgttgaacgagtgagtgaggagtgagtggatgaagggagcagcgcaccctccaaaggcccatcacgagcagctcgatggtgaatgggtgtcttttcttccacccttagctgctgaactccttatctgtggaccctgatgccgagtgcaagtatggcctgtacttcagggacggccggcgcaaggtggactacatcctggtgtaccatcacaagaggccctcgggcaaccggaccctggtcaggagggtgcagcacagcgacaccccctctggggctcgcagcgtcaagcaggaccaccccctgccgggcaagggggcgtcgctggatgcaggctcgggggagcccccgatggactaccacgaggatgacaagcgcttccgcagggaggagtacgagggcaacctcctggaggcgggcctggagctggagcgggacgaggacgtaactatctcactgcgcgctgtttgtggggggtggggggtgggctgcgtggggggcagtaggggggcagctgcttccatagtcagagggtgcgaggctggtatcttgttttagctttaagctgttcttaaagaaggggcagacgggccagacgcagtggctcacacctgtaatcccagcacttcgggaggctgaggggggtggttcacgaggtcaagagatcgaggccatcctggccaacacggtgaaaccccatctgtactaaaaatacaaaaattagctgggcatggtggcatgtgtctgtggcccccctactcgggaggctgaggcaggaaaatcacttgaacccaggaggcagaggttgcagtgagcggacatcacgccactgcacgccagcctggcgacagagtgagactctgcctcaaaaaaaaaaaaaaaaaaaaagaagaagaagacagggcagcagacaaaaacactgttcttgttaaggtggggtagaaattgcttttgaacagagttagggagccctgacctgctcctctggccatgtctgctctgggagagggtctggccttcacagccatgaccttcagagtcagagcatcgcctgcttctggtcagctcctttcctgggaagatttgccaatcgggggagggaggacaaagctctcctgggagtcttcctggatggggtcggcccttctctgggcctcagtttctcgtctgtagagtgagatgtgggtccagctgagccctgggagtcgttggtgctctgaagtccgtggctctgtaacactgtgctctgaagccctgctccctagcaaagcctacgaatcttcctagaagaaagatttcaaaagagaacaaaaggtcgacccccctcgagtgcctggctgctgcggggccgagggtgcagctgtgtgcagagagaatgactttagcagccctagcacagcggtgcttccttcagcggctctgctggctgctgtgtgctctctggctgtcatcttaacctctctgtgcacgggaacccttccttccatgaatattgggtgaagggccccagcctacagagccatcactgtgcggattacccaagaatcgacaaagtctctaaaacacatcgaaaacagaaaaagttgtcggcaggttaacttagaaaccatggagtccccagtggatgttgaaaatgaacgttggctttggtttgaaatttcatccacaggcaccaccatgtccttaaatgcttttggtccagtgataagaatgtcctcggagtatttagaccaaaaagcaggttaattagggaacctggagtggaaacgcctctgttttgtgacaagtagatatgactttccttgaaatcaatggaacgtgctccatggggcctccctggaccttggcctagtgagtcaaagggtcttgttgaacctggggcatctgtctgggtctcctttcaccttcctgaggtctggccacccggcaggagattgtgagttcggccacccagatgggtccctctggagttttgagggcaggtgaggagccttacaagttttgatgatcaggaagcaaagtttgatcctgacaaggattcagagactttctccctgcctttgggggcagctgccagggaacagtgtcctgcccgactttgtcttagacacttggaacaggcgagcagtggattcctgatgggttttcgcacggtcctgccctccagccctgtggctttcagaacaatgcggctactatacagggtttgtttcagcatgtcaacttagaactggaggaaggaatcggctccatcagggaagcttggcggccgaggccactctctgggagctgaggccgagagagctggattttgagcttcatggtccttgtgtctcatctgttccccagggtttgtttgtttgtttgtttgtttgtttgtttgtttgtttgtttgttttgaggcggaatctcactctgttgcccaggctggagtgcagtggcacaatctcggctcactgcaagctccgcctcccgagttcacgccttctcctgcctcagcgggactacaggcgcccgccgtcacgcccagctaattttttgtatttttagtagagacagggtttcactgtgttagccaggatggtctcgatctcctgatctcgtggtccgcccgccttggcctcccaaagtgctgggattacaggcgtgagccaccgcgcctggcccctccccaggggattttacactccatcctcattctttcctgactacaactttgagatcttaacgctcaacaggaacttctggggtctagtaattctgactgacttctgccagatcccagaccctccacttatcctgatggaaaagctaggcctcagtttccccatttgtaaaatggagatagcaagagtatttgcatcactgagttatcataagtaacctttgcaaagtgcttaattcagagtctggcctgtggcagatgcttggctgatattgtgtcatatattattgttcatactgaagcggcaagaaggacgagaaaagaccctttccaagtctcattaaatactatctcataaatatctttttaaatattttatattctctatcatgactttgagctaaaaagcaaaacataaggacattggttactgtcaccaaaatgatctagtttttaaccagtgaaatgaccccaacttttcactggtaacttggctcaagggctaaaagaggcttttcagcagttgatctggccatgtttaagatgaaaccgtgattgtggggtagaaacgtccattcaagttttcaaagggctgaagttgagatgttcccacatccctgctggagcctctcaaatcataagctgttttatgaaggcttcctggaaaccccagagctctcatctgagctgcaccagcccctagggctgttggaaggagcgatggtttgggcggcctgttctcctggagaggggcagagccagaatctattaaaaggctgcttgggcacacgcagcgtctgaagtgtgtgtgggcccctgccagcgtggttagcagacagagctgctgccgtgttcatttcagggggaagaagcactcttgggaatgaacctttcccggaggggtgctcagattacaacgagcaaagggtttgcgattttgaaaataagatcacctccaagagagtccagttgcacaatcttacccaactggaagcaaaattcagggcttatgtgagctttcctggggagaaaaatccacagagtctatcagattctcacactgtctatgacacccacccccaaaattatgactggttgctttgaagcaggtgatatttaacagcatccccggcctctacctggccagtagcacctccctccccaagttgtgaaagcaaaccagaaatgtccccagacattgccagtgtacgtggggggcaaaaccacccccagttgagaatccctgcactgaaggctggatgaggaggcagagggagaagaggacatggagggagagaaagggggacagatgagcaagacggtcccctgaggggtgccagccacctctgggaccatctgctgtggccaggactgtgcagcagtcatggaggccactggctgtgcaggtgtgacctggcctttgttcctggggcgccggtgggtgggacacactgtgtcactcctgggcaaagtgtgctgcgagccccacacaggagtgagcaacccctatgccccgtgcgtgcctcctcactgagtcgggaggttcattgtgttgagacatcttgtgacaacctggcagatgggcttggctgagtgcacaacggggccagttcttggagatcggataacagctatgtcatgccctgcacctgcacaggctgggggcttaaaacaacacagatggatgctgtcatagctttggaggtgagaagtgcacaatcaaggtgccagcagggccgcgctccctctaagactccaggggaggatccttcctgcctttaccagctcctgggtctccaagtgttccttggctagtggccgcatcactctaatctcagcctctgtggtcactcggccctctctgttgtgtgtctctgttgtgtgtcttcttcttgtaaggacaccagtcattctatttggggcccacccctacgactttatcttaactcggttacatctgcaaagaccctgtttccaagtgagatcacattgataagtgccaggagttaggacttgaacatatctttgtaggggacaccactcagcccactccagtagctgagatgctgcactgggcaggtaatcctggagttggctgccttggatggggcaggctggagcacgcgggtagcagcatggggcagggtcatggctgagggccagggaaggtctgggggagtgacagcttccagctttggcctggtctgccttgctgcaggacccaggatgcacacaggaactcctgggggtcttgtcaaaatgcaggctctggctcagctggtctgggggacccagcacctggggtggctgaggctctggtccttcccagaccatgctttgagatgtgaggagtgtgggaagggccttttgcacaagccaggagaggcttccccagagcaagacccccagtatccacatgagcccctggagcactgtgtggtaccccaagggtgaccccagaccaagaccccagggccggctccagagagccaagagcctgttgaggtcggagccatgtcccaaagagagacccaggggtgggtcaagaaggcatgggcactcagatccacagggcggccttcaaagtgggtttacaggaggggcccagagacctcaggacagcactgcagggcaggaaagggcaggaaaagagaagggccctgaggcagggccttccttctctctctccctccttctctctctccctcttgatctccctttctctctgtcctcctcctcacctcttattcacctctacctctctatctctctctctcacttctctctgtctctctccctctgtctctctgtcctttctcttttcctctctctgtctctctctcccttctgtctcctctccctctctatcattccctttctctcttctctctctcctttcttccccctctctctctcttcccacctccctctttttcactctaccccctctcactttctctctctccccctctctctctccttctccctccctctctgtctccatctctttccctctccctccccttctctctccctccctttgacagccatggggtcagctttcagggttcccattaaagggactaaagaagatatggccaacatgttttcttgcaactaagacccattagcctttttgaagtccagcctcaaagcctgctggacattatttatgtccatggggtcattgcggagaacgccacacactaaactcttggctgtgtgtgctggggggcggctgaggcccacactgccctgatgttgaacctgacccaggctttggtagatcctgagaaggccgtggacattggaaccctataaaagtctgtttgctttcatgtcgctgcccagggctcaagtctgtaccccactggctcgccgctggttctccacatgcatccccgtagtgggtggggctgtccccgcagcagcatctgttcgccatcttcatggatgctgcttttgaaaagcaagtgagggcggactccatgggagaagggctgctttcagacaaagcccacggctggatgcataggtggtggagacgcaacctcggggctccgagtgcgggttcagaccccgcccagcccctctgagagcccggtatgcggatgtggacccagctcaaacttcctggctgagcaaccctgggcaagtggcttcacctctctgggtctcaacgtccccatctgtaaaatggagttgatagtgtgaccttccttgtggagtggtgggtgagggtcaagagagttaatcctcgagcccacagagggacagagctggccagcgttggctgtaaacgccccttacccacaggcctggggcagagcccactcctcaccactcccagggcctgaccctgctcctgccagaggggaaccgcaagtcccccttggaagagaagggtctccctgcatgtggagaccccgcccctgcccgccgccaggtgaccagggagggtggtggcagggttgccatggcctcaggacagggaagggcagccatttcttgccatttcccatggaggccttgtggatgtgggcaggtgtgggaggcagtcctggggctgcattcattgtccacagggccctgggcactggcaggggctggggagaggccctcacagatttgagaatcgggggtgggggcctggaatttgaggagtctcgggcctaatcccagctcatcagcacaaataaaagcaataaacatgctcatgagacttgtcagttccccactccgtgtgggcttcctaccagaaccatgagtaggtagggcagaatttcgatcctgagctgagagtggcacgtctggcctttgaacctggcccctaacctcacccagagactctgcactaaaacttgcagtccccgttctcccccaggggaggaagaatgggcctcttgcacgatgggatgttaggaacctctagtctattcatgaagctatttctctgctcttcattccactgttacagacttctttggtccctaaagattttatgcctccccagtcttcagctgaggcgcgaaacagattggatgacttttatcatggcctgattttcttttggcttgtcttggtttcatggaaacatatttcttttaaagtgaattctgggctgggtgccatggctcatgcctataatcccagcactttgggaggctgaggcaggaggatcacctgaggtcaggagatcaagtccagcttggccacatagcgaaaccccatctgtactaaaaatacaaaaattagccgggcgtggtggctggcgcctgtagtccgagctactcaggaggctgaggcaagagaattgcttgaacccaggaggcggaggttgcattgagccaagatcgcgccaccacacttcagcctggttgacaaaatgagactgtctcaaaaaagaaagagagagagagagagagaggaaagaaagaaaaagaaaggaaggaaggaaggaaggaaggaaggaaggaaggaaggaaggaaggaaggaaagaaagaaagaaagaaaggaaagaaagaaaggaaagagaaagaaaaagaaagaaagaaagaaagaaagaaagaaagaaagaaagaaagaaagaaagaaagaaagaaagaaagaaagaaagaaagaaaagaaaagaaagaaagagggaaagaaaattcattctggacctttttaaaaattcatgtttttaaagtgaccccaagaccatcattgcacagctctgccacagggcatcccaggctgctggggtgaaatctttgccattctggctatagttctgaggtcctcatctgtgtccaggcccatggtgtgctggagtcatgtccttctggaattctgcaagctggttgttacccgttgctggcttgaaataggccacggtggggtatttacaccatgggaattggcagatgctgcaaatcagggcttccctcgcccccgcaggagcccctcacccccgccggagcccctcaccagcatcttcttgcaccagccccatgtgccttcttgtctttggaggggttgagcatttcccaacatatctgttgagtttttaactctttttatgatcttttttatttctaggagttctatttggttcttttccaagtcagctatgtcatgttttaatagtttcctgtcctttgcagttcttttctatcttgaggtttatgtctttaaacgagttaagcatagctgatttattacccagctcatcctttgctaatcccaagctgagtgggccgatttctatctcggtcacttcagctggttctcctcccggggctgtctcttgccctggtgggggcgggtctgcttcgcttgtctgctagtcattgaccttttataatctgtggggtttcccaaagcctctgataaaggtgaccttgtccagaaaggtttgcagcgttatagatgagagccaccttgaaccaaagccacagtctgaggtgcccaggtcttcacaggcgccatggctgtaggggccagagcttctcagggtgggttccagtcctccttttccttctctttctctcctcctcctctgctgggcacccgtatcggtccgtggccttttaggaaccaggccccccagcaggaggtgagtggtgggccagcgagcattcctacctgagctctgcctcctgtcagatcagcagtgacatgacattctcactgggagcccaaaccctgttatgaacagtgcatgcgagggatctagattgtgtgctccttgtgagaatctaatgcctgatgatcagaggtggaacagtttcagccgggagcggtggctcatgcctgtaatcccaccactttgggaggctgaggtgggaggatcacctgaggtcaggacttccagaccagcctggccaacatagtgaaaccccgtctctactaaaaatacaaaaattagttgggcatggtggcacatgcctgtagtcccagctacttgggaggctgaggcgggagaattgctggaacctgggaggcggagattgcagtcagccaagattacgccaccgcactccagcctgggtgacagagtgggactctgtctcaaaaaataataataataataataataatcaaggggtgtaacagtttcatcctgaaaccccagcattgtcctgtggaaaaattgacttccacaataccagtcctccctggtgctaaaaaggttggggaccgctgtttcaggtcattgaatttcttgtttcttttcctgtggtgcattctttactatgtatcctgggagggttgatctgagtaatctaccaccttcaacagaagcaggaatgtgaaatgatatttctgctgacttacctatcatttatttctttaacaagacatcactgagcaggcctaggaccagaccccatggcaagggctgggattaaagatgtccacagcccagtccctgccccatgcttggggaagagcagtggcgcctgatccacccacggctgcattccttgggtcctcagctcgcctgagactcgagtctggagactgcgtcaggataatgggggatgtatgcttgctccagaagcaatccctcaactgtgcttcatagcagtgtccctgctatggggagccaggtcttcctatgcagtgtggacgtgatcagcagtaactgtggcgtgggaaataccaggcaccggcaatgacctctccaggcagacccctgcccagggactgagagcatctcccatcttgcccgcgtgccctctggagccgtgcgggtggagggtaggagtgagcattgcagggtcaaggtcaggctgagattcctccacatctactgttcatgggcctgggacaaggggctctgggccttccctgccccctcgtccatatttactgaagtggacacatccatagctaccaaaaggttggagagaaggcggatggtagtctgaaagccggggctgtcctaggctggcacagagtaggcgctttataaagtcgggtgccttccctctgccttctccctcactcagtggacatcactgagcctctgctctgtggccactgctgttccccgtcctagggatacatcagtcagctaaacagataagcctggcttcagacccagtgtgccagctcctatccgtgctggaagctggtgccaacggggagagacaggcagatgccagggctgctgaaaactcgcctggtcatgaagggctgaccagggatgtggcactgggcgtcacatgccccaaaagcctatttatggcagagaatgtgaaccccttggggcacccgccaaggctcctggtgtctgcccccgagtccgacggcaggaggattagaccacagcagccccgcgtcctcgtggacagacagggtcagaagagtcctgtgccttcctaatggggccacacggctccccgcagggctgggtgttctcctccttgggagctgaggaagctgcaaacagggaaacggggatttgtccaggtgttctgtgggtgctcgagggccttcgggcccaaaccccaccaacgatgaggctcctgggctttcccctgcacccagtggcctggactgctgtgcacagcacacacccatggttcctgcccgatatgggaggtgcctggcctgctgtgcacggcacacacaccccatggttcctgcctgacacgggaggtgctgtctggggaggcccctctcagtagcactctgaccttcaggcttcagccctccagcaccccgacgccatgattgagggccagacatccatagtgaacaatgccctccagggtatgaagcggcctgtgaggaccagggtaggtgaggaaagaagctcaccccctaggaagccaagggcaacccgaaaaccacccaggtctgatctttaggggtgcaaaccttcaaatcttctagcaatttcgagcccacgctccagctgcagggagtcccatccgtggccaagactggatgatagaagcacacagggccaccgcgtggactgagggtctaggccctcgggccacgggggctgtagcggggaccctcagcatccctgcccactgtgtatccaccatggggactcacttctcctttctgtttgtgattttcttctttcttctgaaacgaaaatgtcagaagcaattccaggaaggtcagagttcttctgggctgggttcagagggaggtttccgccggcatagttagtcactgcactaaggtcagcatcttctgccccctctggttgggggctgtctggggggctgactctgtccccttgcagagccccatggtctggccagatggggcctcaccacccccacggccgtggctctcgacaaagtaggttcatgaacctcaaagaccccagcttgagggccaagagtcggggcagaatgcactcctcagggcgctggctgggggcgaaggggacacggctgtcactcccagtgtcttcctgctggggacaggctgtggtcagcccgggcaccatgctttaaaacatcccacatgtgtttttgccgaactggtctcatgacccctttcccgaatctcaccagatgtttccctgggagagaccctgttgctcatgtaaacgggggtgcatgttttcccagggaggccagcagcagccaccggctccttgaccaccgtgcagaaatcctcatggactcagaggaatatattttgggtctttgcatgtgagtgagcagagcccagaaataaatctgtgtctgcaacaagaaaagacaggctctcccacacgtgggctgtcttttctcctgactcagaggtgccccatgaagtcagtgctgttcctgtgggtcaccaggatggaagacctccacctctccagcctcagtgccctccgtggctccccagcactgaggaggtggcttcaagcttcttggccgaaggagtctgtgcttgcacaggcaggggctcagctggaccagggctgccaagagcaccagaggctcccctgctgggaaacaggccttgtgatacccagtttgcgatgaggaaatgtaggctcagagagattaagtcactctgtggaaaccacacaggggcagggcaggattccagcccaggccacgccgtcccaggcctctaagcacagtgcccactcaatctgcccctcgagggccacagaaggatctgggctcatcttgccggagcccctggcactgcctcctccagttcacgctgagatcatcagttctcagagggagcccaaacccacaccttatgtccttcagccctgggctcccctacaagggtccccacgccgcacattctccagtcaccgtgcctggggcagcctagtcctgctgtctccctgaagcagcttcaggcccccgctcctgggtccgtgctcctgcaaagctcccctaaccactgggacaggcccctgcacaaagccctgcaggaccgcaacctgcagcttcagggtgggagcagaggctgagcggtggcccccgatccacatgctcctggagcctgcgaacgtggccttgtttggaagaagggtcttcgcagagggaatgaagttaaacatctctggatgagatcatcctggatttaaggtgggccataaatccaatagcagagaatggcagagggaaatttgagacccagcgaggagaggaggccatgccatcaaggagccagcagctggagcgatgtggccacagccaggggacgcctggagcccccggaagctgggagaggcaggaaggatcctctcctagggccttcggagggagcatggccctggagacactttgactgtggacttcaggcctccagagctgaaggagaatgaacacccactttggggtcacgtgttacagaagctgcaggaggatcccgcaatggccagcatggcacacgcctcagggcctcagtttccccagctgtgaaatgaggatgatgacaggacctgcctcacaggcttgcagtgaggataaaatgagttgatatgcatggaatgcacgcagcagggaccggcacggaactgacattgagtggatgtcagcctctgtcaacattactattactattactgtattattgcccttcgttcgttcattccataaatatgtgcaaagcggctgctctgagccttccgtgggcagcagggcagcacagaggaggcctgagcggtggtgctggggagaggatggcgtagggcaggcctcgtggacgcagccgggggcctcaccatcagcataagcgaccacggtgggcttcagaaggagcgatgagacaggattcaccccattgccatttgcttttctatcggatcaggaagaagcatgggatgaagctggggtgtcaaggagggtctcccttcctcggtggtcacctgaggtgctggggccccacctttaactctctctgctggacctggaagctttgcccaggtccctgggaccgtcgcgttcacaggcttccaccgaggctctcgctgggtacattgacttgacccacttcagattttgttttcttaaaactcatccccaagtacactttgggaggccgaggcaggcagatcgcctgaggtcaggagttccagaccagcctggccaacatggtgaaaccccgtctctactaaaaatacagaaattagctaggcgtggtggtgcatgcctgtaatcccagctactcaggaggctgaggtaggagaatcgcttgaactcaggaggtggaggttgcagtgagctgagaacacgccactgcattccagcctgggaaacaagagtgagactccatctcaaaaaagaacaaaaaaatgattaaaaaccaaaaaaaaaaaaaaaaaaaaaactcatccccaagtgactttggcttcattgctttttgtcaacaagctacaatgaacctatgtacttgtgtcagacactcaaggggtccagaacccaggtcaggccctgagcctgcacctggtcgctctgcacccggaggggatggatgaggtcccggccggcactcgctcttcctcccgtctgcctttttgccaagacttcccatcccttcctttaaggctcagaattgtggaaaggagacgtggatgggacctcagtctggaagcctctgtctgacccccaagccccggaggaccaaggcccccactgcctttaggcagctctggctcagggagactcggcactgtttcccttctcgttgcgtcagcaccctgggcagctgggtggtctcagggtgacaggaaggccgactgatgtgacatgtgtctttgatggggaaatacgttgtggctgcaaagatgctgctcatttgctaaagggactctattaaacgcgaaatccagaggggagagggaaagctagagacgctggggccatctttgcatctgatccccgattaagagtggggagtcagggcagtgctgcctgtgtttgagcacagctccaccctgctagcagcaagactgtaggctgtggtgacttcatctcccccagcctcagtgttcccatctgtaaagggggcctttctcatcaagctggccatgaaggttgatggagtcggttctcatgaagcccctagctggtgccgcatcctcgccagccagcgctcggtgactctctgctgttcactgttgccattgaggaccagagagaggtgacttggccaagctggcagctgtttagggagggcactggacttgaactcgggcctgccttcaagcccatgcaccaggctgccattctctttaggatgaagtcagtgcagatacaagggaacccgggcagtggacctggagcaggcagaggtgtggccctgacccacaggggaagatgcccagaggggggaccatcttcagtcgtcccctcctcggcactgctcagggacccacaggtccctgagtgattccaggtggaggccgaggggcctgggctctgcatcctgaaaggtcctcttttgtggcctagcctgctttgggggcccttggctaaaccctcctgaaaacttccctggtgttttggagtctatacccaccggggatcctcctctagaccctcctggctcttaaagtttcccgtatgacctgggggagctcccacagccccctgcacttcctcccaccttctgctaaagggaattctagctttgcctcaaagtgttgtcaacgtggaatgaggccgcggtaaaagcagccatgcacagtagctgctcgataaattgtggtggcctctgaagatcaaggtggttttccacagagatgcaccgccccccctcaacccagaactttccttctctctccagactaaaatccacggagtcgggtttgtgaaaatccatgccccctggaacgtgctgtgcagagaggccgagtttctgaaactgaagatgccgacgaagaaggttggtgttgatggtcctgctccgaaatgaatcgccaagtctagaggtcacttggacgcctggcagtgaaacatgccgacctcgaggccctgagttttataaaaaaaaaacccagtgggcttcacggctacccctgcaaagaccatgtggctcgatgtgacaaggcccccaggctctggggtcctgaccgtggtgaatatgacccaaccctgggtgatctttagagaccccagaccaaaccccaccaagagatggtgcaggcagaaaagcccacctctcggcccccggggaatttactgtacttgcagacacagttacagttcgggccgtggtgctttcgtgtttgtggcatctcagctaatttatcagattcattttaattacattttctggcttacggggatttttctttttaatctgtgaaaactttgtatctaaaaagcagtttgacagtgtgttcccagaagcttagcttggagtcggtatttactctggcaggcggacgggtgaagccgggctaggtagtaaatcagcctcctgcttctcgcgtcctcagagaccacttggattacctcttttgaagcaaaagtaaagtttagcggggaagttctctggaatgcattgtaattgtgcttttggctgggcgctcctgaaactctgggctttcatggcgtgggcggggtggggcggtgcattctggcccacccaggtgctctgctctcaggacgccccgttgcatggggtgggatggttctctgaccatccgagaacagattccacggatcatggtccagcagggtgacgcagctccccggtcccttgtcttatctgcagatgtaccacattaatgagacccgtggcctcctgaaaaaaatcaactctgtgctccagaaaatcacagatcccatccagcccaaagtggctgagcacaggccccagaccatgaagagactctcctatcccttctcccgggagaagcagcatctgtaagtggggacccccagcctgctccccaaagggtcctgtgtgtggggatttaaccttctagcatgagaaatgcagattgattatctgtcccccaaagaagagcgtgttcttgtaagagctttgtggttgctgagcccagaagaggctgtggaaatgatttctaagatcaccgttaactgatgagttagggggacacagcatcttgttctgcttggtgacgcaggaaaaacttctttggcctgagtgaggaccccaaagcagtggtctagacatgccttcccacccgctccgcacccctgccccgccaccccatccccctccagtgtctggccaaccaggcctcctgcagcccaggcagccttgagccccagtaagtctcactccttgtggcagaaattgaaaagcatccccaggcaggaggcctgaggccccagggactcaccgccagctggcttgcctggcagggccacgtctattctggaaacttccctcctcccgaggggcagtggggcgtagccacctgggtcagcagtgactgcaaggcctctgctggcctcactgggcggagctggagtgtgagcagaggtgggaatagaaagcttgagtcatgggaacccagagggactttggatggaagctctggcgggcaggagggctcctggacagtgctggcctcacagggtcgggggcatggaaaagcagacagggaggacgaacaggtgcctcagctcacaggggcccttgcttataaatgtagtaggggtggagccatgagcatcactggatgcatttaccaggtcctgattcctagagcggacaggacatgccaccagagagaaggaagcaacccccaagcccagccctctcctccagatccagaacaggggcttggggcattagaggaaaccgccctccttccaggacccccgccgacctccctcgtctctgccctgggtcgactctgtcagccctgctgcctggacagggctaagctcacctccaggctccgtggaggtggaaactggcccagccgccctccccagctctccccgaagtgccttggagagcagggagagcagggagtgtgttcccaagatgcccctccaccctcaggaagcctcgggccatccctatgcagcccatcaggacccaaaccattggaaatacagggagattgttttcaaggttggagctgtctgatggtggcggtgatactgcccctgtcccccgccttgttgaaacagagactttcaaaactgcccactgaggatgtcatcaaaaggaagcagggatcttctggggggctgtggggggtggggggctggagggtggtctgaccgtactcgcctcctaggtcacttcccacctatgtgggtctcaggcctcgcccaggtgcgggggcagtgaaacagtctgttccaaatgcccaggggcggacgggtcatacctggcgtgcggacagagttctgtccatttcacggtcacggctaatggggacagtgtggtttcccagggccttgaaacccagagaactgccagctctggtgaactgtgtcttgtttccttcccgatatttccacagatttgacttgtctgataaggattcctttttcgacagcaaaacccggagcacgattgtaagtatcgcacgcgcctggaaacggctcactggcaagatggccctggggatccagatgataatttcattttggtgaaactcctcccggtggaagccggctctaattgtctgtgacagaaataattagaataatgaaagggagagggcaacgaggggcccaggggatggtcgtgccccaggcaggggcagctgagaggaagggaatcagcacagagcttgggaaagcaggagggaagccagacccctggagtgatttcaaaggtcggtgtttctggatctgtgcagctcccagcacatgtctcagagccgcctcgtggtgggattgtgcgtgcctgaccatcaggccacgattcggggctttcagggcaggcaggtgtgggcaggagggagggttggtggaggcaaaggcgcgtgggttgagatctctttccaggcctttgccagaggagccaactgaggtttgaaatctgaccaggccaccctgccctattcaaggcactggcttcatgtttatccaacctgtccaccagccaagctggggctgtgcatggctcaggacccaacttctatctaaacaagaaattaacctggcagccaaactttcgctgttattctctattccctgcccagaaagcccagcctggccgggcagagacagagggctgggaggagacagtcagggtgaccttgtccagacaactactcctcatgaccaccacctgagactggcaggcagccagcaggaggtcggtgcaggtcgtaccagcacggggggttctgagccactgctgggacagacagatctggggcagggaggagggcatctctctcccagagaccctggaggccagtttctaaatggccaacatgctccaaagaaactgataattcatagctttggccttggttagtcaggcctaatagtcatcaaaatccaacagcctgcagggttggctgaggttctaggcaaagccgtggagaactgacagcccttccccactcctctcctccacaccattcaatctgtcctggcattggggtggtccagtgtgcaagtggataggagtcagagaacagcagtactcgatagggagaggcccactgtgctggtcttggattttagacctttggcctgtgggcgctggggagccatagaaggttgtggagctaggttgaggatgtggtgagatccgttccagaaggatcactgccagtggccagctgtgggagggtaaatgactggtggatgagggctggtggcagtggtcataaacatgggccataactgcatgtggaagggaggaggtggttacaggagaatcagcaaggtcagaaccgattagatctgagggatgatggggagggagccattgagaacagcctagtgggcgattccttccttcattcagcagggatgtattgggcacctgctgggtgggagaaaagaggcactgaggacatttataatccggcaggtggggagaggcaagctgagctagaagacagagccaccgggagggtggtggcctcaaggcctggttgttaaggggaccctggacctattccaatctgaaggggacaagtgcttctgggaaaaggaacagccagggcggaggccctgtggctgcaggagtgagtttggaaagtgagagaggcagccagggggcggggttgttgggacaggtgggtccagtggaggcggcggggcggggaagcggtcagatggcctgggccagggggaactggaaggacgctggccttgcctgagagagtggaggcagaattggcatgctctgaaatgcacgtctgcatagcacgaccagttcttctcaccccagtttacagatggaaaaactgaggccgggagtggtgatgtcgctggtccaaaatcacacagctgcaaatggcagagctggcgccaggttccaggcagacagactcccaagccggagctgctgaggccaccaaacaaaacacgtcactagtcaaggggcaggcagccgggggggaatcccttcagcagggctctgcccaggcaccaggaacccagagcccgatgatggccgcctcctgccaccgtggggaatggatcccaaggcccgccccaccaccaccacccctgatcccccagagtcctagaacattcagggctgtgtcccagagtggtgctgttccaactcagctctcagcacgaggggaccgtaaatccaccaggcagggtacgtggcacagctgtgacacaggacaccagcactaggcccaggagggcacggcagtgctttgctggggccaactgccatgactcccacgttgggaggtgaaagatgggaactgcaggtgcacctgtttctccctgagaagctcaagcctttgacagtgttgagaatccggagctgggtcaaccctccctgaataaatgccattgtctttccttggaagatagcaccaaggaggtcttcatgcgtaacgtgtgaccaggtcctctccagccacagcagactgtttctgctcgtggaaggtgccttaagtaactgctcaccccccttcttgtctctgcaataggtctatgagatcttgaagagaacgacgtgtacaaaggccaagtacagcatgggtaagcacgtttttggggcttgagatcagcattggtttccaagtcggaatctcacctccgagtcatctctgtgggaggcaggcagccggcttggggtgtttaagagggttttgatttaagcctgtgtaacagttccagacaagagggctgggttgggagcgtgcagggcagttttatggcccagcacttttaaacacaaatgtatccttcactttggcctgaggggtttgtgagcgtgtggacaggctctccctgcacgggtggtaaatccaggctggaaacagaccagtgttagggatgaccgggggattcctggccctctcttgaccctcacggtccagtgggaagtaattggggttccagccggggcggcatctccatgtggctgttccggacccttaaaagcacagctgggcttgctgaaagcagcgccccctgaccaggcaccaccaggtacagacagcctaattccggaagctgccacaaaaccatcctgaccaggctttctgggtaccagtttccagaaccccttaagccgtagatacaaaatcttcccaattaaattgtgtagctgggaaccaccccccacagtgggtcccttgcccacagctgcaggcagtttgtgaaagccagaacattgcagagcaaaggaatgccatttccagcctttcctcccctccttcttgagctgtcttatgacctgctgagagccgtgccatagggtagcatccatcactctgtagaagcctctgaaaggatgaggccatggctcccgggggacacagcaggtctggtgaaagctggagtctgtgcatacaggagggaccatcttgctgccttggcttcccgtggtggcaggaatgctgtgggaagtaaaatgaagagcagtgggagtcaagggctcggaactggaattcctgaggtcaggcccgggagacagagagaagacgaaccctcgacagctctggtggctgcttggccccagaccatatggcctgtgttcactcacagggatacccttgcaggcctgaagtctctaagtccatgtcctaaggcaaggggagtgtggaggagtcccatccagggtcaaaaggactgagatcctctagaatggccaagccctagtacacacgactgcagtgaggtcaggcggaaaggaaggtgacgttgggagtttgggtttttgaaattgctcctctaggtcaccgctgccagggcacagccttggaaaggtaactagaggtaaggaggaggcatggttctggtcccagggccgggtcttggacctcggtttcccccctgggtccctgcagcgttccttccagtagaaacgtgtatggttgcaatagaagtccagcgtcttcaggctgcatggcccaggctgattctctgctcgggtggtccctggggacacagggtctctgtgttcccaccggttttgtggcggggctggttccctgcacctggtgacggggcagatagatgcgggtcctcctcttcagccctgcttcaccatgacaccttgtctgagagtcgacccacctctaaattcatccgcaagtgctgaggattcccgtcacctgccaagttgtgtcccatagtcttgcaggatgagcagggtggggctagctgcgggatttaggaactgtgatgagagaaggccttccagatggagggagtggcacatgcaaaggccctgcggcaggcagcaccaggttagcagcattccagcaacaggaaggaggccagcgagcctggctgagggcctatgttcactttctttttttttttttttttttttagacagagtgttgctctgtcacccaggctatagtgcaatggcacaatctcaactcactgcaacctctgcctcctgggtttaagcaattctcctgcctcagcctcccgagtagctgggactacaggcgcccgccaccacgcctggctaattgtttgtatttttagtagagacggggtttcactgtgttagccaggatagtctcgatctcttgacctcgtgatccacctgcctcaaccccccaaagtgctgggattacaggcgtgagccactgtgccgggcccccatgttcactttctattgcagacaaacttttcactcacacatgtggcttaagccccttcctctggttttgacttctaagcatcccttagtcccctgatcattccaggtcattgaccacagagatggcccattttcaaggggatttcgggaggtcattttcccgccgctatcaggtggagtctcagagggtggtccgcccaggctgctgtgaaaaacttaacgctcttactgcctaggaagcctcttcagccaagcagggggttccatgagcagcaaagggccccatggaaacgcccccgcctggctgggcccccacgatgtatttggagcaagatctgatttccaggaaacccttccccacacatggccctggctttccggtcctctctcgcagtctcctggggctgggcgcccgcatgcgcacctgttaggacacacaggcatggtgtttttataatgtgcccagtgcaggccctgggggccacgtaaaaaggggccctgccagcattccactgcctccaggagcactggacggctgtgagtccgccagaatcactggccactgacgcttgctgccccaaatgtagctttgatcctgtcaggcccttccacctcactaatagccaatgtataaacagggcaaggcgagggaagaaagaaggactccgcccttctaagtaaaaggcggaaatgtgggaagtatggtaagtgtgggcctcctccggctttcccaatcaacctaaaatctaattccaaattgtatgtgtgttttctgacaccatcaatttttccatccgtatatttcctcatgattcagcttctctaaccacttacaatccaccttccccatctgcaggcttgccctcggacaggtggggggagccggtgaatcggaggcttggggtgacagtgaagccatggtccgctcacaccgcctgcctctgagacagagccgcctcttggggttttctctgtgtcttcctaattctgccaatcgagcatgtgtttcgtcatctcctagttgatagatcaataacccagctgcaccctgtcattcctggggaagaaaccccagaggtggccgggctctgcgtagtcaggttcgtttcattttgagaagctcttagtggctgagatggccctgtgaccgctgtgactttacaatgggaagcgggagacccgcctgccccataaccttctctctgcctctgtttttaaggcatcacgagcctgctggccaatggtgtgtacgcggctgcatacccactgcacgatgtaagtaaccttgacacacgatttatctctgcgtcatttgactccccaaatcccgccgggccacacccccccgggagctgcaattatcctgtggtcacagcttcctgcttggctctcgctgtaaatgtcaactgtacacaggccttccctgttccccgggtgggggccaagaagttacacacagggccatcttttcttgcaaaacaatcccaccaaaacgggggcacgggtggcagctgctcctgcctcgacttcctctgaacctcgtagccagcgggtccacagaatgtctttcctggcctgggctcccctacccccagctggcccggggctctggcagaatgaccagggctctgtacgtgtctatttctgcagagcaagtggccagcttcctgagctgaatctccagatcccactggtatccctttgacaaatatagcccatgtcagtggctgacttggggtggagagagagagaagattgtcttcttgttgtctctatggaaacagggactcaagttcagcagggcactgggaatgggcctccgggcctgagcagtgtgggaatcccagacagaggagctctgaaactttgcaaatgtgcaaaggccaggagccaagaagcaggagagaagggacaggcctgggactaaggagacccagattccagtcccggccacttacctgctcctccgccttgagtggtggagtcagccccttgtctcactgagcctcagtgtccccatctgtgggtcaggaatcataacttgtcctaactcctcttttcttttctttttttttttttttttgaaacaagacagagtctcgctctgtcatccaggctggagtgcaatggcatgatctcggctcacggcaacctccacctcttgggttcaagcaattctccagcctcagcctcccaagtagctgggacttcaggcgtgcaccgctacacccagctaattgtttgtattgttagtagagatggggtttcaccatgttggccaggctggtctcgaactcctgacctcaagtgatccacccacctcagcctcccaaagtgctgggattacaggcgtgagccaccgtgcccagcctaattcctctcttcttgaggaagaaacaatggattagacaaacttgaggtgcagggatcccgcagggcagttcaggggtgtattctccagacggttgaccccaagggaaggagtctaggcagatctgctgcccgtcacctcgtcgcctccctgtcagggcctcctcctcactgtaggtccggggattggggtggttgagcagccccgcttcctcccttcgtgcattcacacatgctgttccttctgctacggtactcttccccgccccaccccaccccaggcggacagaagcacccacaccacgcctgcctgttgccttcctccccaggactagtggcttcttcctcccttctctgggcctcagatggtccctgtcctgcaaagacaccaccgtctgaccacctttagttatgtgtgtcatctcaaggaagcccaagcactcagcacttaataagtgctcaataaacgtggtgttgattgagattggattgagtcggtttgcctcggccagcgacctgctgtatggggaggtttcaagggcagagttcaggcccctagaccagggcagtggctccgggttcctgccctgaagccctgagtctggaggagcccactcctccattctgtcaggctttcctccagaggacccagccggtctggttgttctgtcccaccctgtgtaggctccggctgggtgccaggaagacagccctgcctggcacagcccatgatcccaagaaggcagcctagagctacatccatgctcctgattgacctttaagcaggtaatccctgctgagaggctgaggcaccgaagccaaaatgtttccggccctccctgcttgttttgagttagccctttaagtcttaaaagggaaaggggagaaatgaacgtatctgagcacctactgtgtgcagagccctctgtttagaaggaactgtacctcatataacctgtgcagacacagagactcagaaaggcttagtaatttgcctgaggtcacacagcccctttggaggagctggggccaaaagccgtccctagtgacactctgcaactccagtgcctcgctgtgtccccacctcatcccgtcatggaggccaaatgcatccctcttcttggcagccactactgcatttgtcttagggattgactgtcaacagtttaaattgactggcgcaaaactccctcatcagctggatctatttattgtcagagagccagcctcacaagaagcatctccaagatccatgcagacaatctcctctttcaaaatcttcatcgtgccttatgcagccatgtggggtctgttcccaccttaaagatggagaaacaggctggaggagctcagaccacttgcccaggggcgcacagcccagaaggagtggagctcggaagccctaggctgtgggtggcaggtatccttagggaatatggaagtttacagccacagattttccatatgactgaagggcgcccgtgctgctaagtaccaaagctgatgtttaagcatttggggagatgactggttctggcctgagccgcgtgcacccatgtccttacccagaatactgactgcagggaagttcaggctggcctcggtggccatggtgaggctctcactgcatgcagtgtagttctggctttacatttttgcttccatcttcctccccatgaagctgtcctgcatcttacccccttccaatcctgtgcttactgcattcattcattcattcattcctcaagaatatctggtcggttgggcacggtggctcacgcctgcaatcacagcactttgggaggccaagacgggtagatcacctgaggtcaggaggttgaaaccagcctgaccaacatggcgaaacctcatctctactaaaaatacaaaaattagctgggcatggtggcacatgcctgtaatcccagctactagggaggctgaggcaggagaattgcttgaactcgggaggcggataacaacctgatagagttgtgtgtgggtaagagtcacatgctccaactgagaccctgaggaagtctcctggaatcagagtgtatcacccgtactgaaaggactttgatatttatgttggctacttggcggccttttggctttcttcctgactaacgaggtcaccagcataaggacctccgtataaatgaggtgctgctgggatcgcgtggctgtctcatccatggaaagaaactgggaaacactaaaaggagtcaggcttgggtgggtgaggatcccctgaagacttaggaggaaattggttaaactgctctcagagcgtcttcgttccaagaccacctgcatttggttgcttgcttgagtgtgtggtcaagtcgtccccacctggcaggggttagaaggggtcatggaagttgctggtgaggggagagggcactggacagacccccaggagccccatagctttgtctgcctggatattcttaaaacccattggccaggccaggcgcagtggctcacacctgtaatcgcagcactttgggaggccgaggcgagcggatcacttgaggtcaggagtttgagaccagcctgaccaacgtggtgaaaccctgtctctactaaaaatacaaaaattagccgggtgtggtggtgggcacccgtagtcccggctacttgggaggctgaggcaggagaatcacttgaacctggaagcgaaggttgcagtgagccgagatcatgccactgtactccagcctgagcgataagagtgaaactccatctcaaaaacaaaaacaaaatcaaaacaaacaaacaaaaaaaactattagccaggccaggccagccatgccctgaacctcgacagggccgctcccttgctgctcctccccagttacttttgtcaactgtagttatttggggctcactgaatgacagttaagtatcattttgagtgtttgtgagggtaacgtgcacatagccataggcagtctagacccatgatgttccaagatgggctttcaacccttagacccttctcttcctttaggtttgaaggtctggatccaagtcagggtctgaccgaacttaggtgtgtgtcctcagaaatgtcagtttgcttctcggagcctcagtgattccatctgtagaatgggagttttggactcactgattagatgacaatgaccttgtcatttactgtccctcttgggatgctccacagtgagaagggagcaagacacggactgtcccagcagagtgggacatatacgcaccctattgatacgactcttcctgcctccaaaagccccctttcatttgtgtttctggttccaaggacccgaccgtggatcctctcctagagtcccctctgtgtcgagggaagaggcggctcaggccgtcctggtggtggaggccaacagggcggccaacagggacgtgcacggcctttctatcataacgggggcacacctgggcaaccctcacactctgtgtgaaatgttgccccaggatgatcttaatttgtgtcaacgagagctgctggggtttatgttttgaaacataatggatgtgagcgcctccaaagctccattggatgataagaacgtccctttcctctttttttaacagggagactacaacggtgaaaacgtcgagttcaacgacagaaaagtaagttgatggagcggagcaggaggtggctctgtcagagcctggaggcgttctggggcggggtgggcctgcagctggaccgaggacttaccggcctccagggcctccccagggcgctcgctgcagggggctgagaagcgggtgtcccctctcaccttttcaggagaaaagtccgtgagctttgtgtggctggtttgttttcctctttctgattgtcaaaaatgcccttggcaggtgaccgtgagcatgggaaagggaaagctgtcctcccagagcccactccttgcacgctgtccttcccttatcttctcgggacaatctgaactgtgcctgggcctccagcagtccttgctggcatgtggcctaatcccacagggctcccaggcaaataaacttgggaaccactgacaccaggtgcacagagaacaatggcccccagcagcgcattggggaaacctgtttgatggtggtcaatgaagtgtttctcaaatttacctgacctggaacccttttaatggagaagttgttgagctagtgttctagggaacacactttgggaaacactgggtgacccctttattcttttttctttgtttctttcttttttttttttttttttttttgagttggagtcgcactttgtcacccaggccctctgcctcccgggttcaagtgattctcctgactcagcctccagagtagcttggattacaggtgcctgccagcaggcccagatgatttttgtatttttagtagagacgggctttcgccatgttggccaggctggtcttgaactcctgacctcaaatgatccaccctccttagcctcccaaagtgctgggattacaagcgtgagtcaccgcacccagccagcccctttattctttagtggctgttgctaattttcctcactccccaaagcgttggtccccaccctctacccctcactctgagcatgggaactccacccttcccacccaggctccccaggaagctctgcttctctaccatgcccccgaaaagaacatgtccccaccacatccatttgctcttccctcctctcccatgggcccacacccgataccagccttccccccaggtctccacgtcagcctctgttccccaaatgtgcccagctttccctctcgggaagcagtccttcctggaccctgcatgtgcagcccttgccctatctgctggtccttccacaggtggtgggtagagatgcttccctgacaacctcacaatagtggccttgtcccaattcccaggggccaggacctctgtgtatggaatgttcttcatttcagcctcccccacaggcccccatacatgtttttaaatctttggtacttgatacaacttgcccgcctgggaatccagatgaagatgctatctaacttagcacaaaaattacatatttggttatttttagtgtaacatctggcatcgtctgggaccccatgacttgcagaactcccgactccaatcctgttggaaaaggaccatcccctccacaggcctgtcctgaccaattccagcctcagagtccagcccccttcatccctccgcacccctctggcacttggcagatgcctatcctccccctaaaaatgcttcttccatggacaccagtagtccctttctagccgaattcagttctctgggtcacaggcccctgaaccctaccccctcttccccctcctccccctcctccattctccagccacactggctgcttttctagtctcaggattgcttggctgatggtcacgtcagtgccaggactagctcattcagttacttattcatttgagaaatacctactgggcactactctgtgccaggcccagcaaacacaatgcgggtttgtccaggcccagctgtttactctacctggaatgattcccactccccatgtaattttaggtcccagcagtggatacaaggcctggcccatgggggtagtcaaggagtaatgaatgacagttgggtggatggatggattaatggatgatagatggatggatagagatggagatggataactgaatgatggataatggatggatggatagatggatggatggatggatggatggatggatggatggatagattatggatgggtgaatgggtggacggatgaatagatgattgatgggtgggtgggtgggtggatggatggtggagagatgaatgatggttgatggatgagtgggtggatggatgggtgaatgagtggatggacagatggatggttgatggatgggtaggtgtgtgggtggatggatgaatggatgctgaagggatgaatggtggatgatgggtgggtgtgtggatgggtggctgatggaaggatgaatgatggatgatgggtgggtgagcaggtaggtggatggatgcatgctggagggatgaataatcaatgatggatggatgggtgatgggtgggtaggtgggtgaatgggtagatggatggatggatgctggaggaattaatgatagatgatgggtgggtggatggatgatggaaggatgaatgatggatgatgggtgggtgagcgggtaggtgaattgatggatgctggagggatgaataatcaatgatggatggatgatgggtgagtgggtgggtggatggatggatgctggaggaattaatgatggatgatgggtgggtggatgggtgatggaaggatgaatgatggatgatgggtgggtggaggaatgatggatggatgggttgatggatgatgggggggtgggtgggtgagtggatggatgctggaggaattaatgatgggtgatgggtgggtggatggatgatggaaggatgaatgatggatgatgggtgggtggatgaatgatggatggatgggttgatggatgatgggtgggtgggtaggtgaatggatggatgcctgagggatgaataattaatgatggatggatggatggccgatggaagaatgaatgatggatgctggaggaatgaatgatggatgatgggtgggtggatggatggatggataaatggatggatgggtgctggaggaatgaatgatggttgatgggtagatgggtggctgatggaaagatgaatgatggatgctggaggaatgaatgatggatgacgggtggatgggtggatgatggaaggatgaatgatggatgatggatgggtggaggggtgggtgaatagatggatgccggagggatgaatagttaatgatggttgatggttggataggtggatgatagatggatgggtggatggttgatgggtggacaggtaggtgaatagatggatgccagagggatgaataattaatgatggatgatggatagatgatggagggatgatggatagatgctggaggaatgaatgatgggtgggtagatggatgatggaaagaagaaaaggagggaaggagggaggattagatgggtgtttgggtcctaactcagagctgcagggaactctgcattctgccacgatggctccacatcacagcctggtgccaagtttttgcctttccggtgacagactccatggcttctccattattgttctaatcagtggcaggagccccacgtgcctgaccctggatacctcacagggcagaaatgaaagtgcagccaaggacatttcaatgacattttcctgtgctgagctggagggtgggcagaagagagtgtagggaagtttaagcaggaggcaggtctgggcagggcagccatcactcttggcctgatcatggggccacaaacatgtaggagtacttgggagccccttcctccaggaccgtgggtgagttcacacctacacagaactgaaccccaggtgagcaaggcacgcccccagagctgtctttggatgtgcagaaggtgttctggtgggcagctgctgcctccccctgccagggcactggaagagtaggaccacctgggccctgttggggagaggggtggcttgggttgtgggggattgattccaggtgtggactgaggtctgctgcatccctgggctggactaggagccacagagcccaacatgtcattcatccatccattcatccattcattcaacagtcacttagtgaaaacccacaggccctgttggaggcatggagggtgagaaggaccagacaaacctggtccctctggtgtctccattctagagggaagggcaacgggcaaggacatacaccaattaaagattgcatccatgtcaccaagggccggtggcagccatgtgagtcctggcagggggtttcgacaagagagacgcctgagggttgttgggatccctccagggtccggatgctggaaggctcccaggtcacagtgactggagccgcctggctggccttgttctccagcccacagcccccatggctggacgcccccctgcctgctcaccggggctaaggtgccaccttggattccttccagcacttcagttggatttctttgccttgacagtgcagagtgactgatgtcgcctcttggcagaaagaaaagtccaccgaggtcaagcggtatatgtagaaagctgggagtaggccccctccacacgtctgtcagaaggtggtgggagccactgagggtgggtccctcctcccccggtgcagagctttgtcctttctcactgtccctgtctcgctccctccctccttctctccccgtctccctcccccacttctctctgtccatctctctatctctgtctctccatctgcctctgtctctgcctctctctccatctcccccatgtctctctgtctgtctgtctgtctctccatctgcctctgtctctgcctctctccctgtcttcctcccccacctctctctgtctgtctctctgtctctgtctctccatctgcctctgtctctgtctctctccctgtctcccccacctctctgtcagtctctctgtctctgtctctccatctgcctctgtctctgtctctctccatctcccccacctctctgtctgtctctctatctctgtctctccatctgcctctgtctctgtctctctccaccttcccacctctctctatctgtctctctgtctctgtctctccatctgcctctgtctctctctccgtctcccccacctctctgtctgtctctctgtctctgtctctccatctgcctctgtctctctctccgtctcccccacctctctctgtctgtctctctatctctgcctctccatctgcttctgtctctgtctctctctccatctcccccacctctctgtctgtctctctatctctgtctctccatctgcctctgtctctgtctctccatctcccccacctctctgtctgtctctctatctctgtctctccatctgcctctgtctctgtctctccatctcccccgcctctctgtctgtctctctatctctgtctctccatctgcctctgtctctgtctctctccacctccccacctctctctgtctgtctgtctctgtctctccatctgcctctgtctctgtctctctctccatctcccccgcctctctctgtctctctgtctctgtctctccatctgcctctgtctctctctctctccgtctcccccacctctctctgtctgtctctctatctctgtctctccatctgcctctgtctctgtctctctctccatctcccccacctctctgtctgtctttctgtctctccatctgcctctgtctctgtctctctctccatctcccccacctctctgtctgtctctatctctgtctctccatctgcctctgtctctgtctctctctccatctcccccgcctctctctgtctctctgtctctgtctctccatctgcctctgtctctctctctctccgtctcccccacctctctctgtctgtctctctatctctgtctctccatctgcctctgtctctgtctctctccacctccccacctctctctgtctctctgtctctgtctctccatctgcctctgtctctgtctctctctccgtctccctcacctctctctgtctgtctctctatctctgtctctccatctgcctctgtctctgtctctctctccacctccccacctctctctgtctctgtctcagtctctctccctctttccctccctcccccttctctctctctgtctctgtctctccatctgtctctgtctctctctccctctcccctacctctctctgtctctctcgctgcctctctccttctctgtctctccatctgtctctgtctccccccttcctccctctgtctctctgtctcctccttccctcctcctcactctctgccgcatcttccacctgtctatggcataaatcagcagcttgactctaggtgagaggaggaagctgcccaggttagcgatggctgctttgcttttgcagaggtgtggctccgcttcatcaaggtttgctggccgaggcttccctatgtacacagtaaaactgtggccttttcatcgttatctgcctaaggaaacgcactgatgcagaaacaccctgtacctttcgcacatcactaactcgcatgagcccatctgccttctctccatgccctgggaggagagatcgcatccttcagtgtaaaggaggagacagggatgggggaaggggtctgcccaggactctcgattcgggggtgggggaaccttcccagggccgcagacaagtcacaagcccctccaaccatggccatgcttagctgcaggtgaggctggtggtttcggggggctgtgcagcagcaggcggcccctctatggatctcaggaatacgccctccacctgtgagtttgggtgggggcagccgtgggtacacctgcactgtttcccctccctgtttgtcagtggggggtctctatagtgcacagcccgtgttaccccagaggagacgctcaggcacgcgaggctatgtcagctgtggagatggctcacactcacttcctgccctccaggcactggaggagttatggaggctccaaggggttccctcgtcccccagccatgaccttgactctgagtttgggaggcagcttggccccagaatgggctctgagctgaggaggagggcagctgccccacctctggctcctggtgggcagctgctctgtcccaggacagcctctgggcccctcaaggtacctgaatcctgccttccctgagtgtggccctgtagccctgggcgggcatgatgtatgagcctgggctttgagttgaggtctgtaaagcattaaccacccacatgcgcgggtttatttttttatttttttactagcagtcctaacccagcatcttcatcaggacaccctttacatgttcacacaaggcttccaatccaccaaactcattactgtccctgcccaaagcctgggggggtaacagggtgtgtgtcaatttcacttatttcatgaagagctgttttaatcagacagcccatctcaggagataaacctcgagtatctttgcatcccgtgagagtttttaaaatttcaccactggtatttctctgctcaaaaccctggtgactttgtgacctttataaagaatggtttggtgtctgatggggatgaccaaaaaccctaaaggtaagaagccgtacagcgtctggcccatttagatcaattccaggtcaaatcacaaagagctcacattccataacctgccagaagcttctttcccatccccacgttcacagcccacacagcccactctcaagaagtgtttatgggatgaatgaatgatgtcacggaggctcagtccccgcagctctgcgttccggggagcaacctcggagtgccacattgtcaccaaccccactgcttcctccccctcagctcctgtacgaagagtgggcacgctatggagttttctataagtaccagcccatcgacctggtcaggtaagaacgcgccacagcctgcgggaatcaagtccctactccgatggcagtcggataacatccctgtgggtttcaaccgctctgaatgttcagtacccgggaacgtgtttgaactcaaagagcttgtgtaggaagacccaaaatgtccctgcagggctgagagcctgggccagcattagatgaagcagtttattcaaattccctggaggtcgggcccttttcagtcacatttaccatctcctaaattcactgcctggcctggcctcactgggcggcgggagggttttccggatttgagacgtggaggggaaggaaagagctgcctcaaatgtggaaggatttcttctctcccaagaggatctctgtcctcacagggcaggaaggaggggccgaccaggttaggcaacttgcccgccagagctcgactggtagaaatccattcaagccatcaaactgccaaccacgcttaatatgaggagcaattggttttcttggcacctcccggccaaggttctttccagtccttatgctgaacagggcttggaatggagcccacagcctcaggggaagtaggcccacagccatcagcatgggccatcgcacacggaaaagcgcccaccttcccaaggcaccacagagaagtggggaccgggcgcggtggctcacgcctgtaatcgcagcactttgggaggctgaggcaggtggattacttgaggtcaggagttcgagaccagcctggccaacatggtgaaaccccgtctctacccaaaatacaaaagttagctggcagtgatggtgcatgcctatagtcccagctactagggaggctgaggcaggagaatcgcttgaacccgagaggcggaggttgcagtgagccgagatcgcgccactgcactgcagcctgggcgacagagcaagactccatctcaaaataaataaataaataaataaatgcaatgggcgtggtggcaagcatctgtagtcccagctactcaggaggctgaggcaggagaatcgcttgaacctgagaggcggaggttgcagtgagccgagattgtgccactgcgctccagcctgggcaacaggagcaaaactctatctcaaaaaaaaaaaaaaagaaagaaaggaaaagaaaaagaaagagaagaggctgggcacggtggctcacgcctgtaatcccagcactttgggaggccgaagggggcggatcacgaggtcaggacattgagaccatcctggctaacacggcgaaactccatctctactaaaaatacaaaaaattagccgggcgtggtggcgggctcctgtagtcccagctactcgggaggctgaggcaggagaatggcgtgaacgcgggaggtggagcttgcagtgagccgagatagcgccactgcactccagcctgggcaacagagcgagactccatctcaaaaaaaaacaaaaaaagagagaagaggggagggcttcagaaaagcagagagcacccccaacctgatggggcggcccaggaccccactctctgcttctgggatgagggaaccagtgcccctggtttgagttgctcttgctggggagggcctgtgacatgtttccctgctagtattgaatgacagtgggcttgactctgctctgctcccctggtgtaggaagtattttggggagaagatcggcctgtacttcgcctggctgggcgtgtacacccagatgctcatccctgcctccatcgtgggaatcattgtcttcctgtacggatgcgccaccatggatgaaaacatccccaggtaggcggcagcccacccccaccaccccgcagtacacagaggagccctctcctgccatcccagctgcacaattcattgggacactggcctctcacaccaattcctgtacacatgaaacctcacgccaagccacgagccgtcaggaggaaaggacatggttcgaagccatctaggagtctgggagtccttctcaggcccatctgtgctaggctatgttttattgttaagagaaaggcataaaagaaacatctgaccattttcattctttaaaagttgttatggttggcttgttctttttcactgttggtcattagtgacaagaaagttttctgtttccttgtgtggccgggaggtgaggcatgaatgctaggggcttcagtgtaggctggtacttgcgggaggtgagacatggatgccagaggcctcagtgctggctggtgttcgcgggaggtgagcatgaatgctaggcttcggtgcaggctggtacttgcgggaggtgagacatggatgccagaggcctcggtgcaggctggtgcttgcgggaggtgagcgtgaatgccagacttcggtgcaggctggcacttgcgggaggtgagacgtgaatgctagaggcctcggtacaggctggtgctcccaggaggtgagacgtgaacgctagaggcctcggtgcaggctggcacttgcgggaggtgagacatgaatgctagaggcctcggtacaggctggtgctcccaggaggtgagacgtgaacgctagaggcctcggtgcaggctggcacttgcgggaggtgagacatgaatgctagaggcctcggtacaggctggtgctcccaggaggtgagacgtgaacactagaggcctcggtgcaggctggtgcttgcgggaagtgagacatgaacgctagaggcctcggtgcagtctggtgctcccaggaggtgagacgtgaacgctagaggcttcggtgcaggctggtgcttgcaggaagtgagacatgaatgctagaggcctcggtgcaggctggtgctcccgggaggtgagatgcgaatgctagtggcctcagtgcaggctggcgctcgtgggctgtacagtaggttccacctgcccagcttcctaaggctgcctgcttcccttatctgcacggccccgagaaattctgcaggaactgttccataagggaggattgcatcccacagcataggcaggcatctgaatgtagatccgatgtgccttctgctgttcaccaagggtatgtcagacgtcagggagctcggaaaagaaggcccagacctgagacagcctcgcctcgctcaggggcccagttcccccacatgacttcagaacaagagtccagttttgcctggtgcgatggcgcatgcctgtaatgccaacacattgggaggctaaggttggaggatcccttgagcccgggaggtcgaggccacagtgagccatggtctcaccactgcactccagcctgggggaacagagtggggccctgtagccaaaaaaaaaaagagtcaagttttgagaagctcagcctcagtgtgcagagtccctctggtgcttgcttttgtagctgtttcttagatttcctgacatgaacctaaggataattccaggctcccaacctctggcagggtttctatgccgacaggcagtgccttcagcgtgcaaatcgctctgccagggaattgactataaaggggaatttgggctgaccctgccctgcaagggctccaagtctcagaaaagccctaaaatgttagtttggttatttttcgaaccactcctgccaagtatctctaaagcagaggtatagtttagaaaatgtatccactgagcctgtctgtaaagacccaatcagtcttaggaaagaaactgactctttgcagcacaaaaagaccatatctggtcaatttttgtttaagtgatgttttgatacatgaataacacctaaaatattccaccccacccccacccccgaatcaaagctctgaggaatctggcttatctcccttttggtgttaatttggtcctaggcaggagaaaggtttccctttgtttgctaatatggtatgaggtcctgggcacttgggtttggttgtggtaaagatcaaggtagtccagacttggtggggattgtaaggctggctttaggctaggagctcaaagccggaggaaaatggtgagtgtaaggtgaggattctccccatgagccctggaggaagcctgggggacctccatcttccttccttccttcccttggagggtggccccagcagggaggctctgccagcccaggggttggccatgccagctcggcccttccaccacatggtcagaaatgcaaacagcagttactcaggattcagccgctgtgggcggagatgaggccaaagccaaggcctctgcccagcaggcgacctggagcgaagcgggaggtgcgtgctccctgcagcttccgccccatccccaccaagcttgcagggaagccccagcatggagccgcctgctgcccttgtacctccggtcctctctgaagaagagagcttcctgctctttgtattttggctaaaggcggtgaagtgagaggcggagggggatttaaaaccagcagaaaaaggcttcttgttgggctgatggtgtttgtgcgagaagctgaggtgggcagggaggagagcctaggagagcggtagggctcatgggcaggccgttggtgtacgccttggccctgcctgtccccagtcccaccactgtggactccaggccatcctcagtccaggtggtcactgtggcctgggccacatgctggcgatgatggggatggccttccacatgcctgttctctggaagaggggctcgcgttgtgcccaactggggacgtcctgcccccaaccccccaaaacgctgctttcttctgccctcaagaggccctcagaagagaggaggctgagtgaggggcatgagataaaccccgaaaggccggctcctggctcgtgtttaaaactcactgctgctgcaaagtgcttggctattgcataataatgacaacagcgttggtgaccacgtgatggccgaggggtgccaggcactgttccaagggccacactcgtgttggttgttggttgtttaatcctcctgacaacctattaacacggcttctcttcactatcagcaaccccattctgcagccgggaaaactaaggccacacggatcacaaaatgcaagagctgagatacaaacccagagctagctgaccgtagagtgcaggttctcccaacggctgtgtgtgcctactcaccctgcccgacccctgctcccatgcacacacacacacttcctccatgctccaggctgtggctgcaatgaattcttcttaacctatccatcttttgtgccagatacatgcagtacctacaccccaccccccgcctttttttttttttgacacagagtctcactctgtcgcccaggctggagtacagtggtgtgatctcgactcaatgcaacctccacctcccaggttcaagcaattctcctgcctcagcctcccgagtagctgggattacaggctgggattacatgccaggctaatgtttgtatttttagtagagacggggtttcaccatgttggccaggctggtctcaaactcctgacctcgagtgatctgcctgcctcggcctcccagtgctgggattacaggcatgagccaccgtgcctggccctacaccactttttaataaatgtttagggactgtacctgaaggaagagaattgaaccagaatgcccatgatgctgggcacagaggaggcccttcagagccttgcaagggacgtttattaagcaccagctgctgtggaccaggcatggttctgcgcataagttcagcatatccagaaagtcaaaaaacaaacacccacttcagcatccccccacatcaccctccgacccaaccagccagggtgtgtacttagagcccagagccttgtccaaggcagcagaaaggagaaagttcaaagcaggccagagcaggaagggaccttattctgacccctcctcattttccagaacgaaaaactgaatctgaggctaaaggacttggccagggccacggagggtatgagtagtcagttgagggcccagttcaggccacccaacttccacaaggagccccccatggcccttgagcagtagatgagagccggcagtgcttgggctttgaagatacacacagaccaggattccattcccactctgctgcgtggccctgaacaagttacttcccctctctgggctctgggattgcaacagtccccagtgctggtccaagtgaggtggaacatctgtgcctgccagtaatgaggctcctgctctcgccgccgatagcctggaagtattagtattttctaatattagtgggagtaagtcagtgctggggaggaggcacagagatgagtctcaggcatcatgaagatcctctctcctggccacagtagttgggatctggccccaggctcacctgtgctcagcaaagcagaagcctgcactgagcgggacccatcatccctggcaggcccccccggcttcccgagtgagcctacagggtgggcctccgctgcaccgggcagctggggacctattccttccggcccagcccccgttctcccagagaagagtcctgggatccccgtttctccacctcctgtgtccagagcacccaggccacgtccaaggcagccgccccaccaggcggatggagatgctgtgtgaaccgctcatagacggcgcctggcacagagcaagggccctcatcatctcactgttttccaaggccttataacataaagacctggctagcatttgctattggcacaagccttgaccgtgcctgccgattatatgggggcaggctgggaactctgcctctcctagaagtggctcaaggataggctgcagaggctgctgcctcagggtcaccccagaggtgaatgttccagggcccatctaccacaaagcaggtctgggtgagtccacctccaaggccggcaacagaggttgcagggccccatgcaagaagaaaatgcaggtctttagttcaaaaatcaatgtgtgtgtgtgtgtgtgtgtgtgtgtgtgcgcgtctgtgttgagatggagtctcgctctgtcacccaggctggagtgcagtgacgtgatctgggctccctgcaacctctgcctccagggttcaagcgattcttctgcctcagcctcccgagtagctgggatcacaggcgcgtgccaccatgcccggctaatttttgtgtttttagtagagacagggtttcaccattttggccaggctggtcttgaacccctgacctcaggtgatccgcccgccttggcctcccaaagtactgggattacaggcgtgagtcaccacgcccgtcccattgtgtgttttaaggcagcaacaggggagcattaaaccaagcatgaggccctgctgagctcagggctggtgcaacagcatgggtcacacgcctgtgaagctgccctggatggcaaggagggacagggcatggctaagcacccggcttatgtccactatggcatggacctgagggaccctcgccaacccccagcttgggcccagcgctttctcccaggccagctcggcacccaggaggtgctccatcatggcccaacaaggtgactccagggctgccccctctcttgcagcatggagatgtgtgaccagagacacaatatcaccatgtgcccgctttgcgacaagacctgcagctactggaagatgagctcagcctgcgccacggcccgcgccagccacctcttcgacaaccccgccacggtcttcttctctgtcttcatggccctctggggtaagcagggctccagagcactgggtttttgggcagtggtgagtctgagtggtacctaggctgcttctgtctgtctttgcgaaatcatcctcaggcaggggttgtcgggaaaaaacataggggaagggggctggtggaaacgacccctgttttgtgttcaggttactggggtgcgcagtgcatcaggagagacacgggttctcctgacccagcaaagagtcccttaggaaaagcctaggagggacgttttgctctgagaaatcctgacaccagggtatgctggcctgtgaagggcagctgatttagagcagggaggcccgagggtcctgcctccatccctgctgcagctggcgaccaccacagcctgaaggaaagctgacctgggccaggtcccggaggcaccgtgtctcactagagccctcagcatccctgcaggcttcatgtgcccattttcggataaggaggcgaaggcctaagagagttgggaatcgcctggggtcactcagctcctgattgccactgggctccactgccatgcaaacctaaggcactggcctcctcctccaggaagattccctaaccccagtcctacccgactcccaactccagctttcggggcttgggaggttggtaagtggtggctgaatgcatttctacagaggttctgggtgagcaagcaggcccattctgtcctctgcagccccgtgtctcagcctgtgccagctttgagatgcccacagtgggcagcctgtgctgagccatctcccaggcctggccccacgccgggcacttaagcccccatccttacctgtgagctcccaccttgtaggagatggggccaggcacagagacagcgctggagggagttcaggagggctttctggaagaggtgtgaggcccttcagatgagttgacatgggtgtgggggaggcagcatttgtggcagagagaccaggtgtagagacagaggggcctctccgtcccacctcgtacccctgcttggggcaggctcccggggccagaatagcgccacctcacctgcagctgtacccgcttggcactgccctgtgtgctctgtgggtaggcaaggggcaaatgtggactgaaaaggcaattgtttgaccagtgaggacagaggccagccaggttgcggggctctgtgtggcccttacccgccagcgtgctgatcctgaagatcagacctaggattcagtaccgtgccccatcagtaagcagagcattggctggcattgccaaagccttgccagcatcctccatggagagcacctcgaagtatggcctgtgattccggctcaggcacctcctgaccaaggagcagctgctcgggggaggctggaaacctagaggaggttcagaggatgaaggtagagccgggtctctggcctgcacagaagcacccagcaggttgggcagagagggactgaagcaccagcacccagctctggggtctgcatgctcctcccctcttcatccttatggcgcctccgtcctctccaggcccgagccctgtccctacacagctcggcagcctcctcccctgctccggaggctgcattcggggctggtgttctctccaacagtgcataagagaattccccatgaagccgaggaagccgacaggctcaggttatcctcctgcttggcgcagatatcctgcagctgggactcagggtttggctgagcctgtgtggtttgcgggtgggtgtgcacagcagagccgaggtatgtatcaggtgaggtgagggaggggaggcctggcccaccctctgcagctcctgctccagcctgggcagctgggccgggtcctcttgcctcggctcaccaacactgtatctcattcctacccttccggagacccgggacagaggccgccagctctgagcatgggtgccggcaatggtgagagttggagcttctccatttagatgctttgtggacggccacctccctcaagaccctcctcaccctggaatcttattgggcagctccgtgtccttagcagagttccctccacagaggcctcagccccgaggcacctcgctgcagccccacccgctgtgtgcgcagctggaagggcctggctctcatgagcgcttcctccacatggtcgccagcagctctgtttcctcatttgggacccctgggcctgtgcagccactgagacagtatttcaggtggtccatagcatgacccacaagtaagtgtgacccctgtagcactgagccccctgagccactagaagattgttcagtgccgcctgctgtggtcagccctgctgccccgtgtacatttctatagcgcccccggggctcagactcccgctctgccagttcccacctcactgctctaaacctcagcttcctcatctgcagaatgaggctgcatgaggatcagaggcgacggacatgaactctcagccgaggcttagcacatagcttactctaaataggtggtcactgccgtcttaccacattggagcatgtgagaaccaaagaaaacctatacgagagtgtgcgtgcgcctggtgtgtgggaggtactcatcagccacgtgtactgagcacatgtgtcccacctgcatgaggatgtgcacgtgcctggtgtgtgggagctactcatcggcccatgtgtactgagcacaatgtgtatcccacactgtgccgggccccaggggaaccaagggaagcaaacctgatgtatccgctgctctaaaagctgcagcgtaggtttcaagagaaggccccatgggaagggtgcggggctgtggcaggagctccaggtgcagggaccaggtgagaggggtgtcagagcatccggagaggtcagcaaggacacgctgagaagaacttagtgtgctggctcagaggaatcagaacccagtgccatcagctgctgtgtcaaagatgctttcctgtcttatgctcgagtcggagaccgcaagtctaagagggagcttgtgcagtgattaagagaggggtgacacagtgggggcccagctccaggaagggcacctatgggaaggtgtgagagaagcgattgggagcctcatggcaccctccctccctggccctggggaccctgatttcatccgtctgtttcctctttccctgctgaaatccctgggaggaattcagcccttagactccctgtagccacttctccaaagaaaaggcctccgatggaaaagagagactttagattattccaaaggactccacactttgttttagctctcatgctattcccatgagttaaggagacgctggcgggcttggccgagctggtctcatctgacacacagggttatgaattacagctcccacatttaaccatgaataaaaggcttttaagggccctggagaaagcagccaccacgtccttccaccccacgctctgcccatccctggcatcaccttaggatctgggagggcacagccgtctgagaacccctggctggtgttcttctctacagcggactccaaaggcacccacttttgtgggactctccaaacgtccagtaattcctgggtccacagaactgggcctccctcctctgcagagaaagaaggacgtggtgtttcattttctccttctccaattacaggcatgcccagtaagagcacattcccaggggaagggaggagagaggctgaaggagcccggatgaagaaagaagccgtcttgggctgtaatgatcccatttcgagcttaacacgccgggcgataagaggtctctgtgataagcgcctgttgcggctcttgttttgggagcccaaagcgctacgtggcattctggtcactgcaaattccttcttctgagtgccagagcatcacccagtcacgccttccaggtcacctgtgggagtgcctactgggcaggcatgggtgccgcagccacagaacgagcccctccccccagacctccctccttctgggagttcctgctgcaaggtcgtcctttgagaggatgcaggcagcgcagattggtcaacaccctggttgtttggggagaaaccctcaagggtctggtccctcatgcgttgggctggctagcagccctgtggcccccaggcctgtggaccctccaagactagagcgtccagggctggctgaccctgctggaggctctagacctgggcctgattcccagggggcagcagctctgggcttgtcggtcccctgtggttctcaaactcggtcccacaggcctctgcaggaacccgcaccagtcaagaggtttaagtgcaagggagggatgcctgggtacagcatggatgttggcatctcgtcttaggtgcccatgaccctgagagtgagtgtcgtgggacctgcagcaccagcacctccctcgcctcaccctggcctcagtcctgatttaaatgaacatcgtcctttggccgatttcatgtttggggcttctgcctggagtttgttaggggaagatgggagttcctctgctgaggttcgaaggctcagccagggcctgcaagcctctgtgagcaagtgagggcccagggagagtcaggagaggcctttcctggtgaggtcaggtgcctgtcgtcggcgtctgcacttgcctggaagccgccctcagacacgctcagctccaccacacgagggtgtgggcagagcagtgtgagggacaggtcttgctttcccgggattccagtcacaggtggggacagacacgcacagaaatcagcatagcctcgagataaatgcagttgtttctcttcgtggacaaaggcgttcgattttccagaggaggccaagaatgggagccgtgggtccgtagcttggtgtagggcgtgagttccagtggtgagcagtgagacacgctgagctgggctggccagggagggggtgagcgccccgtgctgggaagcattcaagctgaggttggaggacttcttgctggggcaactgcagagcattgggaggtgatgtctatgtgtgatccaaggccacgtggcttattgggaagattcccaggcctacaacccagctctggtttttaatttggggatcaaaatgtatcgtaaatttagaattataaatgtagggtcagcagcagtctgtcaccgctgaagcacacgtgccagagctcccgttgtttatcacactgtatccgaacagcggagaacctgtccccatttcacagaggaggaaagtgaggctccattggcacagccgggaactgaagccacatctctctgagcctgtcctctctcccctgcctgcccctgcctgcccctgcctgcccctgcctgcctccctggacgctgcgtccatctggaactatctccacaaaccccccacccccccacccgccatcaccgctgtctgctgctccttccctccctcgccttcctagagacctcagcaccggtcagatccctccctgtctccctctctctgatcatgacccaggaggctgtgactccccagcctcctggtgccccagctccaggctgggaagatccacccagcggggcccggcctgccctggcagcccacttgacggtcactggattactcaggctgacttggctgcgtagtaggacggttagatacagtcaaggggttcacagtgccagctccggggcccggctcaggttcaaatcccagctctgtcacctgccagccctgtgacctgagaacttgcttctactctctgggtcccaggttcgcatctgtagaacggagacacagtcccaccccacagggttgctgggaacatggaaggagtcactgcatgcaaagttcttagggccatgcctggcttgtgcctggtgccagttgctacgttgcactggctgttaaaagtgagctgttgctttttgaaattttgaaaacgtagccttgggtcctaggagattgagcttaaacctaacctctcaccttgtgcttggtggcctctgtccattcagtgacttcttctccttcagaaaagaataacagctggctgggcgcggtggttcacgcctgtaatcccagcactttgggaggccaaggcgggcagatcacctgaggtcagaagctcaagaccagtcaggccaacatggtgaaaccccgtctctactaaaaatacaaagattagctggccgtagtggcacgcgcctgtagtcccagctacttgggagtctgaggcaggagaatcacttgaacccgggaggcagaggttgcagtgagccaagatcacgccactgcactccagcctgggcaaaaagagtgaaattccatctcagaaaaaaaaaaaaaaaaaaaggctgggcgcagtggctcacgcctgtaatctcaggagactaaggcaggagaatcgcttgaacccaggaggcagaggtcgcagtgagccaagatcacgccattgcactccagcctgggcaaaaagagtgaaagtccgtctcaaaaaaaaaaaaaagaaaagaaaagaatcacagctgaaggtaggtgagccttattttgtgccaggcactgtcatgagcatctcccgcgtgctgactcactaactccccccgaaggaggtaaatagctctatgaccccatctggcagatgaacaaactagggcaaccttcccaaacttacacccgctcgtaagcagggcttgaaccccagaattctggtttctgagccccaaatactttttcataacttttttttttagttgcagtttttttttctttccaacttttattttaggctcagaggtgacatgtgctgatctgttacatgggtaaactgcgtgccgttggtttggtgtacaggttattttgtcacccagataaccagcacagtacccgacagatagtttttccatcctcaccctcctcccaccctccaccctcgagtaggcctcggtgtctcctgtcccctgctttgtgtccctgtgtactcaatgtttagctcccacttaaaggtgagaacatgtggcatttggttttctgttcctgcattcgtttagtccgcttaggataatggtctctagctccatccatgttgctgcaaaggccttctttttatgactgcgtagtgttccctggtgtatacggaccacatattcttttttattttttatcttgagacagagtgtctgtcgcccaggctggagtgcagtggcacaatctcggctcactgcaaactccgcctcccatgttcaagtgattctcctgcctcagcctcccgagtagctggcattacaggcacctgccaccatgcccggctaatttttctatttttagtagagacggtgtctcactcttgttgtccaggctggagtgcagtggcgcgatctcagctcactacatcctctgcctcccatgttcaagcgattctcctgcctcagcctcccgagtagctgggattatagccgcccgccaccacgcccagctaatttttgtattttcaggagagacggagtttcaccatgttggccaggctggtcttgaactcctgacctcaggtgatctgcctacctcagcctcccaaagtgctgggattacaggtgtaagccaccacgcccggcctgcaccaaatattctttacccagttaaccattgatgggcatctttgttgattccatgtctttgctctcataagtaatgctgcagtaaacatatgcatacatgtgtctatggtagaacaattgatattcctttgggcatatacccagtaatggcattgctgagttaaatggtacttctgtttcaagttatttaagaagtctccatcttgagccccaaatacctgactctaggccctactccgcgggcattactaactggctccggctggcgtgtgtgctgaacacgtgccttgcttgttcctgactggattacctccaagtttttctctcacctagagtagtttccccgtctgactccacaaaaatacacctccttccctttgggagctgcgctgaggactgcctccgtgccaggccccgggctaagggctctacaccggctctctctgtaaccccacagcagaccaaggctctgttcttttctctgttgaagacgctaaagtgttcccagaaaggggtcttgagccacaccccaggagagggtttttggatctcacacaagaaagaattcagggtgagtccacagtctaaagtgaaagcaagtttattaagaaagtaaaggagtggccgggctcagtgactcacatctgtaatctcagcactttgggaggccaaggtgtgtggatcacctgaggtcacgagtacaagaccagcctggccaacatggtgaaaccccctctctactaaaaatacaaaaaattagccgagcgtggtggcaggtacctgtaatcccagctactcaggaggctgaggcaggataatcgtttgaacccaggaggcggaggttgcagtgagccgagatcataccattgcactccagcctgggtgacaagagcaagactctgtctcaaggaaaaaaaaaagaagaagaagaagaaagaaagaaagtaaaggagtgaaagaatggctacagaatagggcattcccaaagtaagaggaggaccgtgcctaccctaggtacagtgcttgtttatgtagaggataacaaagaaaatcatggggagatatactctgctacaagggtttgtgataaaggattaattgtcttaattactatattttgtgagaatcaatattattatctctaaagcgaaattaggaatgcttttgttctcaacatctcgggatatcaggacattcctgagtctgggtctgcttagtaaacattatcaatctgtcccttaatgtaaacatctagaggctgggaatgcctcactttctgggaatacagcccggcaagccccggcctcatttttcctagtcctcactcaagatggagtctctctggttggaatgcctctgatagaagcacagagagggtaagcgacttgcccaaaatcacacagctaacaggtccctaacagacgtctcagatgcgcaccccggcccatctgcctccaaggtttcagcacgtgccctggtcccacctctctgtccaaacgttccctcatgcagggccctcttggggtagcaggaatgtaccgtaagccagtagcaggggacatgtaggcgtagtgctactgagcgcgccgtcccccatgggctgtggccgttcatttggtggccctgtttcgagaagccagcttgcctgttttgcagttcttcactgcacacctagtgccttgcgccccaagagctgcgggccagccccttcgtagcagatggctacattcccccgactctgggagtgggggactctgtgcctgctgaccccgcgggaggctttgctgcttgtctcacccctccctagctccacttcagccctgggagacaacaaatgtgccccgactgtcaaatacagtcaagtacaagttccgtctgcacgctcccattttgagcgggggcggggggaattcacaaaaaagccaggccactcccacgaagcatttgctttagagaaaaggagcttattctaaatcaagacaggagcaacaggaaagaacctactgcggctgagaggtgtgagcggagaggggagggacaaagcccccatcccgggcccttttcacactggctgtcaagggtaattaccagggatctctccttgtgtgttttttaatcccttattcaattatttgttctttaccctctaagggattatttttcctctggtgtttcttctccgcttgtgtcctttcttttccggcctccagctgttcacatttctgctcctacaatggcaaagagacagaaacctgttactgcctggcagccgggagcctggtcgtggccacccgcccgccggggtgtgggggtccgtattcacggtggatgaatcacctccagcctgctgttttaatctttgcttccactgcaccgtggggtccagctttcctggagctgacacgttggtcccagagacttcagcttgctgctgtctggaatttctgacatttgaaagcctcaaataagatgtctcattaagcagccttgagccctatttagctattcacttggatccattttctgaaattatagcataataatggggttttaactgcttgtcagttccacgaagaacaaaggagtttatctgatttgagcctggctgcaaaaagccggagaaagatggtcccaactttaatgaaatgccagagatggaactggaacccctcccaggggctgggcctgagattttacatggagttgacaagtcacccagctgagtcactcccagctaggtggggacgaaggggatgcactgtgatcgtctgcgggaactaaacttgttccagggataaataggtagggtgcccggtgactcagagcgaaagagaaggctggaggcctttgtgtcccacccatctctgccgagcactctcgtgcaggaccagagccctgcccccgccccgccactccccaggagacccctctctaacctctagttcatggaaatggagtctgcactaagcaaacattgcacttctcgggaactggaggttagcaaagggtggtttctattcccagggggtgggtgtcttagtctgctccagctgccataaccaaataccacggacaggtgcctgcaacaacaggcatgcatttcccacagttctgagtatggagaagtccaagatcaaggtgccagctgatttggcccacgccttggctttcagacagccaccttctccctgtgtcctcaggtggcaaagggagagacaggaagcccgttctctgttgtctcctcttccaagggtacgaatcccatcacgaggaccccaccctcatgacctcagctaaacccgatcaacccccaaaggccccatcttcaaataccatcacctggggggtcagggcttccatgtgaatttgagaggatgcaagtcaggccagagcagggggtcacatttcaagaagggaaatggatagggaccccacatgcacagtccaagcaggatgcacccctgctctgtggtcatgtgtgactgtgccctgcctgcttcccagagctggtgggctcaggggtggagggcagaggcttggaagacgcgacccctgcccgtgaggagcatggatctcactggggagatggggctgtccactgggcagctacagagcgggttgcagctcgctcaggggaaccaagagagtgtcagatgaagcacctgagattgtgccctggtttgggcaacagcatctcaggggagagagagctcagaaagggagtccgccagccagctaaggaggtgccgcgaaattagggaaattggagtgaagcctgagtagtagagacattggcataagttgaggcggggtgggatgcagcctgggaggagaggcagctaacctgatggatggagggatggttggagaaggacggcagaaagacggaggggtcggtacttccagatgcctgctggcagcctacggagcttgttcagaatgcagattccggggaccctgggtgactctgtaggtcagagatctgcattttaacaagctccctggggagattcagaaacaccccagattcccagacccacactgagaaatcccggatgaaatggacagattgccccccgccacaggtaaccacacatgtgtgtgtccctccggcccattctcctgtgattcctccaagatgtggcaggtgcacattaacacataaggggaatctacgctcatcattctatcactagctttttgtaaattgcagtgaaattcacacaacataaaattaaccattttaggtgcacaattcagtggcatttagcacatgttatgcatccacgcctctgtctaattccagaacattttcatgacctcaaagggaaaccctatccccatgaagcagtcggtccccctttcccccaaccccagcccctggcaactaccaatctgctttctgtctctctggatttacctgaatcaatggattcagatttcaggggggctgggctcctccactgctccagagcagctacataaaaatttaccataaatatttatatttatttatatatatttaccataaatattctgggtattttatacaaacggggtggtacaaaatgtagcctctgtcctgtgctgagcctctcaaggggacacgtggagatccctgcgaccgagctgggccgtaagagcagtcctctgtcaagcccttagagatgcgggccctgccctgagcaccgcttgtggatgaagtcagggacaccctgtgatatgcgggccctgccctgagcaccgcttgtggatgaagtcagggacaccctgtgatagaccctctcaggcaggcactggtaacaagcccatttctcagatgtggagactgaggttggcagcagtgtggtcagctgcccatgctcaccctgatgagatcccatgtagacctagagtctttcgctcaactgctgcctctggacgcctctatgaggagtttgtgtgactctgtgctgtgaaaatcaatgtgggaagggaccatagcccaactatccgctcccgccaggcctggcttctcgctcgctgccaccctctgtgctgtgtgctgtggtgactcctggactccagatttcagggggatgggcttgtccctttggccacctcgtaaggctgctgcactcaaggctgtttcttcattgtacactcatgtgggtgggaagccccgtccctaatgccagcctatctgggcatcagaaggcctgggtccaggtttctgcccttacttgatgagtcccctgacgtctcagaacctcagctatgtgtctataaaatggagtgcgtcgtccctgcgtggagggggccggggcaggatccgaggggatcaggcgtgggaaagcaccgtgtccagcgcctggcagcagctgggtattatacaacatttgtatgaggtggttggcacattggcaaggaggaccaggattgggaccctcggagggcaggaatcggaactcgtgtgggtgaggagggagggctcaggagcaggagaattacttgaggaggatggagctcagggttcttcctgccttcgctcactccactagaaggtggttcttcacactgctcacaatgccagctttgaggactggccaccaggcgcagcacgagccttcacattcctttcctgctggtgaagcctggactccacagctccacccccacgctcactgcccacaaaagccagacaatagggcatggtggggtctgtggccaagtggaaaggtatgcccaagttttgacaaagggatgatcattgcttagctccagccttccgctgccaatgcttctggcttttaaaggagaagcaggaaatgcataatttttatgtcaaatgtctttattttttaaacgtgtctgagccaaacaagccacatctttgtaacatcttcaccctccaccccacccccagccgccaggttacattctaggctccagtctgggtcctggccaatctacagacacctccaggacagggcctttgcttctacctgaagacacagtacaaattttagagcaagaataccacggttcaatgccaggtgcagtggctcataactgtaatcccagcactttgggaggctgaggcaggcagatcacgtgaggccaggagttcaagaccagcctggccaatacgatgaaaccctgtctctactaaaactacaaaaattagccgggcgtggtggcatgcacctgtagtcccagctacttgggggactgaggccagagaattacttgaactcaggaggcagacgttgcagtgagctgagatcacaccactgcactccagcctgggtgacggagagagactccttctcaaaaaacaaaaaaaaaaaaaaaaaaaaaagaaagaaagaataccaaggttcaataccagccaccaagctctgtgaccttaggcaagttacttaacctctctgtgcccccatttcctcatccataagatggtatgctttaataatcagatttgtgacgctacagctattattttcttaaggaaagttaaatatctgcacagagagttggtccagtatcgtggttctgtgaagactctggagtcaaagagaatgaggttcaaatccaatggctgctgctcccctgcagctgaccttgggcacagcactcaggcctctgaatctcagttttgtaaatggtctccagtttgtaaatctatgaacgggaatcctccttcctgcctgcggtcgttgtgaggatgagattgactgatatgtgtaaaatgctagtgcacggatacctcctcgtgaactggtgactgttgttatgctgcaagctggccagtgcagagagggcgagccggagcggtagtggggtgagtgtcataatggaggccaagtctgggaaagaggaggagctggggaggccgggacagggaaggtgcgtgagtcagggttctctggaaagacagaactaataggatattgtacatatgaaagggagtttattcaggagaatcgactactcacatgatcacaaggtcaagccccacaataggctgtctgcaagtggaggagaagggaaatcagtagtggatcagtctgagtcccaaaaccccaaaagtaggaaagccgacagtgcagccttcagtctatggttgaaggcgtgagagcccccaacaaaccaccagtgtaagtccaagagtccaaaagccgaggaactcagagtctgatgttcaagggcaggaagcatccaacatgggagaaagatgaaggccggaagactcagcaagtgtgctcttccaccttcccctgcctgctttttctagccacactggcagcagaggggatggtgcccacccagatgaagggtgggtctgcctctccccctccactgactcaaatgttaatctcctgtagcaacaccttcacagacacacccagaaacaacactttgcatccttcaatccaatcaagttgacactcaatacaaaccatcacagcgggtaaacaggccaactctgcaggtgtgcgtggagcagccctcccgggcagtgctcggccccagaaagcgtcgtaaaagggcgttgttggcctgggcgggcagaggaggacagaaagaggcagctctcacagcacagtggaggagacatcgggggccttgcagaccaggcagagaccagggaatggatggcctcctccactgctccagagcagctacaggggccaaaggacatcttcaaggaggcagagacctccccgcattgcctcctggggagggtgcccaccgcagacaggctgctcccaccgtctgcctcctgagggtcaggggccctgggggttgggggcctcctgctgggccccctgtggccctcctcaccagccatggtgctcagtgcgtgtctgctgagtggctgggtttccagcaggtgtttcagcgatagccattccctcacctgctcagctctgcatcatggggaggcgcgttccccaggctcctggctctccctcttcccagtaggttcagccagtgggaagcccttttgggaaatcagaaggtgggaggaagggagcagcagagatattgctccccatctccctccacttcctgggacatccccagcaatgactgtgtcttctccagactctgacttcccctgggaagcccttcctccgtgatcccagcttcttctgggcagctccaatttctggctccagcattggcgctgagcacctcctactgtcctgccatcctgaaacggatgccagctcctgctgtgggtcatctctgggtggtcccaccatcccccgtgtggcttctcagcttttccattgcctgtgcgagcaagtctcaggattaagttactccgctatgaaaagacctggggtcggcggggggttcctatttccaggctgggccggccgatacagtagccatcctagacaaacccgtgcatccttggaagccctattcgcacctcgccttaaagggaatgggatgtgttatgcatagactcacgacctctgaaccaggttcacacccatgactttcgttctttcctgccacacgctgccttcagttaagggccacatttgtgaattcactctgcacggtcaccgtcgcacagcccattttatttgcacgtcagtgctgctgcttctcggagaagccatttgatccctctgagcctcagtttccccctctgtaaaatggaggggatgggaatagcgcctacctcctatgatcaccgtgaggcttaaatcacactgatacttcctcactgatactcccagtctgattattagagggcaccattttatggatgaggaaacagaggcacagagaggctaaataacttgcccaaggtcacagagctcagtggctggtattgaactctggtattattgccctaaaatttgtactaagcatcttcagacagaggcaacggccctgtcctggaggggtctgtagattgaccagctcccaacagtgcctggcaaggaacagctcgagaatcgtgagctctgagaaactctgtggccttcctattcctctgcccctcagcctctgctgattttcttctgcagggagaagcgttcaggataaacagttcagccaagggcatctccttttgcaagctgtgtgctcacaaaagttgctcattcggtgcccactcgagcacctgtctgtcccaggcacctctgggaactgggggcccaggggaacgaggccccatccctgcctcacatacaagtcacgggacggggatcctgatggaaggcagcactgacaccgtgggcaagacagatgcaggctgaagaaggtcccgagaggagctgggtttttctcacattgagggggatgatctgtggcttcctgaaggaggcggcatttgaaccatgctctgtctgttgggaatatgaagctgaatgcagcagctgccagtgcgattcagcaggcagacccctggggtggtttgaagcccgagtgagtgagtggcctgggctcaaccctcgttcctcctgacctccgaaccggggcccccgagagcaatgggggaggatggttgaggcacgggctctcagaccatgctgcccatccctcactgactagctgggtaacctcggtcgggacttgagtgtcctatgcctcagtttcctcatctgtaaaatgggagaatgacggctcttgcctcacaggattggcgggagggctgaacacgtgaattcacatgaagttctcagcccaggatgtcaccctctctcaccaaacactgataaagaaaagaatgccttggctgggcgtggtggctcacgcctgtagtccccacactttgggaggccaaggcaggtggatcacctgaggtcaggagttcgagaccagcctggccaacatggtgaaaccctgtctctactaaaaatacaaagattagctgggtgtggtggcgcatgcctgtaatcccagctactcgggaggctgaggaaggagaatcgcttgaacccaggaggcgagattgcagtgggtggagattgcgccattgcactacagcctgggcaacaagagcaaaactctgtctaaaaaaaaaaaaaaaatgcctttatgtcatcagagactctggttttgcccctgcccgcagctgccaccttcatggagcactggaagcggaaacagatgcgactcaactaccgctgggacctcacgggctttgaagaggaagaggtcagtgggtttgccgccgtgcatatcacgcccttcccccacgttccccctaccccaggacctccttgggacttacacggaggcccgaggtcagaaagcacttctggtccaagctgaggcaaggccgccccccatcccccaccccctgcctgcctcgccactcaacaccctggcgttccgaacaccctccatggccaaagtgaccactccctgtctgctgaagtgttttcatccccatgctcacatggacacccagccaccagcgtggtctcaggcacatgccagggctcaccacactgacctcatcgcgtctgggggctgcctgggctgtcggcaccacccgtgggggtggagaggaaatggacactgcccatgggtctccaaaagtggccgtgagcatctgcctccccgggtgccaaacccacgttccctggagccagctctgtgcctgcagctgggcgtggctgacaagagggaacggatcctttactaacatagagggaaagccagtgttgggcatcttcatactccagagagagggacattcaatattacgtagcccctgggatgccaggtgaaccatactcccagggatcccaagtccagcaggaattcccttcagggtaggtgggaatgaaaaggagtaacagtccccacaattagccttggtgcacaacagaggcgacctcatgcacgcgctgtaaggtgcaaccacactgaccactatttaattttataaaacatgctccccactttttgggagacagggtctccctctgtcacctaagctgcggtgcaatggcatgatcatagctcactgcagccttgacctcccgggctcaagccctcctcccatttcagcctcccaagtagctggggctacagacacacacaaccatgcctggcgaattgtttaatttttttgtaagagtcaggttcttgttatgttgcccaggctacacatgctcccttttaaaaaaaaaagaactttttcatgcatttttattgtaatgtagacatttctttctaaagatatttttcttttaaaggccttttttctttaaaaaaaattttttttaacttttctattgtcttttctcacacaatctgctccctctcagactgaacccaagggtcactcttcagccaaatgtgccagctttgggttgacaatattgtcaacagacaaggggattagagttttctgggagaggcacagcagctcacagggtataagacgggcctctggggccaggctgccagagttccatccagattcggcaccagccttgctgtgtgaccccaggcaaattgcttaacatccctgtacctcagtgtcctcacttgatggcatttgtagggtctcaatggatcaatagatataaagcacttagaacctgacctagcacacagtcagtgccccataaacggctgcccggctagtggccactgggcgacacctttatctgcccagacaacagcctccaccctcttcctcagccgatctcattatcctgtccacaaatgaccagacagagatcaatgcaacctgtccacagcacacagctctgcagggcagagcgggggcagagcccagagccctgtccatggagggagctctctgggtggtctcttcccttgccgtttcaattagaaagattcaaatagaaaaaaaaaagcagtcaccatcttgttcagaagtcaatttcaaatgtcccttctgtgatgtccctgtggctggggaaagttggcggtgaggcccagtcccctttgttcaaccccttgggatcccattccctgatctcctgaccctgatggcttgggatcttgattttgggggtgataaccgaagtcactgggcacacacagtgccaaggagcccgaatgaatttcccaaagtgagccactcgcacccccagcggctggtcagggactcctttgggagtaataacctcaggcgacaggggccgcccctccacatagcctgaaccccagactttggtaatgaagcagaaggacacttgtctcctatcatgtgacccatgtgtgccttagctgaatctgagatgtttcagtccagcactgaaatttggaaatttggggaatttccaaaaccatgggaaaggccacagctacaaaggccacagtccacagtcaccctcaagcagcagtaaaccttaaaggaacccagggtcacccacccatcccggctcacctgtatccatttaccttcatcctaattcttaagaaagttgtctttaggaccgggcgcggtggctcacgcctgtaaccccagcactttgggaggccgaggagggcggatcacgaggtcaggagatcaagaccatcctggctaacagggtgaaaccctgtctctactaaaaatacaaaaaattagccgggcgtggtggcgggcgcctgtatcccagctactcaggaggctgaggcaggagaatcacttgaacccgggaggcagagcttgcagtgagctgagaccgcgccattgcactccagcctgctcaatagagcaagactccatctcaaaaaaaaaaaaaaaaaaaaaaagttgtccttagtggacaggtcctatttctaaaataacaacctaagtaatgacatctttgtgtttttgtttttacttttctggttccctgaaggaggctgtcaaggtttggaactttttgtcgctcctctatcttcccacagcctatctccctgggagagggaccttctcttgcacctaatctctttctaccacgcagttcccgcagttcctccacgcgggtggggtctctgctttctccccacctccggtctctcctaacctgttctttccttccagcacccttcgctgacctgcgctgagctccccaaggcctggcacctctgggcttcctgcgcttgccgacagttactgcgtctcttctgactcccacagctcccccgtagaatgttctcagggccagttcatggctgggtgttcactgcagcctggtacaggcttctccacctccaggaggacacagaggccagattcggtggccctcccaatgggctggggttccccacaagcgggatgatcctgggtcactatccagaccacagatggggtgattacactggaaatattcagcagccaactatgaactggacccaaagggtgcccgaggctaatacatggactgatttgccaagtatgctcacgctgaggagctcagactcaaaattaacaaggactctgtcttgacttggtttcattcacaggatcatcctagagctgaatacgaagccagagtcttggagaagtctctgaagaaagagtccagaaacaaagaggtatggtggccactgtgggttaactttcccagcaataaaacactgtgttcatcaaccatgtagacctgggatcagcccagagaacaaatattgtaggctgtgtaaccccgtgttgcggctgctcaactctgccatggtagcggcaaaaggagccatagacagtaggtaaacacatgggcctgtgttccacacactgtgttccaataaaactttatttgcaaaaacagacagggggccagatttggccaaagggctatagtttgtcaaacttcctctagatctcttgtcatgatgtatcctgagggtgatctcaagttttagccagcatttcaaccacaggaaccacgtggctttgaagcttcaaagctttttcacagtacacccctcctgttctatgccgagcaatgaaacagaagcctttgccaaaccagcacccctgagcaaatggccagttccttgtttcactcagactgtgagaatgagggtgagacatgttttgcaatgttcttgaggtcatcgtctttttataataattgcttttctttttccccaaatgtctcattcaaattaagtcatatgtgcagccaggactctcgaagacctccagaggtgcttgccggctttgtttgtttgtatgtttgtttgtttgttttttgagacagagtctctctctgtcgctcaggatggactgcaatggcatgatctcggctcactgcaacccccgcctcccgggttcaagcaattctcatgcctcagcctcccgggtacctgggactacaggcgcgtaccaccgtgtccagctaattttttgtattttagtagagacggggtttcactatgttgcccaggctggtctcgaactcctgaccccaagaaatccacccgccttggcctcccaaagtgctgggattacagatgtgagccaccgtgcccagcaaagtttatttaatggtgtttttcacatgatgtgggacaagcaggcatggagctcctggccttgtcagcctctaaaggaggctggagatgcccgcactgacccttggagggatgagggcagtcgagggagctctcacaggtcctgaccttgtgtcatatctgcactttcagccttggggactgatcaggacaaacccctgggtttgtctttccttgtcaatgtgtcaggggacagtgctcacaggtccaaagtggccgggggttacagttgccaaaatcccatctggagggtaaagtgggtgctctagaaagcctcctctcaaggcccagctcttcaaatacaatgagaatctggggtacagctcggtcctcctatagccaggaaggaagtatgtcttttttttttttttttttttttttgagagggagtctcgctttgtagcccaggctggagtgcagtggcgcgatctcagctcactgcaagctctgcctcccaggttcacgccattctcctgcctcagccttccgagtagctgggactacaggtgcccaccaccacacccagctaattttttgtatttttagtagagacggggtttcaccgtgttagccaggatggtctcaatctcctgacctcaggtgatccacccgcctcagtctcccaaagtgctgggattacaggtgcgagccactgtgcccagccagaagtatgtatttttaaacacccctgagggtctgagcaggactcaacagaatacaactataaaagcaggagttatcgccctaaaataaagagactgtctgtctgacttaacacatcggatgtgcacgcccgggtgccagctgccctctgccccggcccttcaggccctctgcgcccctcattccctcctgggaaagcaaaaggcctggatgccatcatctctaaggccctacaagcatccggcgtgttttcagggcggcatcccggcccccaagcctgggtgaagatgtctcaggagtcagtgtatggcctccaagacagcccaccctgtagttgtgtggtcgcacctcttgcagtgagcataggtgggtatttaattccttcctaaggggcagaaaagggcttttgtgacacacactatgtccatttaaggcaagggacctaaccaagccacaacagcgaatctgggcaacaggtgccggaaggaagccacctcttggatacagggtccctccgcctctgtggcccgtggcttggtttcagcccaggctctctgatcacatgaaagcaacagaggcatgggggtttacttttgcagagctcagaggcacccccaggccctgtctgcttctgacgggccgtaccctttatttcctcctctgtttcatttggctcccagtggctgctctgcggttttgatttccctccagctatggcactgaattcatttatggaaagagacccaccacctaattggcggatgtgcttgggcttctgggtgtggcttccttcttgctgtcataagatgctggtggtgacctgcacatttggccactacctcccgctggaatccagccaccatctgtgagatggggcatgacgcggtccagtggagggtgcgtgctggagtctctcccgtctccaccacctttgttacagatgttctttccgaacgtaggtctctgccgtctcttacttgtttaaaacgcccagaacccgagtcagccttggcagtgagcttacggcccgcaccaggaggggccagcctgctgccaagatggggacggttccctgggccccgcggtctgcggtgccgcctcccacttcaccgcacggtgctctctttcccccaccccccctcagaagcgccggcatattccagaggagtcaacaaacaaatggaagcagagggttaagacagccatggcgggggtgaaattggtacttttctattttgcgggcagcgcgcgtcttgactgtttgcaggcaatcaaagtcgattgtgtttttcctcaacaaactgttgtatatatttttttttaacattcacatccgtgtttctctgtcttccttcggcacccagtgagcccagcatgttgcgatggcactgcatggctatggtgggtctgcggtggcggggacgggggtggggctctggcttgacttggagctcgtgaaacgtgcttgtcacaactgcctgcaagtgtttcttggtctcctcgttaacatgcatgccacccaccccagaacgagtggcctccggtgtcatgcccgtctgcattctgtgacctaatacatgcattttcccatggaaaaatccacccccatttgaaacatcccggattagtgatgagcttctacctagggtttctccagaccaagccaaccctgggttctgagagccttcaggacatgtgtcaccgcagacgacgttttaacttgtagtgctagctgcttgtttcaacttgctccacaaaggaaaaataactattatggtctgggtggcactgggaaaacatcttccatcttctagacctagaagtgagacttttagctgaagaaatggactccaagtccaggtttctcccagacgtgggtccaacagtctttagaaaggcagctggcattacaatgtcctacacacagaggaatcacagtgttaaacggttcttgctcccgttatcctgtgacataggtgataaaccccgaaatgcttcttggaaccctatgcgtttgcactggctcatcacctgtgggcatttttgaggtttttctgagtatttctgttgttcaagttgtccctgggcccatgcacgcacgcacatgcacccacgctgacacacagagatgtctcatcgtgatggttccagacagtgaccggcattgttttgtgttgtagactgacaaagtgaagctgacatggagagatcggttcccagcctacctcactaacttggtctccatcatcttcatggtaagttccagaaggttaaggccagacgaagtcaggggaaaccgcaaggaagtgattggcttcagccgggcgtggtggttcacgactgtaatcccagcactttgggaggccgaggcgggcagatcacttgaggtcaggagttcgagaccagcctggccaatatggtgaaaccccgtctcttactaaaaatgcaaaaattagctggtgtggtggtgcatgcctgtagtcccagctactcaggaggctgaggcaggacaattgcttgaacccgggaggcagaggttgcggggagccaagatcacaccactgcactccagcctgggtgacagagcaagactctgtctcaaaaaaaaaaaaaaaaaaggatgcgattggtgtcctccaagacctgattcagcctttcacacggtggtgccactggtcccagggtgcgccggccccatctcctcagggcagtgggtggggaagactcaccactacccctaaaatgggaagagaccagggttccaaagtgacccccagtgggggcttcacacgccagggagtacatgagatgatttctgtggtccctgatacacagctttcattttgagagacacaattatttgagtatctagtaattcaagcctgggattcaaagatatcatttaagatgaaactgaagactttttaagaaaaccattaaatgggccgggtgcagtggctcacacctgtattcccagcactttgggaggccgaggcaggaagattgcttgagcttaagagtttgagactagcctgggccacatggcaaaaccaaaaatacaaaaattagctggcgtggtcgtgcgcgcctgtggtcccagctattcgggaggctgtagtgggagaattgctggagactgagaagtcgaggctgcagtgagctgtggtcacgccactgcactccagtatgggtgacagagcgagaccctgtctcaaaaaaaaaaaaaaaaaaaaaaacctgtttatgtttattttgtgaccaaaacatgacttgagccctgatacaggcatcagcattaaattaagtaaaaacaaatttttaaaaattttaaaaaagaaaactattaaataaataacatgcagacaggacacgatagtgctactcagggaccacaagtctgtgacgtggcttgtgggcaaacatcttgtggcttttaggggatttcaatcccagggacttcaacccccaatggattcggccttggccgcctgctagctgtgtttccatcaccccccaagtactcggagccagccgtggtcatgttacaaatgaccctgccctcgtccagcccaacagcttgaaggcagcgcctcctgtggccacctagccccgagtcctggtactggagcccaggttggcagctgtgcactgagggcctcaccagagcgtctcatcactggccagtcctggtaccatccccctcctgctgatacagaaactaaagccagaaggctgcacttctcctccagtgccagccagaggtggtggctgtggtcaccatgtagtcactggcatatgcctgcagaagctggtgccagtcaggctgtctgctccaagatccatgccattctgtaggaacttggagagacagaggcggggggctgtctttgttttctgggttgagtgaggggccaagggccccctgaccaagtcatggaagaagtgggaagatccagtgtcccctcatgctcttaggtacagtaagagggacgctggccgacataaagaagtccagaggagggtggcctcagtggtggggcctgctcatcccccttacctggagaaggggaccccctcggtgggggctgggggctgggggctgttgtgctctcggtgacttggtgggagggcacccggcctcgtgctgaggggatgtgtcccctctggccaggtgccaggctagggggttgggagataaccggagcctccccatccctcacccaggggaggctagcctgaggttcagccactcccactgcagaagcagcagcattgtcgcagaagggccagtgcggggccgggaaggaggtggccgtctagggctggtctggtggccccacgatgccatcagagtcactggcttctctgaccttctgctagcctgtcctaggagtgggtcccctcttggtcacaacatggctgctgcacctccagcatcacttccactctccaggctggaagaaggggaagggtgggggaagagatgggccaggggtggcagcccctgtctgaaggtgctttcgcagaagacccaccacacctctgcttgcatctcattggtcagaactgtttcacgtggccacctcctctgcagggaggctcaggaatgagcacacactgccatctcagcaaggcgggatggtagaggaaagacagaggatattggatagggaagtagccggctcttttcccagccttgacgtactggtaaacccctgtcacaagggcttcatagggttgaagaggacacagctttgtcttcaacttgggagtttcattcagcgaacaaacgttggttgagcacctaggatgtgccccacacgcccctggtcctggggatgcgggggagatggaccagggagactggaagggagcctgctgcagggcgtgcctgttgtgggcccgactgccccatggcagggcaggggacgcgcccgctggggtggagggcctccctcgctgagtcacccacaggcctggcgctccagctgcacctccgcatgctggcacggggacagacatcctggaggcctcttggcaggaccgaggggttttccaaggaaagcccttgttccccggagctggccagggagtggtccccacgcctcgcagcagggcttctccttagtcagggtgtggtgagggctgcaggcattttcctgggcagggtgcagtcaccatgtgtcactggcagatgcctgcagaagccggtggtaacggcccagaacatgaaataagagcttttctaggtttctgaaagctgcagacaccctctggggcaaacagacccatcccaggctgcaactgggagacacacagggcagccccaggcctcctgggcctgcctgtcctgggagccacctgtgactgtgccagcagggaccggacctgccctctgcacccttgcatgggagcaaatatgcgatttcctggaacacggggacacagggtgacaagacagcctgtgtcctgcgggtggtttcacgcctgggtgaggagcctggctttgctgtgtgcttctcctgcccagccctcggtccatccatcctcaatgagggctcagaatggggcatccacacccctgggcagggcggggcagggcagggtgagggagcccagacagacagacagacagaggtgtgtggaacaatcttgtcattgtagccaactcccaccacggtttctcaggcaaccaccaacccaagttttatggaatgttctggtcccacggtatgtttggcaagaggaggggctcactctggtgggagagctagaagggtgctgctggctgggagaagggacccaaagcatctccagccagacccaaagccctgccccatcccaggccacacctgcctcctttaccaggggagtccctgggaggtggctgtgagagaggcacacctcagccctgcaccacctgaggatgtccctgagctcaccatgggttgggggagaagccccatcccgcagtcagtctgctctgggacaagccactggcatggcggccatactgtgtcctgggctgtgcttggggatggtgcctgggctccgggaagatggtagcacaaagatcttgtgaactgcaggcttgggcagaccgcctggtaaatcccagctcctgagctgggtgacctggcctgtctacgtaacctctctgaacctcagtgtccttgtccatggaacagaaactagcccctcatccatctgtctctggtgggttaatgcacagaaagcccctggcatttggcaggtgcccaagaaatgtcagtgcttgttttgaagcagaagagcgggaaggttgggggacagctggactgagggagcagatggggcaggcccaggaaggtcctgggtgggcccccaaccaagagtgcccctttcccccctgcagattgcagtgacgtttgccatcgtcctcggcgtcatcatctacagaatctccatggccgccgccttggccatgaactcctccccctccgtgcggtccaacatccgggtcacagtcacagccaccgcagtcatcatcaacctagtggtcatcatcctcctggacgaggtgtatggctgcatagcccgatggctcaccaagatcggtgagtgcccatgttccaggtactgtggcctggactcaggcagctggagtcgcctgcctcttgctgtgcatccttgagtttgttgcttaacttctctgggccccagctccctggttctcaatgggtatcctgagcacaggccatggtgcgcctatgagagccgactgagtgactgtgccagtggccagccagaagctggaccaggctgttgggggccatcccagccacagcctcagtatcatcctacccctccctctagaggtcccaaagacggagaaaagctttgaggagaggctgatcttcaaggctttcctgctgaagtttgtgaattcctacacccccatcttttacgtggcgttcttcaaaggccggtagggacatcttcagcctttccccaacctcgcttctcccaggtccaggagagggctctccctccccacaggttgggggcacctggagcccagggcagggcagacaccgtggcacccgcagccaaagagggtcagggagaaggcctgggccctgctgaggctccagagcagcgggaccctgggcagcagggagtccaggtggcagggaacccaggcagtggggaccccaggcagtgaggaccggggagtgaggacccgggagtgagggccctgggcagtgaggaccctgggccgtggggaccccaggcagtgaggaccggggagtgaggacccggcagtgagggccccgggcagtgaggacccgggagtgagggccccgggcagtgaggactctgggcagagaggacctcgggcagtgaggacccgggagtgagggccttgggcagtggggaccccagacagtgcagaccccgggcagtggggaccccaggcagtgaggaccggggagtgaggacccgggagtgagggccccggacagtggggaccccgggcagtggggaccccaggcagtgaggaccctgggcagaggggaccccagggactccaggcagtgggaagctccagcagcaggaagtccaggcagagaaccccagaagccagctccaggtgctcccacggcaggtagggaggagtccacgtagggaggagtccacaaagtggggacaaggagagaggagggtgtggaaatgcggctgctggccacttgagccctcttcacagctcctggaggagtgaaaccttccacgcctgggccctctggagccatcccaggctgcggtggggcctgcggcccacccacaatgatgccccccacccccaccaccactcctgcaagggactggctggtctgatctcagagcccccaaaaaggctgcctcctccacatcatgtgattcaccagtgccatgcccgccctcctggcccagggtcccagggccccgccaaggggtccagtgccccctgagcgcatccaggatggagcaagctcttggaagcctacacgccccacaccagcccctagaaagccgagaggttgtctatccccacccagggtggcctttggccaccacctgccccagctgcccaaggtccccagagtgcttctgtgccagctgtccatggaccccaccgtgccagcggcacatcctgagtcccaggcagctagcgcagcagcttgcagtcttcaggccgggtggtctttgccttaatcccctcctgggccccttcccgctgcctctcagtctcgtggcctctcattgaagaagttcctttttctgacccctctctgggtttgggaatccaacctttgaccaatgaaaaccactgtggtcatcttttagcagatgcaccaggcagggagagccgcctgtagataccctcgaggctcagcctgcaggactcacacgctgcacagtccccacttgggggtctctccccgagctgagccaggggctcatcttttctctaacgacctcccccatcgtttcaggtttgttggacgcccgggcgactacgtgtacattttccgttccttccgaatggaagaggtaaccgaaattttattcatctctggcagccccttctgtcttgcttacgatttgtctacaccatgcacttgggagaagcagctgcagcacatttgttcagcaaagagcagcaggtttctttccttcttgctggaaacttttctgttcccctgatgtggtggggtgggctttaatcttatctggtgtgttcatatagaatcacctagaaggataaagtcgctgtagagttaatgaaagaaaaacacaacatctggttttcttttctttttttgtgagactgaatatttctcttctggttaagatgaattaatgagggacgggtgcagtggctcatgcctgtaatcccagcactttgggaggccgagactcgtggatcacctgaggtcaggagttcgagagcagcctggccaacatggtgaaaccccatctctactaaaaacgcaaaaaattagccgggtgtggtggtgcatgcctgtaatcccacctactcgggaggctgaggcatgagaatcgcttgaacctggaagatggaggttgcagtgagctgagatttcgccactgcacttcatcctgggtgacagagcaaggaaccatttcaaaaaaaaaaaaaagaagatgaattaatgaggacaaaacagaacttggctaacttttttttttactcgacattgaaatgcttgtctctttaccctcaaacaccatgctggtggcatgtgctttctgcccagcgatcctggccatagaaggtctggttgtgccagcctggttcagcctctgtcacggcccatggacttgctccactgtttgtcccacaaccaggggctccatcagaccaagccggggcttcagagcctatcagtggttctggtctcagcatttccaacccacagagtaattcagctgatcagaaaataagagggtgagtcttcttgaaaaagaccctgtggaataagatatcgaggatggggtggacatcaggtacaggattatctggctgtctggagtgcagcctagaggttccactacctgaatgcaggcccctgggcagcccaagacacgggcctcctccacagtaatgggcatctgcgccaagcttctgaaatgctctttcctttttacatgatgatcccctgtcacactcgtcccgggtcagaaagtcatataataaagcagatggtgtaattgctttttccaaaagcatggctctccaagacaagtgtagggtttgttaggttttatttggaatgcagaacaagtttactgtgcctcaggggtcaccatgcatcactggtgttccctttgcttggacaagttaaacttccagcccacataggtttctgactgtcacctgcttgccgggtcccaggcctaaggtggcaaaggcccactgagtcagggacattaggcctcagaggggtggctgctgcctcctgtggggctcagcctgccatggtggtgcagagccagtggatgctgactggtgcatgggaccggccagtggccctggaaaaaaggaggcgccctgaggccctgccccacccctgcttactccctcccagtgcgctccccgctcccatccacagccccaagcacagcagcctgtaggcggagtgtgtccgtttcctggggctgccgcaactcgatcccacagacttaaagtaacagagatgggggtctcacagttctgaaggtcggaagtgcaacatccaggtgttagccgggctgtgttcccttcaagggttctaggggaggacctgccttgcctctcccagcttctggggactacggaagccctcatggttcctttacttgcctctccaccctctgccgccatgttcacgctgcctcttccctctgtgcccgcgccttctctttttctgaggacatcagtcctcagatgggcgccccatctgaaaacaccccagcatgaaaacaccctgacttgactacatttgcaaagaccctttttgcaaataaggccacgttcccaggtggcggggattagaacctgagcgtctttttttggaggacgcaggtcaacccacagcatgagggtgggcctccctgcagggctggggtccctctctcggtgtccctgtagcgtggctgatgctgctctctgtccacagtgtgcgccagggggctgcctgatggagctatgcatccagctcagcatcatcatgctggggaaacagctgatccagaacaacctgttcgagatcggcatcccgtgagtgtgctgcagcgggttagagcggcaggggcggggccaggcggaggggtgtgtgggtggctcctgcgggggtctgggtggacgcggggcctcaaccaagatgggggcactagaagcagggagagaaggaggacacagagggaaggtggggcaaaagccaccccaggccaggcatggtggctgacgcctgtaatcccagcactttgggaagctgaggcagaaggaccatttgagcctaggaaatcaagaccagcctaagcacaaagcgagactgcacctctacaaaaaaataaaaagttagccaggtgtgctggtgcgtgcctgtagtcccagctactcaggaggctgaggcgggaggatcgctggagcccaggagttgcaagctgcagtgagctatgattgtaccactgcactctagcatgggccacagagtgagaccctgttttaaaaaataaaaacagggccgcgcacagtggctcataaactgtaatcccagcactttgggaggctgaggcaggcggatcacttgaggtcaataattcgagaccagcctggccaacatggtgaaaccccacctctactaaaaatacaaaaattagccgggcgtggtggcgggcgcctgtagtcccagctacctgggaggctgaggcaggagaaccccttgaacccaggaggtggaggttgcagtgagccgagatcgcaccactgcactccagcctgggcgacagaccgagactccgtctcaaaaaaataaataaataataaaaaacattaaaaaataaagccaccccattttggacgaaggagggagaggaagtcagaatgacaccccactccccatgctggctgaggatgggggggtaccaccaggtgcccccaagcccgatgctggctccccagggtttccagatggaggctgggggacttggcctcgttgttaccttgtacccttcggaaatccatgtcccattcccacctccccagtggctgctgggtctctggagtcaagaacttgtcgggccattttccatgatctgtgtccttccccaagagtccacttgggcatgaccagcctccactgttcttgtgtccctgatgcctgctgggccctcctgtggttcacaagtggtcgtttgccctccctgcacctccgtttccttctgtagccagcaaagccatgacacttgccccctgccttttggggaaagggcagaagagatcatcgacaaagaaatgatggcaaacaagtaaattctggatttaaagcagaaacttagaaatatcactggaggccaggcgcggtggctcatgcctataatcctagtactttgggaggcacagatgggcggattgcctgagctcaggagttcaagaccggcctgggcaacactgtgaaaccccatctctacttaaaatacaaaaaattagccaggcgtggcagcatgtgcctatagtcccagctactcgggaggctgaggcaagagaattgcttgaaccaaggaggcagaggttgcagtgagctgagacagggccactgcactccagcctgagcaaaaagagtgaaactctgtctcaaaaagaaaaaaagacacatcactagaggtgccagacccaagcccccaaattcaccctcctgcaaacctaactgcatgatgtctcatctctcaggaagatgaagaagctcatccgctacctgaagctgaagcagcagagcccccctgaccacgaggagtgtgtgaagaggaaacagcggtacgaggtggattacaacctggagcccttcgcgggcctcaccccagagtacatggaaatgagtgagtgatggccggggcaggcaggtgacatcaggatagaaacaggccagcatgccacctggagtggggaagggctgcaggggcatgatgcccccaaccctgcggtgcccagcgtccctccataagcatcaggcagggagaagagagatgcagaccctgggatcctagtgctgccacccccttgggtcggtgagcatggctgctctggatggagtcctgtgttccagaggcccaggtcaagcagccaccgtccctaggcacggtccccaagcatggtccccagccacagtccccaggtatggtccccagccacagtccccaggcacggtccccaggcacggtctccatcagcgcagcccgacacagcctgggttgtgcagctcttcctcctcccttagtctcctcaccagccgagggcccggccctgctaagctgcaagatcgtccttacttgaaaccccccacaatccaaggtccctcctctcagctccaaggcccttcaagcatcctactttggttccatgactcatctccccttcctggtggtgagctcctgagttgcaggagccacgacttgctcacctgtgggctggcgacagctgcccccagcacagagcaggcgtctcaaaggagacccagggatcgagccttacccccctcaatcacgtggctggccaggaggatgccgagaggtggcacataccttttgggggtggccaaagagaactgggaagaggccaggtgtggtccgcacagctctggactctccctgacctggtcacttacctctccctcctgcctcctgcactctgcacatgctggcctccttgctgctccccagccccgtggagctcaggccgccccagggcctttgcacgagatgtgccctgctggaatgccctctcccaaatacctgcatggctcactctctccctgcctcccaggctctactcagaatgtcccccaacagaggggtcttccctgatcactgtgtttgaaaggggcagcccctccccgacacggccacgacccccacccctcctctgcttggtgtttctgctccccagcagacagcctcaccccgtcatccctcttctgtctccccccggtaggacggcagcctcaccctctcttgttcctcatcccatagccctacccctagagcaggtccaggtatacagtgggtgctcaatgtgtgtttgctgactgaatggatgaacaaaggcagtcaggaagactcctgcagagggggggtcccagcatgcagtgccctggccaccaaggtcaacttctctaaaatgcccgttcccaggcttgttcctggtctgctggaggtgagacctggcaggctgcatttttaaaaagggcctgggggtaagggcaccttagagggtggggagcgtttctgtttaatttcaccacaagtgctgccgtctgcccctcctgttagccgaattgtccacatatgtcgctcctggctccccagacaatcgtgcaaggagcaccttgccattgactcaggaggagaggaatcttcagtgtggcgttctgtggctcctctctgttttctcctggaataaagtccaagctgaaccagggtcaggccggtaggcagaaaatggctcccagctgtttaaactcagcattggccatgtggccaggagggacggggtctgggaggtggcttcccctgcctgcagggtcgctccttccacaggaaaccctagggagaatagagcccaagacacgagcacagcctgcagtgggccgcgagagtggcagccccttccctggatttattttcctagtggctggacatcacgtcccgagttcctgacgggtttggacaaaggggacttctggagcaggcgcctcctgcccacatacacggggagtggctcacccgttccccacactgcccccactgaccaaggcacatttccacacccactgactttctccccaccccatgggctgccagtctgctcctcccaggaagtctcaagccacagatgtggatagatggggagaacaagctcatctggaaatgccccacctccccgcccccctgcaccctccctcccaggccccagccctggcagcgcctccagctccctggtcatacccttagtgccagagtaggcagcgcctctcggaagtgaggaagcccaccctgctgagtgacccacagcctcaggcctcagcagcccctggccctcatgcacagcacacaccgccccacataagcaatgcctcatcccctccaggggcctcaggcaggaccagaggcctcccactcagcccaccttgccagggctagcaagacagcccagggagagaacttgcaggccattccccgccatggcccatcctacctgctaacagtgctcacactcagggcaccccgcacggcccaccccacatgctaacaatgcccacactcagcccgccaggcacacggtgacattctgctggcttccttgtttaccgcctggcaccaaacgcccttggactgggtcctgctgtgcagttcccgaaccagctttcctgctcagttccactcagaaaccttttcctgaccttctcctagagcctagccccatgctggatgcagcatccaaagccagagaagccccagaggcagctcccgggtgggatgatccccagggggagggccgcaggggcagaggcgagggactgtcctgggcagtgggtccccacccggatccaggagtcctgatgcaaggggaagtttgggctctggaagattcagccatgcaggcaggtcccccaggtcccagggagcccccatgatggaagcagcagggccactgccacgtcccttcccagcatgggcagggggatgaccacaggctgggcctttgagctcacgatggtccttttccttttggcgatgattttttaaaatttgacatgggctggcgaggtggctcatgcctggaatcccagcactttgggtggatgacttgagctcaggagtttgagaccagcccaggcaacatagcaaaatcccagctctacaaaaaatacaaaaattaagcagtcatagtggtgcatgcctgtggtcccagctacccgggaggctgaagtgggaggattcattgagcctgggaggtcaaggctgcagtgagccatggttgtgccactgtactccagcgtggtgacagatcgagactatctcacaaaagattagccatagataagggagcattcccgttactcaagagtcaaacactgagattcagagcaaaatttggaattctgccttcagcccactcctggcctggaggtcacccagggtcatggagggtccatcccaagagctcatctaatgcatctgcaggtggggtccatgcaggtgggctcgttggaggtggggcggcagccagacctgtgcggctcggcacacggggtggtggagtccccccttatgggctgtggctcacggggtgctgactagcactgggctctctctgcagtcatccagtttggcttcgtcaccctgtttgtcgcctccttccccctggccccactgtttgcgctgctgaacaacatcatcgagatccgcctggacgccaaaaagtttgtcactgagctccgaaggccggtagctgtcagagccaaagacatcggtgagtgaccccacgggccggcagaaccggttccgagtgcgtgctgggtttggggagggggttgctcctctccagaagctagagccagagctggccaggtgtccctcctggggctcttcactcagcctttgccgggtggagcctgggggcaggtgacacaagatgtggaggctcgcttagccctgtccccacccttcccctcccaagatgccttggtcacagaggatgtttggaaagagtgggtcccagacatctgaatgtctcaacaacctgctgctttaggaggtacaagagactacatttcctctctgatggctggcgacacccacctgtagcaattgtgtgacccccagagccagggcaagaccaacgggaaaggagtgttggctgttcagcaagtgccctcctacatggcatgtcatggcatcatttaatgttcacaaaagagaaaaggaaggaaggagcccccatctgtagacagggaagaacagtcccagtcattgcatggcttgcctgtagggatcaaagccaagatgcaactcaactccagctttttcaccccgtcactaagacaccttgaccatgtggagaaggggtgtgagtttgggagaatgtatatttaaggtcagcgtaaagaataacttgggctgagcaccgtggctcactcctgtaatcccagtgctttgggaggcccaggaggatacatagcttgagctcaggagttcaagaccagcctaggcaacatgacgaaaccctgtctctacaaaaaaacacaaaaatgagctgggcgtgatggtgcgttcctgtagtcccagctactcaggaggctgaggtgggaggatgagtgagcccacataggttgtggctgcagtgagccatgcccatgcctgggcaacagagtgagaccctgtctcaaaaaaacaagtaaaatttagctggatgtggtggcacagacctgtggtcccagctacttgggaggctgaggcaggaggatcatgtcagcccaggaggtcaaggctgcagtgagacgtgatcatgccactacactccagcctgggcaacagagagagaacctgtcttaaaaaaaaaaaaaaaaagaaaagaaaagaaaagaaaaagagtaactttaatagtcagaggtgtcaaaaacagagcagacttccttgtggattagtgagctccctgttaccagaggcatttaagcagagacagggtgacgatctgtccaggagggtgaggggtatgggagccccacgcaggcttccaccggagccagccatcacaggaagggtgatcccatcttgtcttatagtaggaccaattttcagggtgaaaacaaaattacaaaaatacattgattttatctcaaatttaacacaattttagttaaaatagcacctgcgtactaattattggaataaacaaaaggttgaattacatattggggatatcaccttgctgaaataaagattccataccagcttgataagatagctttgggttgagcttttgtaggccaaacataatcttaagaaaatgtgggaaattgaccaggcgcagtggctcatgcctgtaatcccagcactttgggaggcggaagcaggtggatcacctgaggtcaggagttcgagaccagcctgaccaacatggtgaaaccctgtctctactaaaaatacaaaattagccaggtgtggtgggagcctgtaatcccagctactcaggaggctgaggcaggagaattccttgattccaggaggcagaggttgcagtgagccgagatcatgcgattgcacttcagcctgggtgacagagtgagactccatctcaaaaaaaaaaaaatgtgggaagctttatcaattgttccaagggcttctccagtccttggtatttgtgtcattctcgttggaaacacccttcagatcatctcaccccagtacgtgttttctccttaagttgttagcggttctggctggaagctccttgatccacaccttggcccctagtggcaagcccagcatccactggtgaccaaattcaccaatcctccactgtctggttccaagataacttcaactctggcttctcttacgcttggctgtcttgtagactaaaagagatgaaatcgtcattttcacaggtcaaagaccatcagatagcagtgattcacccggcagcttcacatttgcactgcgtaaggccctggctttgaaaggggcctggaaacattggtgctttgtagggagggacatcccagggctcctgggtaagaggtcatggcactgtgtttggacacttttgcttccctacatcacctcttctctgggtgacccaggtaatgaagactcagaacacagacactctatactaaactgccctgtgagattttgtttaaaaatttcaaaggctttaaaagccatgagctaaccaaccctccgaagaccctgctaaccaccagcatccctgttttgcgtctgctgaggccacgggtgagccccttgcccctcataccacagccctccatggccagaggtggagcaagggtagagtgctgatttgctggtgctctaggtcagaggtttgcacttgttttctgttaagagccagagagtgaacgttttaggcttcctggacccagagacaatgtcctcaagtcttaggcaatggttcttacccaaaggctacgcttttcatacatttttcatttcacactttaaagtgaaaaaggccagggccgggcgcagtggctcacgcctgtaatcccagcactttgggaggccgacgcaggtggatcacctgaggtcaggagtttgagaccagcctggccaatatggtgaaactgcgtctctactaaaaatacaaaaattagctgggcatgcaaatttttgttgtggcagttttaattttttttttttttgagatggggtctcactctgttgcccaggctggagtgcagtggcacaatctcggctcactgcaaactccgcctcccgggttcacgccattctcctgcctcagcctcctgagtagctgggactacaggtgcccgccaccacgcttggctgatttttttgtatttttttagtagagacggggtttcaccatgttagccaggatggtctcgatctcctgacctcatgatccacccatctcggcctcccaaagtgctgggattacaggcgtgagccaccgtgcctggccaagccatttttaatttttaatgttggcatgcacctgtagtcccagctactcaggaggctgaggcaggagaatcgcatgaacccgggaggcggaggttgcagtgagccgagatcgcaccactgcactccagcctgggcaacacagcgagactccacctaaaaaataaatttaaaaagccatttttagcttttagggacaagtgagaaagaggctgtcgaaaaacaggccaccatggccgtctttgcacacccgctctcaagagcaaggcgagattgcaccccaagctgtgcctcagcatagcgctgctttgaaaattggcatcacagagctgcctccaacatgaactttcctcagaacctcagcctgttgtgtcctccagggaaccccgggaggaagcctgggtgaatcctccctcagtcccactttccagataggaggccgaggcccaggcggtaacagtgccgagcaggaaccagagagctcaagccctgggcctcctgcatgcgtagagggtttgcctctgaaaacctcaccctgtataccgaagaccccaaaaggggaccctgggtctgctcaccaggttctccctgcagtcctcggaaattctggagctccctgtcccatggcagtaaagaaaagagtgccatcccattccagcaggtacagctaaaaaaagaaaagaaaaaagaaaagaaaagaaaagaaaagaagagtgcagcccacactgagtcctcacaaaggcctgatgctcaggcagccgacagtaccccacccccgcccgccacctgccacatcacagtgcgcgtgtgtttgctctggcaccctctgcttcgagaagctctggctgtccccagacagtggctgaatgaagcttgcaaacccaccagggtgaaagggagcagcagctcagtggccctggcttcccgcagtccctctgcaggcattggcgtccccaccagcagcaggccttccgcgtgcctctttggactctttgcacctggctggtttttgctcagttcttacggatcagctactcacttcctggttcctgtccggttggctgaaggcataatctgccctcctttcacgagtttgtttatgggttccttaaccgtaacctttccttgaagaggcttttgtattccttctgtgatccgtgcagggcccccaggcgagctccttgagaggacagagagggcccctgtggcccctgtgacctgcgcccctgaggccctgggtggctgggggaagctgtgccacaaagcgcaggtgccttgatcaccctgtcgtccagcgggtcacagcagggacccagccgtgcgtgggaatctgctccaggtccctagccctggtttcgacttcctgttttcttcctggttcttcagagcctgctggtgggaaagtgcagcctccattcagctcccgggcactgcatgtgggcaggagtggtggcctcgccaagtacctggctttatccaaatacctccctgttctgttccagaaaatggcgcttagcatcccctagagtgggaaaaattccttgggaaagaaaccaaggaatttacttggggaagtaaaaatgaggcaattttccccaacagggctttcataaaagaagcccacccaaagaatattctaaaagcacagcatccccttttacttagagatgtcaatgaaaagagtcaaactctgtcaaatatttgaagagatttattctgagccatgagtgaccatggcccatgacacagccctcaggaggtcctgagaacatgggcccaaggtggccgtggtacagcttggttttatacattttagggagacatgaaacatcaatcagatacatctaaggtatacattggtttggtccagaaaggcgggacagggcgacttccagattatgggtatatatatatatacactttttttttttttttttggagacaagagtttcactcttgacacccaggctgaagtgcaatggcatgatgcaacctccacctcctgggttcaagcgattctcctgcctcagcatcctgagtagctgggattgcaggtgtgcgccaccagatttggctaattttgtatttttagtagatacaaggtttcaccatgttggccaggctggtctccaacttctgacctcaggtgatctgcccgcctctgcctaccaaagtgctgggattacaggcatgagccaccacacccggcctatttttaaaatttctgattgtcaattggttgagttattatcaatagaaaggaaagtctgggttatgataaggggttttggaaaccaaggttttattgtgcagatgaagcctcccggtaacaggcttcagagagaatagactgtaaatgtttatcagactcaaggtctgtgttgatgttcatgctggtcgacttttgttgaattccaaaagggaggagggcatgaggaggcctgtccgaccctcctcccgccccctgcttcctgtcatggcctgaaccagtctttcaggttaatttgggggtgccctggccgagacgatgaaccccattcaaatggttcgggggacccttagaattttatttttggtttacagagatccttagagcagtgagtgtcaccctggaatgtgcgtcagaataactcggggctcccagccccaccccaggagaggcggatcccgtgggctggggctggggtgccggttcagcatttctctaacacaccccgcggatgtgcagggccacacggagagccatccgcctggacgtagatatcctgcagacctgtcaggacaggctccatcggggcccggaagcgaggaagaccccgctcccggctccatctcatccccgcctcatccctcccatttcctgttgtctctctgggccggttgggcgatcacctgggcggacccccttgcctgcctgagtcctgcacttcgacggccctgaactcaggagccacgtccctcgggagccccaaagacttcaacctccaccccaggcccaccgcacctcagcaccccacttcggaggtctcaaactcagcgccccaagggccaggtgggccacacgcgcaagtgagactaagtcctgggagtgttcttcatggccacagagcagtgtgcctgttcccacatttcttgaaacgttcaactctctagtgggggtctgggtttagatgctaaggcggccataatggaggtcggaggtcgccgggaggcctcagcacagacagcagagctgcggtgcacagcccagcctgcagggggcgcccccgggcaccacagccagctgttgccaaggagacgcaccagccagccaggaccagagccgaggagtctcgatttttcttttcttttttttttctttttttttttttttttttttttgagacagagcctcgttcattctcccaggctggagtgaagtggcgcgatctcggctcactgcaacctccgccccccgggttcaagcgattctcctgcctcagcctcctgagtagctgggattacaggcgcccgccaccacactcggctaatttttgtatttttaatagagcggggcttcgccatgttggccaggctgatctcgaactcccgacctcaggtgatccaccaacctcagcctcccaaagtgctaggattacaggcgtgagccaatgcgcccggtcttgattttttaaaatacattttcctggtttttaagcatccgtctgcatttttaagcagtagacaagcacaacaagatggccatgctgcctggatggggcctgcctgccaccgctttgcagcctctgctccggcaccagaatctggttggaaagggctttctgcactcgtgcagtcactcagcaaacatttacccagcagcacccaccttatgtgccagacaccaagctagacccagaatctacagggatgtgcaattagcaccctgccttaggagctcggagtccacggagggccctcagccctgacacccagccaggagaagccgggtcggaagtgtttccactcctaagggagtgcttcagtgctgactttgtagggctgtgccatccaaccctcacctgcattcccaggtgctttattcagcatggggtggccttagggctgctagtgtgcagagcccatgtgactgccccaccacctgctccagcagaaaaataaactgaggaccactgcactcgtgcaaaagatcaaacggagctacaataaactcctcatctgggataaggcgatagtccccatggcccgaggactggagacaggggtcagggaagtgtgactgtcacttctcaaattgcctaccagcaatgggttgcagtgggtatttctctttttttttttttttgagacagaacctttctctgttgcccatgctggaatgcagtggcgtgatctcggctccccataacctccgcctccctggctcaatctattctcgtgcctcagccttctgagtagctgggattacaggcatgtgccacgacgcctggctaatttttgtatttttagtagagatggggttttgccatattggcgaggctgctctcgaactcctggcttcaagtcatctgcccacctcagcctcccaaaatgctgggattataggcgtgagccaccacacccagcccgcagtgggcatttctgattgatgatgattgtgactgtgatctatcattgaattgacactggctggggccagggagcaagagatcttggtctcagaggtttcatctgagcctgtggtttctagctcggggccacacaggggcctgagctcttgctgcctttgcagaccaccagcatgcaccccaaaaacggggactgggaggctcccctcagctactagggcagaagcgctatgtacagctctccctgtagcctcctgcacaggtaggatgtccacttgctccatcctggccgtttctgacgagtgctggttatcacccatctcagagctggctcagggcacagagagcaggccccaggattgggctcccagccgaaccgctgcacacaacattgctgggcatgatagggtgcagttagggtgaggcgggggtcagcccgggacactggaccatttctaggaattgcaacactgaggccctgcttcctgggccattgagggcctccttcctgggccctgctagttctcatggccactgggaagacgaatggagagaccagcatggccctgggcgctgtgttgtgatcctcttgttcatctgtgatttggtgcacccctgggtcttggagtaaagggaacaagggtgtgtctagatagggaacggttcaaccttcactgctgtggactcagtgcctccagccaggggccctggcactgttcctcaacagcaaagccatgtctggcctatccctaaatacaggtatcctccgccagagctttaggagctgcaccccaattgaatcttggtcagtttaggaattaaaaaaggtttcatctaagcgaactagcatttaaacaggtgcatggggagattgtgcagaaccactgagggagcagctgtctttaagcacctcttttagaagctggtgagcttgtcagaaagggctggtacacaccaggccctggcactggcctggcttcctcaggacctgaacaaatgactcttggttgccataagcctctgactgctgtgagaaagcctggcccctgcaagggtggtacccgctcagactgctgcctggtagctggaatgactgagagtgtagggctctttaaaactgtgacttcttcttcccccaggaatctggtacaatatcctcagaggcattgggaagcttgctgtcatcatcaatgtaagtgacatcagggaccttggcagaatggaagtcccggctgaactgccaggtggccggggccctgtggagaaggagctgggcatgggtcttctgcctctagccatggtgcagccccaggctgcccggattctctagttataaatgtcccttgaccgcatggcatggggagggtgcactctggggaggcataacaaattctcttcaacctttttctgcaagttttttttttttgaatctgagtttcactctgtggtccaggctgcagtacagtggcacgatctcagctccctacaacctccgcctcccaggttcaagctattctcgtgcctcagtctcccaagtagccgggattacaggcacccaccaccacacctggctaacttttatatttttagtagagacggggttttgacatgttgaccaggctggtctcaaactcctgacctcaggtgattcgccctcctcggcctcccaaagtgctgggattacattcacgagccactgcgcccagcctttctgcaagctttgagcaaaattctccaccatgcccaccttcgcccctaagtccactgagaataaacaagagacagagataggtgggaagacagagacagagataggagggaagacagagacagagataggagggaagacagagacagagggagagaaacacagagattccttattggcaatctttctgttctcttatttaaagaaaaaagttgatttttctccttaatctgaaacgtatggctgctctgtagagaaggtttgggagatgctgaaatggggcgagaagggagcactcatcagccttacacacggctctgctaaggatcagggctccaggcccctcagcctcctccccagcatggcagccccttccagcctctcctatccccaggcctgcaggctaggatggcccggccctcagccttccccatcggggtctgtctgactctgcccatggcctggatctccccgggtttagctgtgcccagctgtccccagtacatacttcaagcccaaggctgcatcctagacatgaaaacccgaggcagccatggggagtctgctgtgccaggggcccatggctctcgtcccttccaccctctggctgagcccaatcctccccgccaaaagttgacaccatgcacatgagggacacggggtggctccccaaagctgacggtcgacgcccctgcagggccgtgatgccaagtcagggtctcagcaggccctgggactcagtccccacagagggcagggggtgacactcagccccggagaagggcccctcagagccctctgacagtgccctttcccggtgggcaacgctttctgccaggcatgcgctcccaccagattacaggaaggctgcaggcagagtgtgcacaccgggatggccccttatcccgcccagacaaaggcgcgcagggccctgaggcagggcccatgctgtgctggagtgggtggagctgggaacagaggtacgtcctgcctgcaacaagcggcgctgtgagcagctgcggagcacagtgggcatctcctgaggacaacagcagcaacaacaataacagcaggctgggcccggtggctcacacctgtaatcccagcactttgggaggccaaggcaggaggatcgcttgaggcgaggaattcaagaccagcctggccaacataatgaaacacagtgagaccatgtctctctctctgaaaaaaaaaaaaaaagtagtagcaggaaacattcacgaggcacctagaatgttctagaaccttctaagctctttccacacactagcccactggtctgcagacagcccttgaaggcgaggactgccatggccccatcttacaggtaagacaccagaggcacagagaggttaggtgatttgcccaaggccacacagccatgtgagaggcagccgttgggccttggtttcctctcttgtaagggcaccagccagagccggtgctataatagaatgagccgggtgaggacttgagagcttgcaaagcactttcccttcctgcctcattcccttctccaacaagcccagaggcacagtgcatacatggtgtgggtgttgttagccctgttttgacaagaagaaaatggaggcacagagaggttgggtgatttgcccaaggccacacagccagcaagaggctgccagcgtctgcctggtgccttctctcctagaagtgcactgttctggccaccaggcactctccttcagctgccagggggctgagaggaacacccgcgaccctgcatccattcactcagcatgccgaggctgtgcggctatggtccccgccagaggcagtggcatatggccagggtccagtgtaactgtggatgggtcaccccctgttgcggccggcccttctgcgcccaggctgggggtccccctcactgccatgtcccctgcacaggccttcgtgatctccttcacgtctgacttcatcccgcgcctggtgtacctctacatgtacagtaagaacgggaccatgcacggcttcgtcaaccacaccctctcctccttcaacgtcagtgacttccagaacggcacggcccccaatgaccccctggacctgggctacgaggtgcagatctgcaggtactgctctctgctcccctctttgaaaagccacgtttattgggtttctgggagagcctgggtttggacggggctcaaatcaggagcaagtcatgaaacaacgcaaacttgcttaaaaagaagaagaaggaaaaaaaaaaaggctggtgcagtggctcacacccgtcatcccagcactttgggagggccaggcaggaggatcacttgagctcaggagttagagaccagcctgagccacatagtgagacctcatctctacaaaaaattttttaaatagccgggcgttgtggcactcacctgtagttctagctactcgggaggctgaggtgggaggatcaattgagcctaggaatttgaggctgcagtgagctatgatcgcaccactgcactccagcctgggcaacagagtgagaccctatctataaagaaataaacaaatgcctaaggggaggaaattagaggtgatttaccagttcctgtaactaagaagcccaggatagcttcaggcatggctggatccaggagctacagtttgccatcaggctccactctggcactgcctctccactttgatttcctctgtgttgcattgttctcttgctgatgaaaaggatccctagcagctcctggcttcaatcctttctgctctgcagcccctgtgggaagaccttctgtttcccaatagtcagtgaaaatccagggactgagtcttactgccccatcttgggtcagatgtccattcttgaaccaaccactattgccatgaggaggggggctctccttggcttggcctgggtcatgtgccagggtgtgaggtcacagagaatgggggggtcctagggaaaactggggtgctatgacttgaagaagaggagacagatgctagcaggcaaagccttgagcacagaataaagaggaacgagctggtgcgtgtggcttctgacactgggaggacagggctgcttgttcccatgggaaagcaggttgtgcaacttctgcctggcccagcagctggcaccagagccgtggcccagcctgatcctatctcaggagttggcagctcagtgctgaataggccctcggagactcccatccagctccctccagaaatcaagctccgtaggcaagggccctatctgttgtgcaccgccccccaccccggaattctccatccctggggtggggtctggcacatagtagttggtcaataaatgcttgtgacataagtaagtgagggaatgcccagactgaggcccagagaggtcaagtgattgcccaggggacacacagcaaggtggtagtcggagtgggcgagcaccagggatgtgggtccaggccagggctgtgcctgcaaatccaggtggcccttctcctagcctccccgactgacctcaggttttagtgaccaacaggggcacaaacggcccctgagcccctggaaatcctgcccctcatgggggcattttctgtccagctttgggaagcttttccaatgcagggtggggacgtcagctccattcaagctatgttccagctgatgtgtggcatcccccagattcagggagctgtggagggagggaggccctaggcagagacctcaccctgcccccacagaccctgggcatctctgggtctctgtgaaaagaggaaggggctggggagaactggagcacgggcagtggtcatgaatggggcaagcctccttcctgaggctccaatcatatccacgaagagccaaggtcagtggcaggaccttggggagaggggtgtgagtgagcttgactctccaagcaggagatcagtcagctacatctaaagctggtaatgagaaccaggggcagttccttcaagataaggaggtgaggaccaagcagcaaccctggaggaggaaaagcagccccagacccgggtagggcagggcgggccaggccggctgcctgacacgcctctgcctgcaccagcggaatgcttagcttcgttctttcgcaaatgtttgataaactgcttaagttactttgataaaatgttcagggtattgttttgctgtgttttttggttgttgtttggtttgctttttttagagacggtctcactttgtggcccaggctgaagagcagtggcgtgatcaaagctcactgcaacctcaacctcccgggctcaggtgatcctcccacctcagcctcccgagtagctgggaatacaggcgtgcactgccaggcccggctaatttttgtattttttgcagagacagggttttactgtgtggcccagactgatctctaactcctcagcctgagattacagtgctgaggttacaggcacgagccaccacacctggctaataaagtgctcagaggtttttctttggtagattccctcaaagaggggatggactggaggggtgtttcatggaacccattctgaagttctgtggagcatgggcgttgggttgaggttcaggaggttcaagcttagggaacccccccgacttcaaccaagtaggctctgcactcttggggcctattggagtttccagtgagaccttttgggaacaaaggctccactgcttttaaaagtttgcaacctcctggaccacatggtccccacccttgattctgtgagcccacggctgggcctggggatacttcctgccacatgtgttttacatgaagcccgtcaggtcctgcctggcccatgggggatcctgaccaaccccctccactgtggagagagactccgtgggtgcggggccatgggctgctcgcccaagagagggctgccctcccggaggcagccgcacaccaagctgagcctctcccaggcgtccctcgagctgcctgactccagccagagcctgagccccaccgaagtcccaccctcgactccaccacggtcttttgcaggtataaagactaccgagagccgccgtggtcggaaaacaagtacgacatctccaaggacttctgggccgtcctggcagcccggctggcgtttgtcatcgtcttccaggtgcggtgggtccctctttgtttccggtttgaagatgggagcatttagggaccatcctgtgcctacagtctggaagtcaggagctgctaaagccaggggttcagagactcctccagaggcttggagaacttgctctgggacacccgaggaggggacttggccgaccccaggccccctgcactgacagggcccaagacaacctcatgagagaggaaggccaatagaggggccggatgagcaccggcagaagggttctgactcgctggtgggtttaatccagtagaagtgtctttattgaaagagacaggggccaggcacagtggctcacacctgtaatcccagcactttgggagaccgaggcaggtggatcacctgaggtcaggagttcaagaccagcctggccaacatggtgaaaccctgtctctactaaaaatatcaaaaattagccgggtgtggtggtgcacacctgtaatcccagctactcaggaggctgaggcaagagaatcacttgaacccaggaggcagaggttgcagtgagccgagatcgtgccactacactccagcttgagcaacaagagtgaaactccatctcaaaaaagagagagagagaaaagaaggagaaggagaggaggaggaggaggacgaggagggggagggaggaaggaaggaaggaaggaaggaaggaaggaaggaaggaaggaagaaagacatggagaaaggggaccccacctctgtccctctcattctcacaccatgtctgtggtagcaggcagagtcaggacagacaggagggcagtgggctgtcagatgaccccagctgcagccagcagccaggggacccagccccagctggcccagtctctagggaggggtctgggccaactctctgaggccagagggactcccagtggagcgggaccccaggctagggtgccagctgtgcaccggcagctgaggtcccagagaggcagtatcctgggctgtgggcaccgccaagattctgctcgcaggtgtccctctagtctcgattaagtcgatgctaggaaggcagtgggccaagggctctgattctggaatccccaagactgggttcaagtcccagttctgtcacagggcaggcccttccactcctctaagctcagtggccccatccatcagcttttcacagcaagcagtgcaaaaggtgtgtggggctgggttccgcagaccagagcctgagagcccagcaaggaggggtctcggccagagacagcccagccttatcccaagggagccccggagcaggcatggcaccccagacctggcctcacctggaggcaaggcagcccctagatggaccagtcactgctttgggctgaccaggctgggaagagggagatgggatggggcataagttctgcagctgcgagcgtgagcagccaaccccagccccagctggggactgggagcaccaaccaggagaagacaccaatccagggggcaccagcaccgcccgtggcgggaacctgctcagccgggggtgctcacacgtgcttgctggacagatgttcagcaaacaagaagattccgtttttccataaaaactgacttatgttgccttctatccaccagaaatgtctccgtggaggtggtagatgttcagggagaccctgggacgctttgcaaactgtaaaagtttgatccatttgtggctatttccagtttcatgtttttccccaaaggctcgatgctcgttagatttggcgatgtgtgatccatcaggtcacttcctgagtctcctgatcaaagaattcagaatgactcagatgattttcccaattactgagttcagatttgttcgagaaagtcggccaacatttcccagaggcctgccgggtggttctatgcctcctttatagcttctggaaaactgaggcccagggaggtcaatgggccaggaggtggtggggtggcactccaccagatgggggccaggcagagaggtcaggagcacttccccaggcgccatcctcccttctgccacgcgttgcctctccttccagaacctggtcatgttcatgagcgactttgtggactgggtcatcccggacatccccaaggacatcagccagcagatccacaaggagaaggtgctcatggtggagctgttcatgcgggaggagcaagacaagcagcagctgctggaaacctggatggagaaggagcggcagaaggacgagccgccgtgcaaccaccacaacaccaaagcctgcccagacagcctcggcagcccagcccccagccatgcctaccacgggggcgtcctgtagctatgccagcggggctgggcaggccagccgggcatcctgaccgatgggcaccctctcccagggcaggcggcttcccgctcccaccagggcccggtgggtcctgggttttctgcaaacatggaggaccactttctgataggacattttcctttcttctttctgttttctttcccttgtttttgcacaaagccattatgcagggaatattttttaatctgtagtattcaagatgaatcaaaatgatggctggtaatacggcaataaggtagcaaaggcaggtgctttgcagaaagaatgcttggaaacttgagtctccctagaggtgaaaagtgagcagaggcccgtagaaaccctcctctgaatcctcctaattccttaagatagatgcaaaatggtaagccgaggcatcgcgcaaaagctggtgcgatgcttcagggaaaatggaaaacccacgcaagaataatgattgattccggttccaaaaggtgtcacctacctgtttcagaaaagttagactttccatcgccttttccttccatcagttgagtggctgagagagaagtgcctcatccctgagccacacagggggcgtgggagcatcccagttatccctggaaagctagaaggggacagaggtgtccctgattaagcaggaaacagcacccttggcgtccccagcaggctccccactgtcagccacacacctgcccccatcacaccaagccgacctcagagttgttcatcttccttatgggacaaaaccggttgaccagaaaatgggcagagagagatgacctcggaagcatttccacagatggtgtcagggtttcaagaagtcttagggcttccaggggtcccctggaagctttagaatatttatgggttttttttcaaatatcaattatatggtagattgaggattttttttctgtagctcaaaggtggagggagtttattagttaaccaaatatcgttgagaggaatttaaaatactgttactaccaaagatttttattaataaaggcttatattttggtaacacttctctatatttttactcacaggaatgtcactgttggacaattattttaaaagtgtataaaaccaagtctcataaatgatatgagtgatctaaatttgcagcaatgatactaaacaactctctgaaatttctcaagcaccaagagaaacatcattttagcaaaggccaggaggaaaaatagaaataaatttgtcttgaagatctcattgatgtgatgttacattccctttaatctgccaactgtggtcaaagttcataggtgtcgtacatttccattatttgctaaaatcatgcaatctgatgcttctcttttctcttgtacagtaagtagtttgaagtgggttttgtatataaatactgtattaaaaattaggcaattaccaaaaatccttttatggaaaccatttttttaaaaagtgaatgtacacaaatccacagaggactgtggctggacattcatctaaataaatttgaatatacgacacttttctcacttgaatgctgtctgcctgacgtctgcctgggaaactcacaggccgtccccagagtccagtgaccctgcaaactcagcactgacggacaggcatctctttcctttggtgccggcctgcgcatggctctaaatgttcttgggacttcatctttctgtacgtgtgtgcatttgtgcatgcacatgtgtgtgcctattcatttgcatgtgttttgcatgcatcatgtgcacgcatgttcgcatttgcttgtgtgcatgtgcctgtgtctttacatgtttgtgtacatcacgtgtgtatgtatgcatttgtatttgcttgtatttgcatatgggtgcaggtgtgtgtgcatgtggacacgtgtgcatatatgcatgtgtgtgtatatgtctatgtgtgcatgcacgtgtgtatacagtgcgtgtgtgtacttgtgaatgcctgtgtttatgtgtttgcatggtttatgtatgtattatccgttctcacactgctataaagaactacctgagcccaggtgtggtggctcacacctgtaatcccagcactttgggaggacaaggcgggtggattgctggaggtgaggagttcaagaccagcctggccaacatggcaaaatcccatctctccaaaaaaaaaagttacataaaaattagtcgagcatggtggcgcacacctgtcatctcagctactggggaggctgaggcaggagaatcacttgaacctgggaagcaaaggctgcagtgaaccgagatcatgccatagcacaccaatctgggtgacagagttagaccccatctcaaaaaatatataaataaatagaactacctgagactggataatttacgaagaaaagaggtttaattgactcacacttttgcatgcttaacaggaggcatgactgagaggtctcaggaaacttaacgatcgtagcagaaagcaaaggggaagcaagcacgtcttcacaatggtggagcaggagagagcgagcaaaggggacaagtgccacattttcaaaccatcagatgttgtgagaactcacccactatcacaagaacagcatggcggaaatgcgcctcatgattcaaccacctcccaccaggtcccgccctcgacacgtggggattacaatttaacatgagattcaggtggggacagagccaaaccatgtcagtgtgcatcaccccagggttcacacacgtgtttgcctttgcctgtgtttgtatatgcatatgtgctgtgtgtgtgcatatgtgccggtgtgtgtgcatatgtgctggtgtgtgtgcatatgtgctgtgtgtgcatatgtgctgtgtgtgtgtgcatatgtgctggtgtgtgtgcatatatgctgtgtgtgcgcatatgtgctggtgtgtgtgtgcatgtgtgctgtgtgtatgcatatgtgctgtgtgtgcatgtgtgctggcgtgtgtgtgtgcatgtgtgctggtgtgtgtgtgcatatgtgctggtgtgtgtgtgcatgtgtgctggtgtgtgtgtatatgtgctgatatgtgtgcatatatgctagtgtgtgtgcatatgtgctggtgtgtgtgtgtgcatgtgtgctggtgtctgcatatatgctagtgtgtgtatgcatgtgtgcttgtgtgtgtgcatatgtgctggtgtgtgtgtgcatatgtgctggtgtgtgtgcatatatgctagtgtgtgtgtgcatgtgtgctggtgtgtgtgcatatgtactggtgtctgagtgtgcttgtgtgtatgcacagatgtaccacatattcctctgtgtttgtgtgtgtgtgtgtgtgtgtgtgtgtgtgtatgttgggatgggggattgtggtcacactttctagcaggctcttccaagaatcccatatctcgacctctgatcccacaacccaacagactagtatttagggtttcatggaccccaaatttcttcaaaacgttttgggactgaccttgggttgtcaatgttttcatttgggcaagtggggacatttttttagaaccgtcacctataatcactatcacttcataaaagaacgtatatttttaacagcgtcagcaaagcagtatggcgcttcgggctggggacagtgtccttgtgcggccctcggcgtcggccaccttcccttcaccgccaggacaaggcagggcctctttcgacctgtggcaggcctcgggcgcccccttgtgctggctctcctcagcacagcgccttgccaccttggtcaggcgcatcctcctaaagcttgggccccacattctcgatcctgtagggagggcccaaggagaacggcacccactttctcaatcctgtagggagggctcagggagaacggcacccaggattggcatcgcgggaaccccttccctctgccctcctgtctccatgggtcctcccagagcctgggagggcacaggtggggaccttcagccacatctgatagatgaggaaacaggctcttgaccaagatctcagggcgctttaatgccaagtctgaaggccagacctcataaacatgtatggaacattcaagaaacatttattgaactcctactgtaggccaagtgcagcggctcatgctggtaatcccacatgagggattactgcattgagaggcccagacagaaggattgcttgagcccaggagttcgagaccagcctgggcaacatagcaagaccctgtctctacaagaaataaaaaaattagctgggcatggtggcgggcacctgtggccccagctactcgagagagtgaggtaggagaatcacttgagcccaggaggtcaaggctgcagtgagctatgattgcatcactgcactgcagcctgggcaacagagcaaaaccctgtctcaaaaaataaataaaaattagaccaggtgcagtggctcacgtctgtaattctagcactttgggaggccgaggtggatgacttgaggccaggagttcaagaccagcctggccaacagagtgaaacccagtctctaagtaaaaaaaaaatatatatatatatatatatatatatatatatatatatacacacacacaccaaaaaaaaatgaactcccactgtgtgtcaggcactaggacgagaagggtgaagaacaaggacacagccccttccctcccacatgacattctcacaaaggaagtccaatgctgaaccagaaaatcaaccgtggaaccagacaacttcagaaaagggagcgctgatgaaaatccagcagggagtgtgactgactgagggtgagtgactacactgcgcagggaggccccttgggacttgagcaacaaggagccagaaacacacaacagtcggtgcacaggccaaggcagcagctgctggacgagctccaggagcagaggggcagggaggtgacaggagacgcaggagaggtggctagagacgactcatgcagggctccggctgagtgaagactttgaacttggtggtaggtgccatgggcagggctgggcagtgtctatgagggcagtgatgggatctgacttatgtttggggtcatggctgctgtagggtggaaactgcagccagtgccgctattatacagatgggcacaggaggctcagagaggctcagggctccactgcagccatccacaagctggcagcacatcaccccttggacccaggagcctggcacaaaaagtcttctactactggtccctagagtagtgtggctgggggcagggttgggggcgagcccagcgggccctgaggtctgagggcaccggctgcaccaccaggcctggcaatgacacactggtggccggccatgcaggttccgctgctctcctctgagggtggaggtggaccatgaatagcatcaagcccaagacaacctctgttcggtaggttcagcacatgttaacttttgaagttaatttaatatatgaaaaccaggcatttaaagtccacgtttgcatgttctgctgagaaatcacaccttctgctgcacagccccacgttcgccaggtctcatgctcacattcgactgcagcccggtggggcctgcccttcctgagtctcctcaccctcccaaacatgcctgcccactggctatgggggcagctgaggctggggcctccctagacaagcctcagaccaaggtccctgtctgtggatctggaaccagcagtgggattgagagcttggccaaagtgtgtgcttgaagcagggctgtctccaccccaaggctggactcagagccctgcccaaagcactcacatcaccaaatcctacacactcatcttcaggcccccaggagtcatttgtgtgcccctgaccccaggtgatatgtgtcctcacatgtcaggcaacatttacctgcccatgttttgtaagagccacagcaaagaacataaatgctaacacttaccagaaaacaggccagaaggaagtactggcacagtgccaggcacagaggaggcaccagaaagtgctgaattaatgaataagcaagcaaggattagatggatagatggatgggggatagacggatgaacgtttgggtggtggacagatggatggatggatggaagcatggatggatggatagattgatggatggatgtgtgggtggatggatggatggatggatggatggatggtggatgggtggatggataaatgtgtggatggatggatggatatgtggatggatggatggtggatgaatggatggatggatggatggatggatggatggatggattgggtgaatgaatggatgtgtggatggatggatggattgggtgaatgaatggatgtgtggatggatggatggatggatggatggatggatggatggatggatggattgggtgaatgaatggatgtgtggatggatggatggattgggtgaatgaatggatgtgtggatggatggatggatggatggtggatgaatggatggatggtagatgaatggatggatggatggatgaatggatggatggatggatgagtggatggatggatggatggatggattgggtgaatgaatggatgtgtggatggatggatggattgggtgaatgaatggatgtgtggatggatggatggatggatggatggatggatggatggtggatggttggatggatgtgtggatggattgggtggatggatgtgtaagtggatggatggattgggtggacggatggatggactgggtgaatggatggatggatggtggatgagtgaatgtgtgggtgaatggatgcattgattgaatggatgtgtgaatggatgaagggatcgagtggatggatgtgtgaatggatggatggatggtggatgagtgagtggatgtgtgggtgaatggatgcattgattgggtggatggatggatggatgtgtggatggatggtagatgggtgggtagatggtagatggatggtggatggatagatgaatggatagaaggatggatggatgtgtggatggatggatagatggatggatggatgctggatgaatggatggatggatggtggatgggtggatggatgtgtggacggatgaatgggtgaaaggatggatgtatggatggatgtgtggatggatggatagatgtgtggatggatgggtggaaggatgaatggatgggtagatgggtgagtagatggatggatggataggtggatggacggatggatagatagataggtggatggatggatggatgggtgggtggatggatggatggatgggtggatggatggatggatagatgcatgtatgggtggatggatggaaaatagactgacaattgggtctttttgcctttgagatgaatgggcctcaggatcaagttagcaggagtgttggtggaggaggtaagggggtagtggaaggtaaatctgatgccttctgacctgaagacatgctcacagcaagcagttcacccccactcactcacacagccttggcagaagagcaaaaggcaaagagacagcttatgcctggagacatgggaccagcccaggcattttcatctggcttcctcagatgggatggtgtctgctgcccctgccagagcctgcccagaatgcagccatggggcaaaggctcagcaaacacctcatttcctcagccctgccaagtcatgtatttactattgtccatttcccttcccttctccccctcttcctcacacaattttcattaaagtaaaacatagagaaaattgcacaaaagtgtacagtcaagcaacttccacaaaaaaatacacacttttggggctgggcacagtggctcacgcctgtaaccccagcactttgggaggctgaggtgagaggagtgcagtggtgcaaccttgagttcaagagtttgagaccaacctgggcaacatggcaagaccctgtctctacaaaaaataaattttttttaaaaaaaagctaaaaattagtcaggtgttgtggcatgcacctgtagtcccagctacttgggaggctgaggtgggaggatggcttgagcctgagagatcaaggctgcagtgagccgtgattatgtcactgtaccccaacctgggcaacagagaatttgtctccaaaaacaaaaacaaaatcccacttctgtagccaggactcagacactgaatgagcacgtcctaaatattccctcaaactcccttctcacagtggctgtagccactacccggacctggttccaacctcggcagcagaaattctttctcctgcttttgcttgttggtggctgctgccctcttctggctgcctgcaggagctgcactcagggaagggaaaggccccgcacctggcacctaccttagtgttgttgtgtagtgttgtgttgtgttgtgttgtgttgtgttgtgttgtgttgtgttgtgttgtgttgtgttgcgttgtgtttttttgagatggagtctcgctctgttgcccaggctggagtgcagtggtgcgatcttggctcactgcaacctccgcctccctggttcaagtgattctcctgcctcagcctcccgagtagctgggactacaggcacccgccaccatgcctggctaatttttgcatttttagtagagacagggtttcaccatattggcccagctggcctggaacttctgaccctgtgatccgcccgcctcggcctcccaaagtgccgggattacaggcgtgagccactgcacccggccttagttttctattaggttggtgcaaaaccacgattagtttgcaccaacctaaaatatttgctgtggtggcaaatgaccaccaactctgcggcccaaaacaacacgaatttattctgttactacaggtcaggtttctggcacaggcctcactaggctaaaatcgacgtgcctgcacagctggctccctctggaagctccgggggaggtccgtgccttctccagcatccagaggcccttgtcttcccgtctgtgaccccttcctggccacgtcttcgtgctgcctcttctctggttcttcttttatgaggcctcatgattagactgggtctgcagggttaaaccaagaaaaccaagacgatctccccatctcaaagttcttaatcttcatggctttttttttttttttttgagacggggtttcactcttgtcacctaggctggagtgcaatggcacagtctcggctcactgcaacctctacctctcaggttcaagggattctcctgcctcagcctcccaagtagctgggatttttgtattttagtagagatggggtttcatcacattggccaggctgatcttgaactcctgacctcaggtgatccgcccacctcggcctcccaaattgctgagattacaggtgtgagccactgtgcccggcctcttcatggcatcttaaagtctcttttgccatgctgacgaacatagctgcaggtctgcgcatcagggtgagggccggcagggatgtggacatttggggtattctgcctaccacagagccctgcccctcaggaagcagtctctttttttggaaaaaacactacccccaaggagagccaaggatgcccacatatttagaatagccttggacattaatgacattattctaaatatgcccacatatttagaatagccttggacattaatgacaaagaccaaaatgggccaggtgcagtggctcacgcctgtaatcccaacactttgggaggctgaggcgggtggatcacgaggtcaggagatcaagaccattctggctaacaaggtgaaaccccatctctactaaaaaatacaaaaaaaacaaaaaatagccgggcgtgatggcaggctcctgtagtccctgctactcgggaggctgaggcaggagaatggtgtgaaccggggaggcggagcctgcagtgagctgagttcgcacctctgcactccagcctgggtgacagagcgagactccgtctcaaaaaaaaataaaataaaataaaaaaaggccaggcgtggtggctcacgcctgtaatcccagcatttgggaggccaaggcgggcggatcacctgaggtcaggagttagagaccagcccagccaacatggtgaaaccccatctatactaaaaatacaaaaattagctgggcatggtggcacacacctgtagtcccagctactcaggaggctgaggcaggagaattgcttgaacccgggagacagaggttgcagtgaaccgagatcacgccactgcacttcagcctgggcaacagagcgagactccatctcaaaaaaaataaaaaagaaaaaaaatatatatatatatataaaataataaataaaataaaattcatatagcaagacagaggccctcgaatagctaaaagaatcttgacaaagcaaaatacaatgggagaaattgctgtagccagtattaaggtttactatatagctacactaatcaagaaaaggtcatatggtgctttttcagcctccctcactggcttccccacatctcccagccccttaaaggtggacacccctaggctcatctgttggtcatctttattctttttcttttttctgagacgtggtctcactctgtcacccaggctggagtgcagcggcatgatcacagctcactgcagcctcaacctactgggctcaagcgatcctcccacctcagcctccccagtagttgagactacaggcgtgtggcaccacgcccagctaattttttaaattttttgtagagatgaagtcttactgcattgcccaggctggtctcaaactcctgagctcaagtgatcctcccatcttggcatcccaaagtgctgagattacaggggtgagccattgagcccagttggtcatccagtcaccttttctatccctcttcataggtgactgcactcttttggttttttcaacacaatctatctgcaggcaactctcaaattcacctcttctccctgtcatctcatgcccctcactgaccagtcaacatctccaccaaaacatctaataggtatctgtattagctttctgttgcttatagcagaatacatgaaactgaataatttacaaagaaaagaaatttctttcttttttttttttttttttttttgagacaggttctcactctgtcacccagcctggagtgcagtggctcgatctcagctcactgcaacctctgcctcccagactcaaatgatcatcccacctcagcctccagagtatctgtgactacaggtgcatacgcggctaatttttttctgtatttttttgtagagatggggtttcaccatgtcgcctgagctggacttgaactccttagctcaagctatccaccctccttggcctcccaaagtgctgggattacaggtgtgagtccctgcacctggcccagaaatttctttcttatagttatggagtcagagaagtccaaggtcaagggtccactttcggggagggtcttcctgctggcgggggctctctgtggagtctgcagagttttgaggcgatgcagggtatcacgtgatgagggagcttagtgtgatcctcccccataataactcatcagtccattaacccattaatggaggagacaaacattcaaaccatagcagcatctcacacacacatcccaagccaatctcggtcctccctcaagcccaccccacccgcaccttcccggtttccatcaatggatggaccagccttcaaagtttacagggtatcctgcattctctagtttatgcgcatccccaatctaaagaaggctgccctctctcaccacctccactgctacctgccctctggtctgagtgcactgcctttcattcggattattgtagtcccctggcttctaaccagcaaccagcgtgatctttaaaaatgtaactcgaggtatgagaatcgcttgaacctgggaggcggaggttgcagtgaactgagatctcgccactgcgctccagcctgggtgacagaatgagactccatctcagaaaaaaaaaaaaaaaaagaaaaaaagaaaaaaagctgggcacgctggctcatacctgtaatcccagaactttgggagatcaaggcaggcagatcacctgaggtcaggagttccagaccagcctggccaatatggtgaaaccgtgtctctgctaaacatacacaatgcaggagattggtcaaggtggtaggagaaattataaagataaagttataggaaatagacacaaactttcttggaaggccggaaggtttgcatagcttcagtaaaagatttggctgaaggtagctgaattctcttaaaagtttagggcgtagatacataggaatgtagaggagtttatctaaatagcttgttcactcatgttgtcctaaaacagacctttgatcattcacgggcaggactactctctctgagggagggcaaccagattaattacccacaaatgtgttgactcaaagcctttgtcattaagtctgtgctgaataaatgcctgcaggaccagctagtcaggccgcggggctggaacaactctttttgtgaaaggtccagccccctagccagctctttcactgaatactggtgtctgagtacattattcatctgtagtgcagcccaggtctgtgggtcagaccctggcaagttagccggatgtggtgacacatgcctgtgatcccagctactcgggaggctgaggcacgagaatctcctgaacccaggaggcagaggttgcagtgagccaagatcgtgccactgcactccagtctggggcaacacagtgagaccccatctcaaaaaaaaaatgtaactcaagaccagacacggtggtcacacctgaaattccagcactttgagaggctgaggctagtggatcacttgagcccaggagctcaagaccagcctggggaatatggcaaaatcctgtttctacaaaaaaaaaaaaaaaaaatgaaaattagccaggggtggtggtatgtacctgtaatcccaactactcaggaggctgaaatgggaggatcgcttgagcccaggaggctgcagtgagctatgactgtgccactgcactctagcctgggtgacaaagcaagaccctgtctcaataaataaataaacaaaataaaactgtaactcagtgttcatagcagcattattcacaacagccaaaaagtggaagcaaaggcaatgtccatcctccgatgaatggatagacacactgtggcacccaaacacccagacagtggaatagtatgcatccataaaaaggaaggaggctgggcacagtggctcacgcctgtaatcccaacactttgggagggtgaggcaagaggatcacttgaggccaggagtttgagaccaggctggccaacatggcaaagccctgtctctactaaaaatacaaaaattagcctggcatagtggcacacacctacaatcccagctagtcaggaggctaaggcacaagaaacgagagtcgcttgagcccgggaggcagaggctgcaatgagccgagattgtgccactgcactccagcctggacaaaagagtgacactctgtctcaaagaaaaaaaaggaatgaagtactcatatgttctacatcatggatgaaccttgaaaatgatgctgaaaacagccagacacaaaatgccacatactgtatggttctgtacacatggaatgtccagaattggcaaatccatagattttaaaaagtagattcggcagggcacagtggctcacgcctgtaatcccagcactttgggaggctgaggctcacttgaggtcaggagttcaagaccagcctggccaacatggtgaaaccctgtctctactaaaatacaaaaattagctaggcatggtggcaggcacctgtaatcccagctactcaggagactgaagcaggagaattgtttgaacccgggaggtaaaggttgcagtgagcccagatcgcaccactgcactccagcctggccatagagcgagactctgtctcaaaacagcaaaaaaaaaaaaaaaaagaaagaaagaaaaaaaaagtagattcgtggttggtgggggaggggaggagtacatgctaatgggtttcttcttggggtgatgaaaatgtcctaaagttagacagcagtaagggttgcacaaccttgtgactacactaaaaaccactgaagtataactttaaaagggtgaattgaatggtatgtgaattatatctcaagaaaacaaactcagctggcatcagcccctgccccaccctgtggtaaagctgggtccttgttggctggtgagggctctcctaatctgcaccccctcctcacctccagacccacggcattgctgctcctggaaccccagccgtcccctgtgctctgctcttctgttctccgtgtgcccagctcttccccccacacctaggtacccggcccctcccagccttcacctgcgcctttacagaggccccatcagaccaccgggccccccaccctccacacgcccaccccgtgaagagactccctttcccctggctcttctgaatttctggcatactatacgatttccttatttttccttatttttattttttaatagagacggggtctcactatgttacccaggctggtctcgaaccccttgtctcaatcaatcctgcctcagcctcccaaagtgcgggcattgcaggctgagccaccacggccgccacgaccttctcttctggagcgtgtcgcttttgtaattatgatgtaaactccgggcacgcggggaccctcgcgcttcgctcactaatttgtccccagaccctactacctggcacagtaggcgctcaatactgttgattgaataaacgactgctactttggaaatcatgtattatttaaatcacatgtttaaacgcacataaacttctgagtagtgttttctgcacacacaagatgtctccaggggcaccaaagaatgcattttccacgtttgtccctaaacgttaatgcataagtaaccttggtcaccaacagatgtgagggcacgtgacgttcgggctgcgccctccccgccccggccctgcacacagtagggccgcaccgcgctttgcaaacaggtggactcggcagaggcgcgaccgccctcaccgcagagagctgggccacctgcaggctctcaggacacccaaggccccacctcccacccggaaaagagacgatacgccgggcgcaggcgcagaagccgcgcccgtccgcggcgccgccagccagggcggaaacggctgcggcttcgctagggacgcatgcgcgggtcccttagttttcgcgagataacggtcgaaaacgcgctcttgtcgatttcctgtagtgaatcaggcaccggagtgcaggttcgggggtggaatccttgggccgctgggcaagcggcgagacctggccagggccagcgagccgaggacagagggcgcacggagggccgggccgcagccccggccgcttgcagaccccgccatggacccgttcctggtgctgctgcactcggtgtcgtccagcctgtcgagcagcgagctgaccgagctcaagttcctatgcctcgggcgcgtgggcaagcgcaagctggagcgcgtgcagagcggcctagacctcttctccatgctgctggagcagaacgacctggagcccgggcacaccgagctcctgcgcgagctgctcgcctccctgcggcgccacgacctgctgcggcgcgtcgacgacttcgaggcgggggcggcggccggggccgcgcctggggaagaaggtgggcgcggggccgggccgggggagccagggcctggtcgcccggctgtaggtgctgcgaggctcctccggttggcctccaggcgcctcccctttgccgggtttgatttgcgtgggttttctccgtacagccctggttttgcagatgggagagccagaaacgcagaaaagttaacttattcgaggttgcagggcgtggacacgcacagtcctttttcctccacccacttctgcccgggtaaattagaaaactcactgaagaaaagatgagtcagagaaggtgtgggggaggggcagaggttgggtgagcctgcctcgcatcatttcctttctgtctcggaatatgcttttcacggctgtctgagagtaatactagcattcagtaactcctacccaggggcttacagtgtgccgcttacccttgtaactgccaaatacaattttcgcagtagccctgtggcttagatactgttagctatcactgttcccattttacagaggacaggactgtggctcacaggttaagtggctttgtcgaaatgcgcagccgataactgacggagctaggcttgagccaagcagtccggcctccggatgggtagtgttagccactacactgcctctctggtcaagttcattgtggagtggcttcctgtcctgctctcggtcactccctctccaccctcgcctgtggattgcagcagcttccaggataaaaaagaaaccctgagtacagcagagtttctcagccctaccccccttgttctcagagtcgggagaggcttgggagtgctctggggacgcctctcagaggcttcaagctgtagcttggaatcagccattcagtcaccaatcagatagggcctaaatgtgtcaccatgggtttcactctgtaaagactggtgcctgttggggacaggatggacagaacagctctctgcctgagagcagtcaagtccagattttaaaaaaaatcagtactgaacaaacaaaacaggacgtagaaaaatcgggttttatggatatttaatgtctggaaaaacactgataaattgcattttaaaggcggtctacgaaacatagctgacatttgagatgtatgtgtgcttggttttatttatatcgtcatgtagttactgtgtgctgggaaaagtacaccagaaggtgagcggtgggtatggacaggttggtagcgggcgactctgccttcctccccagaagttcagcatagcggttaagggtcgactctggcaccacactcttagggtttcagaacatggctctgccatcgtctagctacacgatctcaggaatgtccattagcttccctgtgcctcaatttcctcatctgtacagtcatggtaacacagtgcccagcccacagggctgtcagagctgcgggagctggtacacctgccaacggtgtctcagaattgccagtagtccaagcagcaccctgtcctgcctctcctttcctctcttcacattccagaagcggccttttatggtcttgtgaccagctccctgatctcagtggtgacgtcagcagatgaggagtatggtagccagggactgaagactggtggtcactcggggcagctttctaaataacaattggagtgcctactagtttcctgtgattgccataacaaatgatcacaaatctggtggcctgaagcaatagaaatctaccccctcaatctggaggccagaaatctgaataagcagggtgccacagaccggcacaccctcggaatgctgttggggaggctccttccgggtctcgtccgctttgtggtggctccaggcattctttgacttgtggccgcttcactccaggctcacacggccttccctgtgtgtctcctgcaaggatacctatcattggtgcatccaggtcatccaggatgatctcctctcaagaccctcagcttacctttgcaaagatgctttttccaaagaacattcatggtttcagcaatttcacgtgaacataccttggggtgacatcgttcagcctgctgtagggcaggatgtgggatcaaccctattttcttccctcccacaactccccagcccctccctcagtgtctcctgctctaagtaggtagctccactacaacttcctttggcacttgagtcttcagtgggccacgcctcctaggacagtattagagagcagggggtttggctgaggtggaatcaggccactcttgggcatttggtgcagcccctttgctgccaggcgactctagcctctacagaggacctcgtgtaggcacctctgtccactcagcacttggcgtctgtgctgaaaagccctagggaggattgtggggtcgcttgtctccaaacctatggtaaaccgttctgttctttccttcccagacctgtgtgcagcatttaacgtcatatgtgataatgtggggaaagattggagaaggctggctcgtcagctcaaagtctcagacaccaagatcgacagcatcgaggacagatacccccgcaacctgacagagcgtgtgcgggagtcactgagaatctggaagaacacagagaaggagaacgcaacagtggcccacctggtgggggctctcaggtcctgccagatgaacctggtggctgacctggtacaagaggttcagcaggcccgtgacctccagaacaggagtggggccatgtccccgatgtcatggaactcagacgcatctacctccgaagcgtcctgatgggccgctgctttgcgctggtggaccacaggcatctacacagcctggactttggttctctccaggaaggtagcccagcactgtgaagacccagcaggaagccaggctgagtgagccacagaccacctgcttctgaactcaagctgcgtttattaatgcctctcccgcaccaggccgggcttgggccctgcacagatatttccatttcttcctcactatgacactgagcaagatcttgtctccactaaatgagctcctgcgggagtagttggaaagttggaaccgtgtccagcacagaaggaatctgtgcagatgagcagtcacactgttactccacagcggaggagaccagctcagaggcccaggaatcggagcgaagcagagaggtggagaactgggatttgaacccccgccatccttcaccagagcccatgctcaaccactgtggcgttctgctgcccctgcagttggcagaaaggatgttttgtcccatttccttggaggccaccgggacagacctggacactagggtcaggcggggtgctgtggtggggagaggcatggctggggtgggggtggggagacctggttggccgtggtccagctcttggcccctgtgtgagttgagtctcctctctgagactgctaagtaggggcagtgatggttgccaggacgaattgagataatatctgtgaggtgctgatgagtgattgacacacagcactctctaaatcttccttgtgaggattatgggtcctgcaattctacagtttcttactgttttgtatcaaaatcactatctttctgataacagaattgccaaggcagcgggatctcgtatctttaaaaagcagtcctcttattcctaaggtaatcctattaaaacacagctttacaacttccatactacaaaaaattttctattcctgttggtggttctttcattttggatatgctggatattcccagtacagccagtttgaggatccctgtcaagggctccaacctgggaggggtggctggatttcctgacagctcgctagctgctcatgagcagtgtctgcccttagcaaacagtggtctgctagggtagcttttgccgctcttagaatttgcctgcaccaccaacagtatcagaatcaaagccaagtggctattctctgtcccagttcaccagctatgaccttgggaaagtccagtgtgccgtcccataggtgggatcttagccaaggccgcaggacactgtccccagtaagccgtggaccccggcctttaagcccctccacaccttcacctgacgcttccaggtgccagactccttgctaggagcaaaggccataggagtgaatgggacagaagtgtagccctgccctgttggcctcagaaacctagcagaaacaagctttaaccagttcatcactagcttggggtgctgccgtggcgctgagctggttgctatcccaaaacagcgtggcctgacctacacactgtacacccccgacccggcgcatgcctgctctcaaggcgcaggtcagggtgagttctatagagaatagacacatcgcccctcactgtccctaagtgtgagcagcttggctttggggaagagattttcttggggtgcgtgggaaagtattcttttttttttttttttttgagatggagtctcactctgttgcccaggctggagtacagtggcatgatctcggctcactgcgacttccacctcccaggttgaaaggattctcctgcctcagcctcccaagtagctgcgactacagatgtgcactaccaagcctggctagttttttgtagttttagtagagacagggttttaccatcttggcccggctgatctggaactcctgacctcaggtgatccacctgcctcggcctcccaaagtgctgggattacataggcgtgagccaccgcgcccggccttggacatggatttcttaaagcaacttgaaaaaacaaattctatgttcattttttttacaatcaggtagaatttgtgtttctggaaaaggtacgcacaaatcttgggcttacttgaaagctggaggtaacagccgtctcttgctctctgactcctttttcccctaagacagaagagggaagacaagtccaaacgtctgtgctttgcgggagacttcaggggaatttgatcaagcgtttcctggaacaaagggtcaaccctctggtcttcaggttcccgcagcctcccagctgcctgcccttctgccttctgttacacagtgccccctccacgccacactcacactcgctcccagattctcacagccacccctctccaggactcactccctggtgctcctgagaccacaccccacacaaactattcttgctgaagtcacaggctgctgcagcatttttgttctacctgaatctctagggcctctgacaccttccgtgaccattctctccaggagctcttctccctctccgctgtcctcctctcaggtccctcacaccctcccccagcctcagcctcacccctcctctagggagcacagccctttcttagcctcacccatcctaggtccctggtacctgccaggtatctctagcccagatctttctcttgccccagaccccaactgcctaggggcagcctcacagtggctgctatagcaaactaccacgtacttaccgccttaagcggcacaagtttatcttatggttctggaggtcagaggtccaaaatgtctctccctggtctacaaatcaggtgtcagcaagctggttcctcccggaagacctagaagagaatccgtgtcttgccttttgcatcttctagaggctgcctgcattctttaactcatggcccctccctccatcttcaggcccacagatgagcatcttcccatctctctgactgattctcctgcctccctcttacaaaaactctagtgactacactgggccacctggataacccaggatcctcttcccatctcaacatcaatttaaacacatctgcagaatttctttgccaggtaggggaacatattcacagatcccagggattagcacatgggcactgtcagagtcatgcaagccacaccccaaattcagcctccctgcaacctgcgccccgttccgtgcctgacaccaccatctagtcagtagcccaagccacaaaccctccttcctctccccactgtcactcttccctcaattaaaactgggcgctaggccaggtgcagtggctctcatctgtaatccctgcactttgggaggctgaggtgggaggattacttgaacccaggagtttgaggccagcctcgccaacatagggaaacctcatctctaaaaaaaataaaaataaaaaaaatgtagctggatgtggttgtgtacacctgtgctcccagctactcgggagactgaggcaagaggattgcttgagcccaggaggatgaggctgcggtgagccatgatcacaccactgcaatccagcctgggtaacagagcaagaccctgtctcaaaaaaaaataaaagtaagcaccaggtcctatactttgtaactcacaagtgtctctcccatccacctcttctgctacctgccgccacccccactcccagtggggcctcagccctttccactggacaaccacagtgagtgacctcgcaattcatcttccgcctctgccccgccttccacccatccagcccatctcccatcagcagccagaaataaactgagtcataacacagtcccctgactcttcttagaagccacgaactctgtccatatttttttgttttatatttttattcccgtgataattaatctgagtcatcttgctgactgctttctagccacacaaatcctgtgtgaattgcatttggaatcagacaggcaaacatgacgtggggtagcatgtgctcatgccagagtgacccgtcccccagtgtctgctgagataaaggcaagacttctcttttacagggaaatttgcaattgaaagatacttccatcaaagaagctcttagtttcttgaatcatttactaagttgagaccccgtggcaagaatcatggatgccaaccccagtaatggtcaccaaggaacagaggccaattcaatgcatgaatggggtcctcatggaaagccaaatgacatatgatttaagtttttgaggtgtggctcaaatagaaaaagaatatcgtggaccatttgagtcacccccaggcacatggcaagtacaaggccttccaaactcccacgcctccttgatgacagtctgtagacatgaagctacaattttgtttcagcaaaacagcatcatacatactgtttaatgattaaacagaatgcacttctgtttggaatgaattaaaaatgctgagcccggcacagtcgttcacgcctgtaatctcagcactttgggaggctgaggtgggagatctcttgaagccaagagttcaaaagcctgggctgcaaagcaagactccatctctaaaatataataataataataaataaattaggccggtgtggtggctcatgcctgtaatctgagcattttgggaggccaaggcgtgcagatcacatgaggtcactagttcaagaacagcctggccaacatggtgaaatcccatctctactaaaaatacaaaattagctaggtgtgttggtacatgcctgtagacccagctaatcaggaggttggggcagaagaattgcttgaacctgggatggggaggttgcagtgagctgagaacacgccactgcactccagcctgggcaacagaacaaaactctttctcaaaataaaatttaaaaaaaataaaataaattagctggccacagtggtatattcctgtagttccagctacttgggaggcaggaggatcactagagcccaggagttcagggctatagtgagccatcgttgcgccactgcactccagcctgggcagcagagcaagaccctgtctcaaaaaacagaggaaagaaaagaaaggaaaaaatagtaatcatacctgacgttaaatatgttattaatctgaattctacgagttttgtaggcttctctctccccaatttgcaattttattggcgatttatagtttccaagggctagacacatgggcttctattccacatctggctatatatttgtgcctattgatgtttcattattgaaatgaaaacctggtcatcatgggagtctgggcaatgttttactacttccaaatcagtttctggctggagaaccccagctacaatgtccccatgtccctcaggatgaaatcttttttttttttgaggtggagtctcgctcagtcgcccaggctggagtgcagtggcgtgatctcagctcactacaagctccgcctcccgggttcacagcattctcctgcctcagcctcccgagtagctgggactacaggcatccgccaccacacccggctaattttttgtatttttagtagagacgggttttcaccatgttagccaggatggtctcgatctcctgacctcatgatccacccacctcggcctcccaaagtgctgggattacaggagtgagccaccgcgcctgcccaggatgaaatcttaatccatgcatcatcatgcatgggacggggtacacaactgtgcagagcccagcccagtgccatgttccctccacagcaagactgtcacctcaccccctcccaccctcccccgcagcccttgcccctgctgtttcctctccctgcagccttcctcactatccaccccaagccccccagctcagaagacatccttctgatgcaggcttgcccatgcacccactcacagtgggatccctgcagcccccactcctgcccgggtcctgcttcctctagcgcgactccctgagggctgcttccagcactttccagcggcttctgagtgaaggcttattttgtgtttgctgagtgaatgagtaaacagcagcgatcaaaggcccactagcgtctctcaggggcctgagttccttgcaagcaggaaagcaaaagatgcctccgccccagggtttcagattcctggattccccttcagctttcacttttggttgggcttcccagcccagtcagtcggactgtgaaagcacctgccccgcagtaggcacgggcagggcaagagggcatcttctcaggggagccaggtatgccccttggtctgccacccatgcatcatatgcccctgttccctgagcctctgctccccgcccctggtccacatacccccgccccggtgcccttcactctgaccaggcccagtgagctccagccaggaaccccagggaggagtccccaccacctgagtcactgcaggccatcccaggggtcctactcgccaggaagggttgacgcccacgtacacatacacctctgggctcctggcactctgagctgtatgtttcattctggttcattcaccattcattcatttactcggtagattcttagcaaagggctaccagctcagaccgggagtggccagctcttctccctcaccaatgctccctctcccagcaatgttgtaaggttcaatgagatgtggtgtggcgaggtctgggggtgacagcccaggataaacgtcactaaatgtcatcattgttactattcttaaggaactgcctgttttaaaacaagcagccttaaaattaaagtgtaggtatggggccaggcacagtggcttacacctgtaatcccagtactttgagatgccaaggtcggcatttcacctgaggtcaggaattcaagaccagcctgaccaacatggtgaaaccctatctctactaaaaatacaaaaaatgagccaagtgtggtggcgggtacctgtaatcccagctacttgggaggctgaggcaggagaatcacttgaacttgggaggcagaggttgcagtgaggcaagattataccactgcactccagccagggcaatagaacgagactcggtctcaaaaaaaaaaaaggccaggcacagtggctcacacctgtaatctcaacactttgggaggccgaggcaggccaaccacttgaggtcaggagttcgagactagcccagccaacatggtgaaaccctgtctctactaaaaatacaaaaactagctgggcatactggtggacacctgtaatcccagctactcaggaggctgaggaaggagaatcacttgaacctgggaggcggaggttgcagtgagccaagattgtgccactgcaccccagcctgggtgacacagcaagactctgtctcaaaaataaataaataaataaataaataaataaataaaagtgttgttatggtaaataaataaataaataataaaacaaaccctgtggcggcaagaaataccagatttaataaggtagatctaatagactgaactctactactaagaggcattgcgtggccaggaggctggcctcaagccgccacctggttttgagtctcagctcttctacttagtttcacttgcgtccatgtaaagagaccactaaacaggctttgtgtgagcaataaagctgtttatttcacctgggtgcaggcgagctgagtccgaaaagagagtcagcgaagggagataggagtggggcctttttataagatttgggtaggtaaaggaaaattacagtcaaaggggggttgttctctggcgggcaggagtgggggtcacaaggtactcagtgggggagcttttgagccaggatgagccaggagaaggaatttcacaagacaatgtcatcagttaaggcaggaacaggccattttcacttcttttgtggtggaatgtcatcagttaaggcaggaaccggccatctggatgtgtacgtgcaggtcacaggggatatgatggcttagctggggcttagaggcctgacattcctgtcttttttttttttttttttttgagacggagtctcgctctttcgcccaggctggagtgcagtggcgctatcttggctcactgcaagctccgcctcccgggttcacgccattctcctgcctcagcctcccaagtagctgggactataggcgcccgccacggcgcccagctaattttttgtattttcagtagaaacggggtttcaccgtgttagccaggatggtctcgatctccggacctcgtgatccgcccgcctcggcctcccagagtgctgggattacaggcgtgagccaccgtgcccggcctctgtcttcttatattaataagaaaaataaaacgaaagagtggtaaagtgttgggatggtgaaaattttttggggatggcatggagagataatgggtgatgtttcttagggctgcttcaagtgggattaggggcagcgtgggaacctagaatgggagaaattaagctgaaggaagattttgtggtaaggggtgatattgtggggttgttagaagaaacatttgtcgtgtagaattattggtgacggcctggatatggttttgtatgaattgaaaaactaaatggaataagagaaggagaaaaacgggtataaaaggtctaagaattgggaggacctaggacatctgattagagagtgcctaaggagattcagcatagtccggtcagcaaagattctttatttacttcaagagttaagagtggcagtttggggatagcaccaggagatatcagctgtgatggcttggagaaacagtgtaaaccggcagtgtaaacaagagcagggcatgtatgagtagttgagaacggtgaataggagtatgactagacagaagatagtagggatgacaagttttttgggggcacggtctaagttggtctggtgtctggaataagactggggcctaataaaaaggagtgtctctacaggagctcaaatgggctgcaccttgtagtattctgaggacaggtctgacttctgagaagggaaagtggtaaaagtattgtccagtcctttttaagttggtggctgagcttggtgaggtgtgtttttaagactattagtctgttctactttttctgaagactgaggactgtaagggatataaaggtttcactgaatactaagagcctgaaaaaatgcttggctgatttggctaataaaggtgggtctgctatcggactgtatagaggtgggaagtccaaactgaggaattatgtctgacagaagggaagaaatgaccgcagtggctttctcagaccttgtaggaaaggcctttacttattcagtgaaagtgtctacttagactaagaggtattttagtttcttgactcggggcatgttgagtaaagctaatttgtcagtcctgggtgggggcaaatccttgagcttgatgtgtagggaagggagggggcctgaataatccttgaggagtagtagactagcagatggaacgctgagaagttatttccttgaggatagatttctacgatggaaaggaaatgagaggttctaaaaggcaggctagtggcttgtactatagcatagcctgtctttgctggtgtgtggcgagtaggcctggtggaactgccatcaataaactaagtgtgatcagggtgagaaacagggaagaaggaaatgtggggaaatgaggtgaacatcagctggatcagagagatgaaggagccggggagcagaaagtatatgcatcaggtgtgaggaagaaaatagattttggaaattatgagagctgtagagagtgagttgagcatagtttgtgattttaagggcctctgaaagtattagggtcagtagccactgcacagagacatgatggccagcctaaaacagtaaggtcaagttgtttgggcaaaaaggctacaggacgcgatcctggtccttgtgtaagaattccaactgcacagccctgcactttggctgtgtgtaatgcaaagggttgggatgagtcagggagagctcaggtgggggcagtctctaaagctgtcttcaaggaacagaaaaaggagtggggaaaggatttaggatctgtggggtcagctaggtttctttttgtgagtttatataatgattttgttaggatggcaaaaccaggtatctaaagttgaaagtatctaaccatgcctaggttgtagaaggtgttggggtttgagagatcagtcagacacgatcggcagggagagcgcgtgtgtttttataagaattacgccaagacagataacagatgaggaagaaatttgggcttgactgaagtaatgggggctgtctgtgaagccttgcagcagtacagcccaggtaatttgctgagcctaatgggtgtcagggtcagtctaagtgaaagcaaagggaggctgggatgaagggtgcaaaggaatagtaaagaaagcatgtttgagatccagaacagaataatgggttgtagagggaggtattgaggataggagagtatatgggtttggcaccacggggtggataggcaaaacaatttggttgataaggcgcagattctgaactaacctgtaaggcttgtctggttttaggacaggtaaaatgggggaatggtaagaagagtttataggctttaaaaggccatgctctaacaggcaagtgataataggctttaatcctttcaaagcgtgctgtgggataggatattggcattgagcggggtaagagtgattaggttttaatgggatggtaaggggtgcatgatcggtcgccaaggagggagtagaggtgtcttatacttgtgggttacggtggggagatacaaggggaggatgtgaaggaggctttgaactgggggaaaaggtggcaatgaggtgtggatgtagcctaggaatagtcagggaagcagataatttagttaaagtgtctccgcctaataagggaactgggcaggtggggataactaaaaaggagtgcttaaaagagtattgtctaagttggcaccagagttggggagttttaagaggtttagaacctggctgtcaatatttacaacagttatggaggcaagggaaacaggcccttgaaaagaaggtaatgtggagtgggtagcctccgtattgactaagaaggggatggacttactttccactgtgagagttacttagagtgtctgtgatggtcctgtaggcttccaaggcgatcggcagtgccagtcttcagctgctaagccaagaagatctgggaaggagtcagacggccttgggccagagttccaggggctctggaagtggctgccaggtgagttgaacagtccaattttcagtggggtcctgtacagatgggacatggctcaggaggaatcctgggctgtgggcacttgtagcaagctcctgggggaggaggttctggaggaacccctggcagctgcggttcaggcgtttggagttcttgtgtgctggagatgtggctggggtttgtctcacagtggaggcaaagagttgcaactcagaaatatgttgctacttggctgcctccactctattattgtacaccttgaaggtgaagttaattaagtcctgctgtggggtttgagggccagaatttaacttttggagttttatttaatgtcgggagcagactgggtaataaaatgtatattgagaataagacggctttttgactttttagggtctagggctgtaaagcgtctcagggttgccgccaaacgagccatgaactgggctgggtttttcatatttgatgaaagagcctaaacgctcactgatttgggagaggtctgataaagaaaaatgagtattaaccttgactatgcgtttggcttcagccacctttttaagaggaaatagctaggcaggtgggggagggctagtcatggaatgaaactgtaagccggactgggtgtgaggaggggaggtgataaaaggattatacggtggaggagcagaggctgaggaagaattgggacctagctcggcctagtgaggaggggagaggtcagatgggtctgtagaaaaggaagattagaaaaactcagcgacacttggggttgggactgaggagacaggcaggagggaaagaaggaagatttgggactagttgcactgggcagagagactagggagggacagatgtgtaaaagaatgcctggacgtcaggcacctcagaccatttgcctatttttcgacaaaaattatttaggtcttgtaggatggagaaatcgaaagtgccgttttctgaccatttagagccattgtcaagtttgtattggggtcaagcggcattgtagaagaaagtaaggcatttaggttttaggtcaggcaagagttgaagaggttttatgttcttaagaacacaggctaagggagaagaaggaggaatggagggtggaaggttgcctatagtgaaggaggcaagtttaaagaaaagggagagtagagacatggagggaagcggttcgggggttcttaccttccagaaaagcaggaaaggggtcggggcacagagatacgaggttggggcacggaaataagggagcagggtgcagagatataagaggttggggcacagaaataagggattggggcacagagatataagaggtcggagcgtggaaataagggatcggggcgcagagatacaaggttggggtacatgcccctcccccagaaaaatgggacttgctgctaagggtgaaggagaaggggctgggggtttcttgccttacagaaaggtggagaaggggtagagacatgaagagaaggggttggggtacttgcccctcccctagaaaagtgggacttgctgctaagagtgaagaagaaggggttggggatttcttgccctccagaaaggtggagaaggggtagagacacagagagaaggggttggggtacttgcccctcccccagaaaagcgggacttgccgctatgggtgaaggaccaaggcaggcgtccttgcgtggtctgacacctctgaaacatgggtgaataatcagagaggtgtccttgcaatgattaaacaccaagggaaggctgccttcctagtccgtgaccagtgctggagttttgggtccacggataaaacgtgtctcctttgtctctaccagaaaatgaaaggaattgaaattaaaagaagggagagattgaagtgtggcgccaagattgaaaggagaaacaggttgagggatagtgagggaggttggagaagagagtaaaaagaggctgcttaccggatttgaaattggtgagatgtttcttgggctggttggtctgaggacctgaggtcataggtggatctttctcacagagcaaagagcaggaggacaggggattgatctcccaagggaggtcccccgatccgagtcacggcaccaaatttcactcacgtccgtgtgaagagaccaccaaacaggctttgtgtgaacaataaagctgtttatttcaccagggtgcaggtaggctgagtccgaaaagagagtcagtgaagggagataagggtggggccgttttataggatttgggtagataaaggaaaattacagtccaaggggggttgttctctggcaggcagagtaggggtcacaaggtgctcagtaggggagattttgagccaggagaaggaatttcacaagacaatgtcatcagttaaggcaggaacaggccattttcacttcttttgtgggagaatgtcatcagttaaggcaggaaccggccatctggatgtgtacatgcaggtcacaggggatatgatggcttagctagggcttagaggcctgacacttagcatctgtgtaaacttagacaagtaaacccatccacaaaatggatgattacagtagctacctagaagggatgttgtgaggattctgtgacttgtttgtaaactacagagtaagtacaccagtaaagatgtgttcagcctctcttgttacaggtgtgatcacaccatcatgatgtgattttgtaacaggatgattttgtaacacgatgacattttgtaacagacacagagccagggacaataccactgagctgctgaagcaacccgccctgcttctggcctccaagtcacatgagctaatactttaaaaaaaaaaaaaaaagcattatacgggccaggcacagtggctcacacctgtaatcccagcactttgggaggccgaggtgggcagatcacttgaggtcaggagttccagaccagcctggccaacgtggtgaaaccctgtctctactaaaaacacaaaaattagccaggcatggtggcagatgcctgtaattcaacctgggaggctgaggcaagagaatcacttgaacccaggaggcagaggttgcagtgagccaaaattgagacactgcactccagcctgggtgacaaaacaagactctcaaaaaaaaaaaaagtattatacaagacaacagattcaccaaggtcaacgtgaaagaaaaaaaatatcaaaggcagctagagagaagtgtcaggtcacttacaaagggaaccccatcaggctagaaatggacctctcagcagaaactttacacaccagaagagatcaggggctgttttcagcatccaaagaaaagaaattccaatcatttcaagaattccaagaatttcatatcccacccaactaagtatcataagcaaaggataaataaaatctgtctcagaaagcaaatgctaagggaattcattaccactagaccagccttataagaggtccttaagggagtgctaaacacagaaactaaagaaggataccagccaagcatggtgactcatgctctccatccctccactttgggaatctctgaagcccaggagttggagtccagcctgggcaacatagtgagaccccgtcactacaaaaaataaaaaaattatccagtcatggtgatgtgtgcctgtggtcccagctactagggaggcagaggcaggagtattgcttgaacccaggaggtggaggctgcagtgagctgtgtgtgatcatgccattgcactccagcttggcgacagagagagaccttgtctcttaaaaaaaaaatgcacatgtaccctaaaacttaaagtattaaaaaaaaaaaaaaggctgggcaaggtggctcacacttgtaatcccagcactttgggaggccgaggcaggtggatcacgaggtcaggagatcaagaccatcctggctaagatggtaaaacctcgtctctactaaaaatacaaaaaattagccaggcacagtggcgggcgcctataatcccagctactcgggaggctgaggaaggagaatcacttgaactcggagggcagaggttgcagtgagctgaggtcatgccactgcactccagcctgggtgacagagtgagactccatctcaaaaaaaaaaaaaaaaaaaaaagaacaatatctgctaccacaaaaacacacttaagcacatagccctcagacactatacaatcatgtctacaaaacagccaactaacaacacaatgacagaatcaaaatctcacacatctagccgggtgtggtggcacgtgcttgcaatcccaactgcttgggaggctgaggcaggggaactgcttgaacccaggaggtgaaggttgcagtgagctgagattgcaccactgcactccagcctggtgacagtgcaagactctgtctcaaaaaaaaaaaacaaaaaaaactcacatatcaatactaaccctgaatgtcaacaggctaactgaccccacttaaaaaggcatagagtgggccggacacggtgcctcacgcctgtaatcccagcactttgggaggctgaggcgggcggaacacaaggtcaggagatcgagactatcctggctaacacggtgaaaccctgtctctactaaaaatacataaaattagctgggcgtggtggtgggtgcctgtagtcctagctactcgggaggctgaggcaggagaatcacttgaactcggagggcagaggttgcagtgagctgaggtcgtgccactgcacttccagcctgggtgacagagtgagattctgtctcaaaaaaaaaaaaaaaaaaagaataatatctgctaccacaaaaacacacttcagcacataggcctcagacactatacaatcatgtctacaaaacagccagctaacaacacagtgacagaatcaaaatctcacacatctagccgggcatggtggcgcatgctggcaatcccaactgcttgggaggctgaggcaggggaatcgcttgaacccgggaggcggaggttgcagtgacctaagattgcgccactgcactccagcctggtgacagtgcaagactctgtctcaaaaaaaaaaaaaaagaactaacatatcaatactaaccctgaatgtcaacaggctaactgaccccacttaaaaggcatagagtgggccggacacggtgcctcacgcctgtaatcccagcactttgggaggctgaggtgggcagatcacaaggtcaggagatcgagaccatcctggctaacatggtgaaaccccgtctctactaaaaatacataaaattagctaggcatggtggctggtgcctatagtcccggctactcaggaggctgaggcaggagaatggcgtgaacctgggaggcagagcttgcagtgagccgagatcacgccactgcactccagcctgggtgacagagcaagactccgtctcaaaaaaaaaaaagaaaagaaaaaaaaaggcatagagtgacaagctggataaaaagacaagacccaactgtttgctatctttcagagacccatctcccatgtaactacacccacaggttcaaagtaaagaggatagagaacccagaaataaagccacacacttataaccatctgatcttcaacaaagtcaacaaaaacaagcaaggaggggaaagaagctcctattcaataaatgatacttggataactggctaggcatatgcagaagaatgaaactggacccttgcctttcaccacatacaaaaattaaaacagactaaagatttaaatgtaagccctcaaactacaaaaatcctaagaaactctaagaaatatccttctcaacaccagccatggcaaataatttatggctaagtcctcaaaagcaattgcaacaaaaacaaaaatgataagtgggacctaactaaactaaagagcttctgcacagcaaagaaactatcaacagaatgaacagacaacctacagaatgggagaaaatatttgcaaactaggcatccaacaaaggtctaatatccagaatctataaggaacttaactcaacaagcaaaaacaaataatcccattgaaaaatgggcaaaatacatgaacaaatacttctcaaaagaagacatataagcagccaacaaacacatgaaaaaatgcttatcatcactaatgatcagagaaatgcaaatcaaaagcacaatgtcgcatctgtagtcctagttactaaggaggctgaggcaaaaggatcactggagcccaggaggcagaggttgcagtgagccaagatcacaccactccactccagcctgggtgacagcaagaccctttctaaaaataaaaaaataaaataacctacaatgagataccatctcatactagccagaatggctattattaaaaagtcaaaaaacaacagacggtggcaaggttgtggagaaaagggaacactaacttatacactgttaatgggaatgggaatatgtacattagttcagccactctggaaagcaatttggagatttgtcaaaggacttaaaacagaactaccatttgacccagcaattcgattactgggtgtatacctaaaagaaaataaattattctacaaaaaagacacaagcacttgtatgttcatcgcagcattattcacaatagcaaagacatggaatcaatctaggtgtgcatcagtggtggactggataaagaaaatattgtatgccagacacggtggctcgtgcctgtaatcccagcactttgggagtccaaggtaggtggatcacctgaggtcgggagttcaagagcagtctggccaacatggagaaaacccttctctactaagaaggctaaggcagaagaatcacttgaacttgagaggcagagtttgcagtgagccaagatcacaccactgcactccagcctgggcgacagagtgagactctctctaaaaaaaaaaggctgggcgctgtggctcacacccgtaatgccagcattttgggaggccaaggtgggtggatcacctgacaccagcctggcccaatggtgaaaccacgtctctgctaaaaatacaaaatagaaaaataaaaatacgaaaattatctgggcttggtggcgcatgtctgtaatctcagctacttgggaagctgaggcggtagaatcacttgaacccaggaggcagaggttgcaatgagccgagatcacaccactgcactccagcctgggagacagagtgaaactccgtctgagaaaacaaacaaacaaacaaacaaacaaacaattgaagccagtttgagttgagctttctgatatttgcagtgaatggcatcatagtgctacatatggaaatttagaatatggtaaaatgctgtttcaaatgtataagaacaaatcattaatgggattggcacagtgggaaaaattgtagcattcctacctcactccttctaccaaaataaatcccaaatggatacaagatatgaatggaaaaaagaaaaagaagctgcaaacctgggggaatttccttataattgtgaacaggaaggagagggccatgaaataaaaccctgaccaatttgattgcttaaaaaaactaaaaatgggccaggcgcagtggttcacgcctgtaatcccagcactttgggaagccaaggcgggtggaccacctgaggtcaggagttcaagacgagcctggccaacatggtgaaaccctgtctctactaaaaatacaaaaatcaggtaggcatggtggcagatattgcagtgagcggagatcgtgccattgcattccatcctgagtgacaagagcaaaactctgtctcaaaaaaacaaaaaattgtaaacaaatttaagaggcagacaatcacttgtgttcccattttatagtgaaagaaacgaaatgtaggttacatagcttccccaaatcattcgttcattcactttttgacaagtatttattgagcacctactaagtgataaacatggccaggaccagagggatgtccctgccttcatggagttcccattcgagcaggagagacaggcttaagtccactaatcacacgaacagaagtgattacacttgggctatatggggcctggccaaggatgggcgaacaaagccagcttctctgaggaaagatggtggcagtcagccagttgaaaagggctgggataaaatgccttcctggcaggggtccagcctgtatgggggacagcctgtacacagcctggaaccaggagggaacaggactcctagaaggaactgaagagccaaagtggccaagctgagggctggggcgaggcttgggtggggtggcatagcagcggaggttggagggcaaaggtccctctgtcattctaagattcaaggaaggaggggcctacccatccgttgcgatgccctgcccgtgtctaagaaatgagccaggctccaggtcaaccttgtgtgccagcctcctttgcagcttgagctggcaggaggccccaggacccagacagggctggtgacacaagcaagctcatttcccaggccggcagcagagatgtcagggttttgaatatgcaaaggcgctgtgttggcatttggtggctggcctccgtggcagaggcagctcacttttccttccgaccagctgcctactgtcctttgaccacttgcttttctgcttaaacagattccagccctgttctattttgtcttctggttttgttttgcagttagagcctgcatgagcttggttttgtcccaagggccagggcagggccctaaagaagtccaggcagggaggtcagatttgcatttttcaagcctcagccacagggtaggctgcagggagcaagggaggatatgggaagccaggttaggaggccgctggaatggctggggggtgggggatggtggcagaaggagggtcatggggcagtttgtagtgagggcatgcatttgaggggtgttgggggcttggcatgggtgtgggacatgagagggtgggggtggcatgaaggaggctgacaggaggggacacagagaccatgttcagggtgacaacagagccacaaaggtgatggcctggttttgatcaaccctgaatatgaggttccccaggaggtgtctgggggcaaggaggtgtgtcctagggcctggagaatttcctgagagtgggaatggctggccagggagagctgggcagaccccatgagggcctttcaggacaaggacagggggatgaggtgttgagggctgggcagtgacagctcaggaatcaagccctgtacccactccacgcacacatgcagcttcagtttcaaaacatgcgtggaaggatcttttggaaacacgcccagactgcagacacccaggtccctctaccagggagtctgactctgtcccaggtggggctcaggaatgactgcagcactgccccaggcagagggacgttttcaccttcagctgttaagcactactaattgctctatctcatcttcccaaccaaattgttcaggatagacgttgtaactcctctttgatctcagactgctggtgaaaagcaggttttacagaccagggccatgtgggggcgtcctgcagagactccaagtggcgcccaggctcccagatgaccatcctcaccctttaacccccagacttggatccccgagggcacacagtgtgtttcccggggaagtgggtggtctgctggtgaactgaatgcccagaagaggtgagccgcagatttaaaacctgcctagtggccgggcgcagtggctcaggcctggaatcccagcactttgagaggccaaggcaggcggaacacttgaggccaggagttggagaccagcctggccaacatggcgaaacctcgtctctactaaaaatacaaaaagtagccagatgtggtggtgggtgcctgtcatcccagcctctcaggaggctgaggcagaagaatggccaagattgcgccactgaactccagcctgggcgacagagtgagactctgtctcaaaaaataaagtaaaacctgccccacccctccatacaccgtggaatatgacccagtcataaaaagaaggaaatcctgcctttgcagcaccatggagggagctgaaggccattatcctaagtgaaatgatgcagaaccagaaagccaaagccgcctgttcttacttataagcgggtgttaagcattgggtacatgtggacacgcagacatacactggagaaggtgaaagggtcggacatgcctcgttactcccctccagcatcaacagcaacacagacctcaagtctaataagaaacatttaagcggccaggcacaggtggctcacgcctgtaatcccaacactttgggaggcctcaagtggatcacttgaggccaggagttcaagacgagcctggtcaacatcgggaaatcctgtgtctactaaaaattcaaaaaaattagccaggcatggtagcatatgcctgtaattccagctactcgggagactgcagcacgagaatcgcttgaacccaggaggtggtggttgcggtgagccgagatcacgccactgcactccagcctgggtgactgagtgacattctgtcaaaaaaaaaaaaaagagagagagagagagagagaaaggaaggaaggaaggaaggaagattgacaggagggtgtccggtctttcagcttctctaagccacattggaagaagaattgtcttgggccacacaaaatacactaacaatagctgatgagctaaaaataaaaatcacaaaaaaatatcataatgttagctgggcacggtggctcacgcctgtaatcccagcactttgggaggctgaggtggacaaatcacgagctcaggagttcaagaccagcctggccaacatagtgaaaccccatctctactaaaatacgaaaaaatcagctgggcatggtggcggccgcctgtaatcccagctactcaggaggctgaggcaggagacttgcttgaacccgggaggcagaggttgcagtgagccgtgatcgcaccactgcactccagcccaggacagtgcgagactccatctcaaacaaacaaacaaaaaacaactcataatgttttgagaatgtttacgaatttgtgttgagctgtgttcaaatttgtcctgggccacatgtggcccgcaggccaccagttggacaagcttcatttacagtctattctctctgaagcctactacttgaagccttcatctgtatgatacaactttggtctcgcctgtaatccaagcactttgggaggccgaggcgggcggatcacctgaggtcgagagttcgagaccagcctgaccaacgtggagaaaccccgtctctattaaaaatacaaaaaattagcagggcgtggtaatcccagctgcttgggaggctgaggcaggagaatcacttgaactggggaggtggaggttgcagttagctgagatggcgccactgcactccagcctgggcaacaagagtgaaactctgactcaaaaaaaatgaaataaataaaataaaataaaacactttggtctccacgacccgttgtcataacccagccattcctttctattgaaaataactctttcaaccaattgccagtcagaatatgtttaaatctacctatgacctggaagcccctgcccctttgagttgtcccgcccttctagatccaaccaatgtaaatctcacatgtattgattgatgccttatgtctccctaaaatgtataaatgcaaactataccttgaccaccttgggcccatgttgtcaggacctcctgaggctgtcacgggcacgtccttatccttggcaaaataaactttctaaaccgatccagacctgctcagatgctttttggtttacaggtgctacttggtgatttgagttcttatttatcctgagatagtaacgcaatatccccatgctttttgggactgggaggaaggagaggaccccaggatgaatacaatgcagttccagaccttaaggagttcctattgggagagacaaacagggaaataatcccacgtgaaaaaaaactgagtcctgagagctgaagtgatttatcaagtcccaaggtgcagctaggacttcaacccaaggctcctgactccaaggcccatagagtttccagcacaccaaaccgcctttccagagagggggccctttgagttggcttcctaggacaaggaggagttcatcaggcggcaagcagctcagacacagggaacagcaagtgcaaaggccaggggcacggaatcagaggtgcctcccagaggcggcaagctctaagcaagccggttccagaaagacttaggagagggcttggagcctggaggtagagtgagggccggaattttatcttttaaacaccaaggagccggcaggccgggcgtggtggctcaagcctgtaatcccaacactttgagaggccgagacaagaggattgctggatcccaggaatttgagaccagcctgggcaacatggtgatgccctatctctactaaaaattttaaaattagctgggcgtggtgatgtgcatctgtagtcccagctactcaggaggctgaggcaggaggatcacttgacccaggaggtcaagccgtgatcgcatcactgcactccagcctggtgacagagagagacccagtttcttttttttctttcttttttgcttcttcaggacatttattccattacagtataccgatgccacagagaacctcaaatttgacctcgctttctcttttgatctgccaacacaggtcctaagtccaatcaagagctgcttttgataggaaaaagagttaatagagtgctatttctgccttttataaatcctccaagggggtttaggcaatactgagttccaggctttgaaggtacaaacttaggagctgaatgagaaactcagttccttaaaaataaaaataaaaataaaggagccagcaaaatcctttacgcaggacaatgacatgatgaaagagtgtcccactttattagagatccaaagcacgtggttgttcactggaaaatgagaaaagaaaacaactagattcctaaaggttgtagtcaactttctggctgttatggggaacgcgtaatcatatattatcacttaggaagaatggcctgtgttaattaaggctgcctagtaactttgttttttccccaaagttctttgagggctagcatctcattttagtctcaggggaatcttgagctgttattaaggaaggttctgcttgtcccatttgacaggtttggtgattagcatgggggttgccccctaggaagtggaggagtgtgggttgggacccagaccacctggatgttctgcaggctgccctgccctgcacaagcttctagctcccagacaggcacggcaggcccagacagtggcccagcttggggcaggggcaaagcccatcgcagtccacagtccttggcggttttccgtccctttctggggactcccagggaagactgaccagccactgtccctgtcttacagcaggcagtcaccaggagcatgagggaccaggtgacttcacagcagcatgagaatagccatgaaaactaaaacaaggcttgtggacactccaaaaatactccactgaaagcgccagccagcatcgaaaataaacctgtctgctggctgcctgcacagaggagccagggaggggccactgagccacacttccggccccacacccttttattttgggaaaatcaaacccttcccaccatgagcttgcctgtgggagggaagctgaggctgccgttgtcctgtgagatttcgctggacgatgctcaggtgcagaagcgagagctgacccttccattcattctttcgtccacccgcaggcacgtgcgcctccctctgtgtgccaagcgctgtccgtggcatcagggcagatggagcaggggccgccagactcggcttgaatctgctgtgctgtggacaggcctagagagctcggcagcactttccctctaggagatgggagtgggcttattgtgctgtgagggggtaaggaggcaggggagatcttgtctgtgccaggcacgtcctgggccccatgcagatgaccagcctcattagttcgttatctgcactcgctcatgcagcctcacctctgtgtgtggcagaggaccctggcctttaacattcctgccgtcttacagccccacctgcttcaaagcttccgcacgcttcttaacccctggacagacctgcaacccccgcctgtggccttggctcccacttccaagaccctgatgagttttgctgggagggcctggtcgctgctttcttctcagaggaaagtggccccttcccacctcactcagcctcctgctcccctgccctggccctggccggctcacttctggaacaaactccttcctcccagccttcccatctctggtctcttcctgatctggatccttctctctctctctctcttttttttttttttttttttgagataggggctcactctgttgcccaggctagagtacactggtgcaatcacagctcatggcatccctgactttccaggctccagtaatccttccatctcagcctcccaagtagctggggctacaggcccgactaatatttgtatttttggtagagatggggttttgccatgttgccaaggttggtctccaactcctgagctcacacttgagctccacctgccttggcctcccaaagtgctgggattacaggcattagccacagtgcctggcgacccagatccctttctacctggggccagagatttcctcctaaatagaaaacctgaccccaccctggtctttgggcgagacacctcttttgctttttcgtagttcacagctcctttcccaaagctcagtgactcaagggtcagcttggcaatttttgccttagccatgtaccctctgtcgtttttttgttttttgttttgagacggagtctcagtctgtcactcaggctggagtgcaatggcgtgacctcagctcactgcaacctctgcctcccgggttccagcgattctcctgactcagcctcccgagtagttgggattacaggcacccaccaccatgcccggctaatttttgtatttttagtagagatggggttttgccatgttggtcaggctgctctcgagctcctgacctcaggtgatccacgcccccctcggcctcccaaagtgctgggattataggcgtgagccaccacgcctgacctccccctctcgttttatctacttagctttttcttgaaagccttgtccttttatctacttagctgtatcttgaaagcgactctcttaaaaatttaaaatttaaaaatttttaattttttgtgtctctgttacaaaaagaaaacagtctatggcaaagattgctggtgtcacccagtatcttttcatcccttctcactttacacaagatccccaatttttagctaagcagacagtcaaggctgcatttcccaacctcccctgcagccaggtgtggccctttgactaagttctgcatatgtgcagaaatggagtgtggaacttcctaaaaacagccttaaaggagggagaggattgtgcccttcagcatccctttattccttccttctgcctggaatgcaagcatgatagctggagcacaggcagctatattgggtcatgaggaagcaatgcagcaggatagaaggatcctgggttcttaaagattacagagcctccctgctagccctagaaagcttacatcagggttgcctttgtatgagaaaaataaaccctcattgaagtcactgtgatttggagacttcagacacttacacaaagctaaccttgattgaaacacagtatcacttggaataatcaggaggtggctatgaaaaggaatgcaataaaaaagtgacattctgaaactcgtcatacactccactgccttccaggctctgaaactgagggctactcactttgtttaagaagacattagtcatcactagcccgagatgaaatctcactttgttcagagggactgaccgattgttgaaaagggaaagacgttctcaccgtgtgactcaacactgttcagtgccaagttcctcacctcaccattaactggagtcattgactgtctacacctgcaggctgaacgcaccgccccaggatgaagtgtgagtcctcggcatcccagggaggttagtgtcctcctgcgaagctccagccttggggagtgcctccacgtccaggctggagccacctccctactccctctccccagggcctggcacggtcagccatcatgagtgtcccagctagagtcaaccagcagatgatgtttagtgcctctctgtgccttcagaaatgcttcccaccctcaggaattccaatgcctgcttctctctcctgctacactcctactcattgcccatctctgcgtagatgccccagcggatcaccgttcagtcgacatttaccaggcactccctgttcgggggtgagtgttggctatggagttagccgccaggagcctgcctcctgctgactgggcgatctgggcaagttatttagcttctccgcctcagtccttcctatctgtaaaatggggataggaatggcaccttcctcaagggtgttggtgagggttagaccagtcgatatgctaagtgcttagaacacattaaccccctgggacatctcaggtgctgctgttgtctgtcaggctaggaggctaagggatctgctttcatgggggggatggagtgaccttctagaacctgctgcagatagagcttcagcttcaccctctgtattaagcatgccccatgggggtatgggttggatggtggtcgacttacttttttactggcccttcttccttatagcctggggacctgggatgtcagggaagcccatatcctactcacctttgactttttttttttttttttttttttttttttgcagtggggtcctgctctgtcgcccaggctggagtgcagtggcgcgatctcagctcactgcagctttcacctcctgggttcaagcgattcttctgcctcagcctcccaagtagcagggattacaagtgcctgccaccacacccagctaattttgatgggtttttgtttgtttttgtttttttgagacagtcttgctctgcctcccaggctggagtgtagtggcgcaatctcagctcactgcaacctctgcctcccaggttcaagagattctcctgcctcagcctcctgagtaactgggattacaggtgcccgccaccatgcccggctaatttttgtgtttttagtagagatgggatttcaccatgttgaccaggctggtctcgaactcctgacctctggtgatccactcacctcggcctcccaaagtgctggaattacaggcatgagccaccacgcccagctaatttttgtatttttagtagaaacggggtttcaccatgttggccaggctggtctcaaactcctgacctcaggcgatccgcccacctcagcctcccaaagtgctgggattacaggcatgagctactgtgcccggctgcctttgacttttatgtacccaccagcagcctgggcacaccaggtacttaggaaacaatactaataaaggaatccctgtgagatacaggctgggtgaagggactaaggctgagacgctaaggaggcccagctcccagaatagcagaatagtcagcatacaaggcctggccttcccatccaagcctggctgtgtcccgactgctttcatatgaaacgacttcaaggggctttcttactggtatagacaaagtcactgacatgcattcgtgcataagttcaggtgcaaagtggagcccagaccttgaagtcacagactggggttaggtctagactctcctatgtatttgccaggtgatcttggacaaatgtactccaaaggtacactctgagcctcattttcctcacctgagaaatggactgatgttccaatgatctgtttctgcatgacaaatcaccccaaaactgagtggcttaaaaccccagtaagtctcttgtgtctcagggcttctgtgggtcaggaattcaggaagggccccactgggtggttctgcctgacgctccggtatgggcttcctcccaacatgacagcctgaggacagctaaattgcccacttggtggcctgtgagtcacaaactcacccaggttcaaaatcaggagaattagactccagactttttgtttttgtttttgagacagggtctcgctctgttgtccaggctggactgcagtgctgccatctcggcttgttgcaacctccacctccccacatctggctaatttttgtattttttggtagagacagggtttcactatgttgtccaggctgtaaactctagactttgatggggcagtggaaaggtggaaaattggaaaggtggaaaagtggaagagtatatgggacaggagacactgctgcaataaccttttgggagatacagtctgccacagatgatagctctcacgtccactgggagggttacggatgtaaagcaactggaatatcttttttttttttttaagagatggagtcttactctgtcacccagcctggagtgcagtggcgcaatcctggctcactgcagcctcgatctcctggggtcaagcaatcctccttcctcagcctcccagatagctgggactacaggcttgagccaccacatctggtgcctggaatatcttacctgcccataagggatctctgtggtgaccacagctgtcattgcaggttggctgtccacatctgtcccttctcttcctatccctcctcggtgcaagtcgcaccctgtttatggcccataggaatcagctcacaggagacagttggacaagccaagaatccattggtccacttggagtggccaaccattaggccaaccattaggcagagggcagtgaatggggcactgagcccaggccaggtgaatggggggaggcacctgggaccagcagaggatgttacatgggagctgggcattcagaagaggcctctccatcaagccgagtgagcccgtggggccacgcgcccccacctcctccaggagagagggatccatcatcagcatggggcctgggaaccctagcagcctattccagatcctggcagagaccgaccacttgatttcatcccccttccaaagtagtggcacttaattaagaatttctaggtcaggcatggtggctcacatccaccatcccagcactctgggaagctgagacagaagaaaaactggaggccgggagttcaagaccagcctgggcaacatagtgagacctgcccctgtctctaccaaaaaaaaaaaaaaaaaaaaaaaaaaatttttttttcatgagcagaatgtggtggcgtgcacctgtggtcccagttactcagaggctgaggcgagaggatcacctgagcccagaagttggaggctgcagtaagttatgattgtgccactcactgcactccagctgggtgacagagcactactctgtctctaaaaaataaaataaaataaaataaaataaaataaaataataaataaataatttgggaaaagacttactacctaagaaatctttctcctgcacccccaggcccctggtttactttcacatctcaggaaataagaatcataaaaaagtcactttccttgactggagggaagaagggaaggcaggctggaccccaggcctctgtctcctccctccgtctcagccatctggacagaaggggcctttatttaaccggatgcttctccatagtcctgtcacccagagctgcaaacttgtcctgtggtctcttgtggcctctgacatgtgaatcaggatcagcagttctgaagctgatggtccccttctttaaaatggtggtaaacacatgtaacatacacatgtaacatacaaattaccatcttaaccttttcaagtgtatagttcaagggccttaagaacattcacagctgggcacagtggctcacgcctgtaatcccagcactttgggaggccgaggtgggcagatcacctgaggttaggagttcaagaccagcctggctaacatggtgaaaccccgtttctactgaaaacacaaaaattagccggacatggtgaagtgcgtctgtaatcccagctactcgggaggctgaggcaggagaatcacttgaacccagtgggtggaggttgtactgagccaagatggtgccactgcactccagtctgggcgatagagtgagactccctctcaaaaaaaaaaaaagaaaaaaagaaagaaaagaaaagaaaagaaaaaaaaaaaggaacattcacacattcacactgtggcacaaccatcaccaccatccatctccagaattctgttccatcttcccaaacggaaactctgtctgcattaaacactaactccccattcccctctccctgaaactcgcgacaatcagcagcttctttctgtctctgtgaatctgactacgctagacacctggtgtaggctgaatcttacattacagtcagactcccatgtccatgtgtcccaaatccatggattcaagcacccacagattacaaatattctcaggccagccgcggtggtatacacctataatcccagcattttcggaggctgaggtgggagggtcacttgaccccatctctacaaaaaaaaaaaaaaaaattattattattattattgagacggaatcttgctctgtctcccaggctggagtgcagtggtgcgatcttggctcactgcaacctctgtcttctgggttcaagcaattatcctgcttcagcctcctgaatagctggaattacaggcacctggccaccacacccagctaatttttgatttttagtagagatggggcttcaccgtgttgcccaggctggccttgaactcctgacctcaagtaatccacctgcctcagtctcccaaagtgctgggattacaggcaggtgcatccatagtcctagctacttgggaggctgaggttggaggattgcttgagcctgagagatcaagactgtagtgagccatgatcgtagcactgcactccagcctgggtgacagaccacatccctagctaaaaaaaaaaaaaaaaaagaaaagaaaaagaaaaaaaatgcacaaaaactttttacaaagttccaaaaagcaaaacttgaatttatcattgcattaaatccatgcaaatgaagtgatgcgtagacattttattaggtgttatgagtcacctagagatgatttagagtctacagggggatatatgtaggttatatgcaaacactactccattttatataagtgacttgagcatctgaggattttggtatccacaggaggtcctggaatcaaccctctgtggacatggagttgtatttgtctctttgtgtctggcttatttcactgagcatgatattctcaaggttcatccatggagtagaatgtgtcagaattctgatgcccctttttataacccacatcttgtacagttctctttactctctctctcttttttttttggagacagggtcttactctgtcttgcaggttggaggtgttcagtggcacagtcttggctcactgcagccttgacctaccaggctcaggtgatcctcccacctcagcctcccgagtagctgggactacaggtgtgtgccaccaagcccacctaatttttgtattttttgtagagatgggcatctcactatgttgtccaggcaagtctcaaactcctggcctcaagtgatcctcctgcctcagcctcccaaagtgctagggattacagatgtgagccagcacgtctggaccctcttcgctctcctgaaatgaaatgtctagaatgatccagaatgctgccctcccttctgccagtagatgtctagtagaacccaccatgataagcaagcccccattccacatttccaaaacgttctttaactgtcatgcagtgtgacccccagactacactgaaaaccactctcccaaatgaagttttttcctaaggagcccagagcactttgttcctcattaccttccccaagtcttaggcccctgacatccctataaagagtcttccttgccggcaaatagcatgtgcaaaaaggttccatgggcggcccaccagccctacaaccaaccttggctttggcttggctgagaacccacccacaatttccccactatcatcagtgaccactctcatttcaaagacgtggaaagtaaagttcagagacagatgaagacgtcgggactgacatttcctacacgccttctaggtgtgcacgcagtgtcttactgctcccagcatcctgggtagagaagacatcatcccattttacagggctaaaaattgaggctgggtgtggtggctcacacctgtagtcccagcactttgggaggttggggcaggcggatcacctgaggtcaggagttcgagaccagcctggccaacatggtgaaaccccgtctctaggaaaactacaaaaattagccaggtgtattggctgatgcctgtaatcccagctacttgggaagctgaggcaggagaatcgcttgaacctgggaggcagaggttgcagtgagccgagaccacaccaccgcactccagcctggatgacagagtgagactccatctcaaaaaaaaaaaaaaaaaattgagtagcagggcaccaaggaccttttctctgggtcacaaagctattggttgacaaaatgagaactgggaggtaggacctgtaattccaagccactgcaccctcctgcctctatgacaaaggatagaggggctgggacccactcttccccacagcagctgcaatcgaatcagaaagcaggcagcgcatctggatgctgtgagtcagtgctcagaggaggaggccgtggcacacagggcagtcaccgcagtcctggcacagccgggtctctgccgtacactgccacagcccacctggctctgtgcgtgggcaggaagtcatgttccttccatgagcaggaggtgattaacgaacaccgggtgaggacgagcgggtagaacaaggtcagaatctcaactaagccttcgagatcgtgtcgggctcatttccctgcgatgtctggtctccgtcccactctggggtgtcagcttcccggagactcgcccaggtctcctgccttccgagctcttgccttgctgctgcttttagccctgcctttcacagctgctagttgcccactccttagcctggcattcaaggctgcaatgccagcttcagcttcacccccatttcctgccacaaaccctccactctggccaaattcctcccatgccatgactttcctgcctctgagcctctgcctatgatcccccccaccaccccccaggcctgccctcttcacccatttcacctgttaggctgacaggtcaggtttgagtccagtgaacctgattccaatccctgactttgccaacttatcaacctgtgaagcatcgggcaacctcctgaatctctctgagcttcttcttcttcttcttctttttttttggggggggacggaatctcattctgtcaccaggctggagtgtagaggtgtgatctcggctcaatgcagcctccgcctcccaggttcaagcggttcttgtgcctcagcctcccgagtagctggattacaggtgcctgccaacacactggctaatttttgtctttttagtagagacggggtttcgacatgttggccagggtggtctcgaactcctgacctcaggtgatccacccgcctcagcctcccaaagtgctgggattacaggtgtgagccaccgcgcctggcctatctctctgagcttctgtgtctgcacataaaatgccactggattcaactcatttttattgagctcctactgtgtctacaacagtctgaggatttagcagtgaagaaaggtgattttttttttactgcttatccttgtgtacttttaaaatgctgtaccacgtgcaggtaaaatttatttttaaattttattaaaatgaaaattatcaaggtaatgagacttaggaagagggaaaatattaatatcttactccggtggtttctacgaggatgaagggaggcaacccagtccagtgcagggtctggggcccagcaaagaagtgctcactaaattgcagccatcgtcaaaatgctgccttctccaagcctctaaggagcctcctgcagttaaacctggcctcacccccactggagtgtgatggcgcctttgtttgtactatgtcatttactcacctacccatccacccacctgtcctccatccatccacttacccacccagccatcactcatactttcacccactcattgattacttattgcaaaccaccttagcccattttatgctgctataacagaatagcatagactgggtaattaattaattactttatttatttttatttttatttattgatatattttttgaaacagagtctcgctctgttgcccaggctggactgcagtggcatgatctcagccaaccgcaacctctgcctcccgggttcaagtggttctcctgcctcagtctcccgagtagccagaattataggcacacacccccacacccggctaatttttgcatttttaatagaaacaaggttccaccatgttggccaggcttttcttgaactcctgacctcaagtgatccgcccgcctcggcctcccaaagtgctgggattatagatgtgagccactgtaatttataattacaaggtaatttataatgaacagaaatgtattggctcacagttgtggaggctgagaagtcaaggggccacatctggcaaaggctttcttgctgtgtcatcccatgggagaaggcccaaaagagggtacggagtggggcaagagggagctaaactagtccttttataaggaacccagtccccagtaatggcattaatttattcaggaaggcagtacccccatgacccaaatactacctcccattaggcccacctcccaacactgtcacattggggatggagtttccaacacatgaactttgggggacacattgaaactatggcacacaccagccatgtgccaggtcttctgccaggtgggtaggagtgaatgataaaacagttccaatctttcccctcatacaagtttctgctgggtaagggagagatgacccaccatggaaagtatttgctacacaacgtacaagctttgtagattatatgcagagtacatgtgctccatagagcaggtggcaggggcaaaggacttgcagagaagggatatcaagttgagacctgaagatggtcccggcagatgaaggcagaggagaggacattccatgggcaaggcaggaggtaagaaggtgtgtagagaagataagaacagccggaatgttgagtttcatgttgagagcagcaaggggctggagaagtgaccaagggcctcacagattatgtaaggaatgtgatccttgtcccaggaacaggcttcagagggcttccagcaagggagggacatgagaaagttctggcgttggagagagaactctgactgcactgtggtcaccaggttggagtggacaggattgggtttggcagtgacggtgtgtagaagccagctggcaaagctggagcagagattccccaggcaggaggggtgctgggggtctgcagcagagcagggaagtgggagcagagaatgaggaaggtcagaagattaccccagtctttttttttttttttttttttttgagatggagtcttgctctgtcacctaggctggagtgcagtggtgcaatcatggctaactgcaacctctgcctcctgggttcaagcaattctcctgcctcagcctcccgaatagctgggattacagccaccaccacgcccagctaatttttgtatttttagtagagacagggtttcactgtgttggccaggctggtctcgaactcctgactttgtgattcacccgccttggcctcccaaagtgctgggattacaggtgtgagccaccgcgcctggcctccccccaaatttctaccagaaaaattcttaccttcctgaaaagttgaaagaccagtaccacaaacacattttcttctacctagagtcaacaatcattgatatctccagctttgctctctcaagacacagcaaagtgggtggattttctttttctgtaccatttgaaagtcagtttcagacatggtgatgcttcaccctgagctgcatctcctgagaatgaaggcatttttctcctgaatcgcagaaccagtatcgcacctcggaaacacaacaggagtgacgtctgctgcccagtttgtgtccagatggatggcctttcatggttgggtttttgttttgagagccggggtcccatcaagatgccagcgtcgcatttggttgtctctttagtctccaagaaagactctggaggtggaatgtgtagggcttgatgagtcactgggtttcaggggtggagggcagggaggatccgggcgatgaccgggttctggtttgggcagccagtggtgcaatccttggcatgaggaattc

SEQ ID NO: 64 - DNA, 142605 bp, Homo sapiens
gaattccaactgcacagccctgcactttggctgtgtgtaatgcaaagggttgggatgagtcagggagagctcaggtgggggcagtctctaaagctgtcttcaaggaacagaaaaaggagtggggaaaggatttaggatctgtggggtcagctaggtttctttttgtgagtttatataatgattttgttaggatggcaaaaccaggtatctaaagttgaaagtatctaaccatgcctaggttgtagaaggtgttggggtttgagagatcagtcagacacgatcggcagggagagcgcgtgtgtttttataagaattacgccaagacagataacagatgaggaagaaatttgggcttgactgaagtaatgggggctgtctgtgaagccttgcagcagtacagcccaggtaatttgctgagcctaatgggtgtcagggtcagtctaagtgaaagcaaagggaggctgggatgaagggtgcaaaggaatagtaaagaaagcatgtttgagatccagaacagaataatgggttgtagagggaggtattgaggataggagagtatatgggtttggcaccacggggtggataggcaaaacaatttggttgataaggcgcagattctgaactaacctgtaaggcttgtctggttttaggacaggtaaaatgggggaatggtaagaagagtttataggctttaaaaggccatgctctaacaggcaagtgataataggctttaatcctttcaaagcgtgctgtgggataggatattggcattgagcggggtaagagtgattaggttttaatgggatggtaaggggtgcatgatcggtcgccaaggagggagtagaggtgtcttatacttgtgggttacggtggggagatacaaggggaggatgtgaaggaggctttgaactgggggaaaaggtggcaatgaggtgtggatgtagcctaggaatagtcagggaagcagataatttagttaaagtgtctccgcctaataagggaactgggcaggtggggataactaaaaaggagtgcttaaaagagtattgtctaagttggcaccagagttggggagttttaagaggtttagaacctggctgtcaatatttacaacagttatggaggcaagggaaacaggcccttgaaaagaaggtaatgtggagtgggtagcctccgtattgactaagaaggggatggacttactttccactgtgagagttacttagagtgtctgtgatggtcctgtaggcttccaaggcgatcggcagtgccagtcttcagctgctaagccaagaagatctgggaaggagtcagacggccttgggccagagttccaggggctctggaagtggctgccaggtgagttgaacagtccaattttcagtggggtcctgtacagatgggacatggctcaggaggaatcctgggctgtgggcacttgtagcaagctcctgggggaggaggttctggaggaacccctggcagctgcggttcaggcgtttggagttcttgtgtgctggagatgtggctggggtttgtctcacagtggaggcaaagagttgcaactcagaaatatgttgctacttggctgcctccactctattattgtacaccttgaaggtgaagttaattaagtcctgctgtggggtttgagggccagaatttaacttttggagttttatttaatgtcgggagcagactgggtaataaaatgtatattgagaataagacggctttttgactttttagggtctagggctgtaaagcgtctcagggttgccgccaaacgagccatgaactgggctgggtttttcatatttgatgaaagagcctaaacgctcactgatttgggagaggtctgataaagaaaaatgagtattaaccttgactatgcgtttggcttcagccacctttttaagaggaaatagctaggcaggtgggggagggctagtcatggaatgaaactgtaagccggactgggtgtgaggaggggaggtgataaaaggattatacggtggaggagcagaggctgaggaagaattgggacctagctcggcctagtgaggaggggagaggtcagatgggtctgtagaaaaggaagattagaaaaactcagcgacacttggggttgggactgaggagacaggcaggagggaaagaaggaagatttgggactagttgcactgggcagagagactagggagggacagatgtgtaaaagaatgcctggacgtcaggcacctcagaccatttgcctatttttcgacaaaaattatttaggtcttgtaggatggagaaatcgaaagtgccgttttctgaccatttagagccattgtcaagtttgtattggggtcaagcggcattgtagaagaaagtaaggcatttaggttttaggtcaggcaagagttgaagaggttttatgttcttaagaacacaggctaagggagaagaaggaggaatggagggtggaaggttgcctatagtgaaggaggcaagtttaaagaaaagggagagtagagacatggagggaagcggttcgggggttcttaccttccagaaaagcaggaaaggggtcggggcacagagatacgaggttggggcacggaaataagggagcagggtgcagagatataagaggttggggcacagaaataagggattggggcacagagatataagaggtcggagcgtggaaataagggatcggggcgcagagatacaaggttggggtacatgcccctcccccagaaaaatgggacttgctgctaagggtgaaggagaaggggctgggggtttcttgccttacagaaaggtggagaaggggtagagacatgaagagaaggggttggggtacttgcccctcccctagaaaagtgggacttgctgctaagagtgaagaagaaggggttggggatttcttgccctccagaaaggtggagaaggggtagagacacagagagaaggggttggggtacttgcccctcccccagaaaagcgggacttgccgctatgggtgaaggaccaaggcaggcgtccttgcgtggtctgacacctctgaaacatgggtgaataatcagagaggtgtccttgcaatgattaaacaccaagggaaggctgccttcctagtccgtgaccagtgctggagttttgggtccacggataaaacgtgtctcctttgtctctaccagaaaatgaaaggaattgaaattaaaagaagggagagattgaagtgtggcgccaagattgaaaggagaaacaggttgagggatagtgagggaggttggagaagagagtaaaaagaggctgcttaccggatttgaaattggtgagatgtttcttgggctggttggtctgaggacctgaggtcataggtggatctttctcacagagcaaagagcaggaggacaggggattgatctcccaagggaggtcccccgatccgagtcacggcaccaaatttcactcacgtccgtgtgaagagaccaccaaacaggctttgtgtgaacaataaagctgtttatttcaccagggtgcaggtaggctgagtccgaaaagagagtcagtgaagggagataagggtggggccgttttataggatttgggtagataaaggaaaattacagtccaaggggggttgttctctggcaggcagagtaggggtcacaaggtgctcagtaggggagattttgagccaggagaaggaatttcacaagacaatgtcatcagttaaggcaggaacaggccattttcacttcttttgtgggagaatgtcatcagttaaggcaggaaccggccatctggatgtgtacatgcaggtcacaggggatatgatggcttagctagggcttagaggcctgacacttagcatctgtgtaaacttagacaagtaaacccatccacaaaatggatgattacagtagctacctagaagggatgttgtgaggattctgtgacttgtttgtaaactacagagtaagtacaccagtaaagatgtgttcagcctctcttgttacaggtgtgatcacaccatcatgatgtgattttgtaacaggatgattttgtaacacgatgacattttgtaacagacacagagccagggacaataccactgagctgctgaagcaacccgccctgcttctggcctccaagtcacatgagctaatactttaaaaaaaaaaaaaaaagcattatacgggccaggcacagtggctcacacctgtaatcccagcactttgggaggccgaggtgggcagatcacttgaggtcaggagttccagaccagcctggccaacgtggtgaaaccctgtctctactaaaaacacaaaaattagccaggcatggtggcagatgcctgtaattcaacctgggaggctgaggcaagagaatcacttgaacccaggaggcagaggttgcagtgagccaaaattgagacactgcactccagcctgggtgacaaaacaagactctcaaaaaaaaaaaaagtattatacaagacaacagattcaccaaggtcaacgtgaaagaaaaaaaatatcaaaggcagctagagagaagtgtcaggtcacttacaaagggaaccccatcaggctagaaatggacctctcagcagaaactttacacaccagaagagatcaggggctgttttcagcatccaaagaaaagaaattccaatcatttcaagaattccaagaatttcatatcccacccaactaagtatcataagcaaaggataaataaaatctgtctcagaaagcaaatgctaagggaattcattaccactagaccagccttataagaggtccttaagggagtgctaaacacagaaactaaagaaggataccagccaagcatggtgactcatgctctccatccctccactttgggaatctctgaagcccaggagttggagtccagcctgggcaacatagtgagaccccgtcactacaaaaaataaaaaaattatccagtcatggtgatgtgtgcctgtggtcccagctactagggaggcagaggcaggagtattgcttgaacccaggaggtggaggctgcagtgagctgtgtgtgatcatgccattgcactccagcttggcgacagagagagaccttgtctcttaaaaaaaaaatgcacatgtaccctaaaacttaaagtattaaaaaaaaaaaaaaggctgggcaaggtggctcacacttgtaatcccagcactttgggaggccgaggcaggtggatcacgaggtcaggagatcaagaccatcctggctaagatggtaaaacctcgtctctactaaaaatacaaaaaattagccaggcacagtggcgggcgcctataatcccagctactcgggaggctgaggaaggagaatcacttgaactcggagggcagaggttgcagtgagctgaggtcatgccactgcactccagcctgggtgacagagtgagactccatctcaaaaaaaaaaaaaaaaaaaaaagaacaatatctgctaccacaaaaacacacttaagcacatagccctcagacactatacaatcatgtctacaaaacagccaactaacaacacaatgacagaatcaaaatctcacacatctagccgggtgtggtggcacgtgcttgcaatcccaactgcttgggaggctgaggcaggggaactgcttgaacccaggaggtgaaggttgcagtgagctgagattgcaccactgcactccagcctggtgacagtgcaagactctgtctcaaaaaaaaaaaacaaaaaaaactcacatatcaatactaaccctgaatgtcaacaggctaactgaccccacttaaaaaggcatagagtgggccggacacggtgcctcacgcctgtaatcccagcactttgggaggctgaggcgggcggaacacaaggtcaggagatcgagactatcctggctaacacggtgaaaccctgtctctactaaaaatacataaaattagctgggcgtggtggtgggtgcctgtagtcctagctactcgggaggctgaggcaggagaatcacttgaactcggagggcagaggttgcagtgagctgaggtcgtgccactgcacttccagcctgggtgacagagtgagattctgtctcaaaaaaaaaaaaaaaaaaagaataatatctgctaccacaaaaacacacttcagcacataggcctcagacactatacaatcatgtctacaaaacagccagctaacaacacagtgacagaatcaaaatctcacacatctagccgggcatggtggcgcatgctggcaatcccaactgcttgggaggctgaggcaggggaatcgcttgaacccgggaggcggaggttgcagtgacctaagattgcgccactgcactccagcctggtgacagtgcaagactctgtctcaaaaaaaaaaaaaaagaactaacatatcaatactaaccctgaatgtcaacaggctaactgaccccacttaaaaggcatagagtgggccggacacggtgcctcacgcctgtaatcccagcactttgggaggctgaggtgggcagatcacaaggtcaggagatcgagaccatcctggctaacatggtgaaaccccgtctctactaaaaatacataaaattagctaggcatggtggctggtgcctatagtcccggctactcaggaggctgaggcaggagaatggcgtgaacctgggaggcagagcttgcagtgagccgagatcacgccactgcactccagcctgggtgacagagcaagactccgtctcaaaaaaaaaaaagaaaagaaaaaaaaaggcatagagtgacaagctggataaaaagacaagacccaactgtttgctatctttcagagacccatctcccatgtaactacacccacaggttcaaagtaaagaggatagagaacccagaaataaagccacacacttataaccatctgatcttcaacaaagtcaacaaaaacaagcaaggaggggaaagaagctcctattcaataaatgatacttggataactggctaggcatatgcagaagaatgaaactggacccttgcctttcaccacatacaaaaattaaaacagactaaagatttaaatgtaagccctcaaactacaaaaatcctaagaaactctaagaaatatccttctcaacaccagccatggcaaataatttatggctaagtcctcaaaagcaattgcaacaaaaacaaaaatgataagtgggacctaactaaactaaagagcttctgcacagcaaagaaactatcaacagaatgaacagacaacctacagaatgggagaaaatatttgcaaactaggcatccaacaaaggtctaatatccagaatctataaggaacttaactcaacaagcaaaaacaaataatcccattgaaaaatgggcaaaatacatgaacaaatacttctcaaaagaagacatataagcagccaacaaacacatgaaaaaatgcttatcatcactaatgatcagagaaatgcaaatcaaaagcacaatgtcgcatctgtagtcctagttactaaggaggctgaggcaaaaggatcactggagcccaggaggcagaggttgcagtgagccaagatcacaccactccactccagcctgggtgacagcaagaccctttctaaaaataaaaaaataaaataacctacaatgagataccatctcatactagccagaatggctattattaaaaagtcaaaaaacaacagacggtggcaaggttgtggagaaaagggaacactaacttatacactgttaatgggaatgggaatatgtacattagttcagccactctggaaagcaatttggagatttgtcaaaggacttaaaacagaactaccatttgacccagcaattcgattactgggtgtatacctaaaagaaaataaattattctacaaaaaagacacaagcacttgtatgttcatcgcagcattattcacaatagcaaagacatggaatcaatctaggtgtgcatcagtggtggactggataaagaaaatattgtatgccagacacggtggctcgtgcctgtaatcccagcactttgggagtccaaggtaggtggatcacctgaggtcgggagttcaagagcagtctggccaacatggagaaaacccttctctactaagaaggctaaggcagaagaatcacttgaacttgagaggcagagtttgcagtgagccaagatcacaccactgcactccagcctgggcgacagagtgagactctctctaaaaaaaaaaggctgggcgctgtggctcacacccgtaatgccagcattttgggaggccaaggtgggtggatcacctgacaccagcctggcccaatggtgaaaccacgtctctgctaaaaatacaaaatagaaaaataaaaatacgaaaattatctgggcttggtggcgcatgtctgtaatctcagctacttgggaagctgaggcggtagaatcacttgaacccaggaggcagaggttgcaatgagccgagatcacaccactgcactccagcctgggagacagagtgaaactccgtctgagaaaacaaacaaacaaacaaacaaacaaacaattgaagccagtttgagttgagctttctgatatttgcagtgaatggcatcatagtgctacatatggaaatttagaatatggtaaaatgctgtttcaaatgtataagaacaaatcattaatgggattggcacagtgggaaaaattgtagcattcctacctcactccttctaccaaaataaatcccaaatggatacaagatatgaatggaaaaaagaaaaagaagctgcaaacctgggggaatttccttataattgtgaacaggaaggagagggccatgaaataaaaccctgaccaatttgattgcttaaaaaaactaaaaatgggccaggcgcagtggttcacgcctgtaatcccagcactttgggaagccaaggcgggtggaccacctgaggtcaggagttcaagacgagcctggccaacatggtgaaaccctgtctctactaaaaatacaaaaatcaggtaggcatggtggcagatattgcagtgagcggagatcgtgccattgcattccatcctgagtgacaagagcaaaactctgtctcaaaaaaacaaaaaattgtaaacaaatttaagaggcagacaatcacttgtgttcccattttatagtgaaagaaacgaaatgtaggttacatagcttccccaaatcattcgttcattcactttttgacaagtatttattgagcacctactaagtgataaacatggccaggaccagagggatgtccctgccttcatggagttcccattcgagcaggagagacaggcttaagtccactaatcacacgaacagaagtgattacacttgggctatatggggcctggccaaggatgggcgaacaaagccagcttctctgaggaaagatggtggcagtcagccagttgaaaagggctgggataaaatgccttcctggcaggggtccagcctgtatgggggacagcctgtacacagcctggaaccaggagggaacaggactcctagaaggaactgaagagccaaagtggccaagctgagggctggggcgaggcttgggtggggtggcatagcagcggaggttggagggcaaaggtccctctgtcattctaagattcaaggaaggaggggcctacccatccgttgcgatgccctgcccgtgtctaagaaatgagccaggctccaggtcaaccttgtgtgccagcctcctttgcagcttgagctggcaggaggccccaggacccagacagggctggtgacacaagcaagctcatttcccaggccggcagcagagatgtcagggttttgaatatgcaaaggcgctgtgttggcatttggtggctggcctccgtggcagaggcagctcacttttccttccgaccagctgcctactgtcctttgaccacttgcttttctgcttaaacagattccagccctgttctattttgtcttctggttttgttttgcagttagagcctgcatgagcttggttttgtcccaagggccagggcagggccctaaagaagtccaggcagggaggtcagatttgcatttttcaagcctcagccacagggtaggctgcagggagcaagggaggatatgggaagccaggttaggaggccgctggaatggctggggggtgggggatggtggcagaaggagggtcatggggcagtttgtagtgagggcatgcatttgaggggtgttgggggcttggcatgggtgtgggacatgagagggtgggggtggcatgaaggaggctgacaggaggggacacagagaccatgttcagggtgacaacagagccacaaaggtgatggcctggttttgatcaaccctgaatatgaggttccccaggaggtgtctgggggcaaggaggtgtgtcctagggcctggagaatttcctgagagtgggaatggctggccagggagagctgggcagaccccatgagggcctttcaggacaaggacagggggatgaggtgttgagggctgggcagtgacagctcaggaatcaagccctgtacccactccacgcacacatgcagcttcagtttcaaaacatgcgtggaaggatcttttggaaacacgcccagactgcagacacccaggtccctctaccagggagtctgactctgtcccaggtggggctcaggaatgactgcagcactgccccaggcagagggacgttttcaccttcagctgttaagcactactaattgctctatctcatcttcccaaccaaattgttcaggatagacgttgtaactcctctttgatctcagactgctggtgaaaagcaggttttacagaccagggccatgtgggggcgtcctgcagagactccaagtggcgcccaggctcccagatgaccatcctcaccctttaacccccagacttggatccccgagggcacacagtgtgtttcccggggaagtgggtggtctgctggtgaactgaatgcccagaagaggtgagccgcagatttaaaacctgcctagtggccgggcgcagtggctcaggcctggaatcccagcactttgagaggccaaggcaggcggaacacttgaggccaggagttggagaccagcctggccaacatggcgaaacctcgtctctactaaaaatacaaaaagtagccagatgtggtggtgggtgcctgtcatcccagcctctcaggaggctgaggcagaagaatggccaagattgcgccactgaactccagcctgggcgacagagtgagactctgtctcaaaaaataaagtaaaacctgccccacccctccatacaccgtggaatatgacccagtcataaaaagaaggaaatcctgcctttgcagcaccatggagggagctgaaggccattatcctaagtgaaatgatgcagaaccagaaagccaaagccgcctgttcttacttataagcgggtgttaagcattgggtacatgtggacacgcagacatacactggagaaggtgaaagggtcggacatgcctcgttactcccctccagcatcaacagcaacacagacctcaagtctaataagaaacatttaagcggccaggcacaggtggctcacgcctgtaatcccaacactttgggaggcctcaagtggatcacttgaggccaggagttcaagacgagcctggtcaacatcgggaaatcctgtgtctactaaaaattcaaaaaaattagccaggcatggtagcatatgcctgtaattccagctactcgggagactgcagcacgagaatcgcttgaacccaggaggtggtggttgcggtgagccgagatcacgccactgcactccagcctgggtgactgagtgacattctgtcaaaaaaaaaaaaaagagagagagagagagagagaaaggaaggaaggaaggaaggaagattgacaggagggtgtccggtctttcagcttctctaagccacattggaagaagaattgtcttgggccacacaaaatacactaacaatagctgatgagctaaaaataaaaatcacaaaaaaatatcataatgttagctgggcacggtggctcacgcctgtaatcccagcactttgggaggctgaggtggacaaatcacgagctcaggagttcaagaccagcctggccaacatagtgaaaccccatctctactaaaatacgaaaaaatcagctgggcatggtggcggccgcctgtaatcccagctactcaggaggctgaggcaggagacttgcttgaacccgggaggcagaggttgcagtgagccgtgatcgcaccactgcactccagcccaggacagtgcgagactccatctcaaacaaacaaacaaaaaacaactcataatgttttgagaatgtttacgaatttgtgttgagctgtgttcaaatttgtcctgggccacatgtggcccgcaggccaccagttggacaagcttcatttacagtctattctctctgaagcctactacttgaagccttcatctgtatgatacaactttggtctcgcctgtaatccaagcactttgggaggccgaggcgggcggatcacctgaggtcgagagttcgagaccagcctgaccaacgtggagaaaccccgtctctattaaaaatacaaaaaattagcagggcgtggtaatcccagctgcttgggaggctgaggcaggagaatcacttgaactggggaggtggaggttgcagttagctgagatggcgccactgcactccagcctgggcaacaagagtgaaactctgactcaaaaaaaatgaaataaataaaataaaataaaacactttggtctccacgacccgttgtcataacccagccattcctttctattgaaaataactctttcaaccaattgccagtcagaatatgtttaaatctacctatgacctggaagcccctgcccctttgagttgtcccgcccttctagatccaaccaatgtaaatctcacatgtattgattgatgccttatgtctccctaaaatgtataaatgcaaactataccttgaccaccttgggcccatgttgtcaggacctcctgaggctgtcacgggcacgtccttatccttggcaaaataaactttctaaaccgatccagacctgctcagatgctttttggtttacaggtgctacttggtgatttgagttcttatttatcctgagatagtaacgcaatatccccatgctttttgggactgggaggaaggagaggaccccaggatgaatacaatgcagttccagaccttaaggagttcctattgggagagacaaacagggaaataatcccacgtgaaaaaaaactgagtcctgagagctgaagtgatttatcaagtcccaaggtgcagctaggacttcaacccaaggctcctgactccaaggcccatagagtttccagcacaccaaaccgcctttccagagagggggccctttgagttggcttcctaggacaaggaggagttcatcaggcggcaagcagctcagacacagggaacagcaagtgcaaaggccaggggcacggaatcagaggtgcctcccagaggcggcaagctctaagcaagccggttccagaaagacttaggagagggcttggagcctggaggtagagtgagggccggaattttatcttttaaacaccaaggagccggcaggccgggcgtggtggctcaagcctgtaatcccaacactttgagaggccgagacaagaggattgctggatcccaggaatttgagaccagcctgggcaacatggtgatgccctatctctactaaaaattttaaaattagctgggcgtggtgatgtgcatctgtagtcccagctactcaggaggctgaggcaggaggatcacttgacccaggaggtcaagccgtgatcgcatcactgcactccagcctggtgacagagagagacccagtttcttttttttctttcttttttgcttcttcaggacatttattccattacagtataccgatgccacagagaacctcaaatttgacctcgctttctcttttgatctgccaacacaggtcctaagtccaatcaagagctgcttttgataggaaaaagagttaatagagtgctatttctgccttttataaatcctccaagggggtttaggcaatactgagttccaggctttgaaggtacaaacttaggagctgaatgagaaactcagttccttaaaaataaaaataaaaataaaggagccagcaaaatcctttacgcaggacaatgacatgatgaaagagtgtcccactttattagagatccaaagcacgtggttgttcactggaaaatgagaaaagaaaacaactagattcctaaaggttgtagtcaactttctggctgttatggggaacgcgtaatcatatattatcacttaggaagaatggcctgtgttaattaaggctgcctagtaactttgttttttccccaaagttctttgagggctagcatctcattttagtctcaggggaatcttgagctgttattaaggaaggttctgcttgtcccatttgacaggtttggtgattagcatgggggttgccccctaggaagtggaggagtgtgggttgggacccagaccacctggatgttctgcaggctgccctgccctgcacaagcttctagctcccagacaggcacggcaggcccagacagtggcccagcttggggcaggggcaaagcccatcgcagtccacagtccttggcggttttccgtccctttctggggactcccagggaagactgaccagccactgtccctgtcttacagcaggcagtcaccaggagcatgagggaccaggtgacttcacagcagcatgagaatagccatgaaaactaaaacaaggcttgtggacactccaaaaatactccactgaaagcgccagccagcatcgaaaataaacctgtctgctggctgcctgcacagaggagccagggaggggccactgagccacacttccggccccacacccttttattttgggaaaatcaaacccttcccaccatgagcttgcctgtgggagggaagctgaggctgccgttgtcctgtgagatttcgctggacgatgctcaggtgcagaagcgagagctgacccttccattcattctttcgtccacccgcaggcacgtgcgcctccctctgtgtgccaagcgctgtccgtggcatcagggcagatggagcaggggccgccagactcggcttgaatctgctgtgctgtggacaggcctagagagctcggcagcactttccctctaggagatgggagtgggcttattgtgctgtgagggggtaaggaggcaggggagatcttgtctgtgccaggcacgtcctgggccccatgcagatgaccagcctcattagttcgttatctgcactcgctcatgcagcctcacctctgtgtgtggcagaggaccctggcctttaacattcctgccgtcttacagccccacctgcttcaaagcttccgcacgcttcttaacccctggacagacctgcaacccccgcctgtggccttggctcccacttccaagaccctgatgagttttgctgggagggcctggtcgctgctttcttctcagaggaaagtggccccttcccacctcactcagcctcctgctcccctgccctggccctggccggctcacttctggaacaaactccttcctcccagccttcccatctctggtctcttcctgatctggatccttctctctctctctctcttttttttttttttttttttgagataggggctcactctgttgcccaggctagagtacactggtgcaatcacagctcatggcatccctgactttccaggctccagtaatccttccatctcagcctcccaagtagctggggctacaggcccgactaatatttgtatttttggtagagatggggttttgccatgttgccaaggttggtctccaactcctgagctcacacttgagctccacctgccttggcctcccaaagtgctgggattacaggcattagccacagtgcctggcgacccagatccctttctacctggggccagagatttcctcctaaatagaaaacctgaccccaccctggtctttgggcgagacacctcttttgctttttcgtagttcacagctcctttcccaaagctcagtgactcaagggtcagcttggcaatttttgccttagccatgtaccctctgtcgtttttttgttttttgttttgagacggagtctcagtctgtcactcaggctggagtgcaatggcgtgacctcagctcactgcaacctctgcctcccgggttccagcgattctcctgactcagcctcccgagtagttgggattacaggcacccaccaccatgcccggctaatttttgtatttttagtagagatggggttttgccatgttggtcaggctgctctcgagctcctgacctcaggtgatccacgcccccctcggcctcccaaagtgctgggattataggcgtgagccaccacgcctgacctccccctctcgttttatctacttagctttttcttgaaagccttgtccttttatctacttagctgtatcttgaaagcgactctcttaaaaatttaaaatttaaaaatttttaattttttgtgtctctgttacaaaaagaaaacagtctatggcaaagattgctggtgtcacccagtatcttttcatcccttctcactttacacaagatccccaatttttagctaagcagacagtcaaggctgcatttcccaacctcccctgcagccaggtgtggccctttgactaagttctgcatatgtgcagaaatggagtgtggaacttcctaaaaacagccttaaaggagggagaggattgtgcccttcagcatccctttattccttccttctgcctggaatgcaagcatgatagctggagcacaggcagctatattgggtcatgaggaagcaatgcagcaggatagaaggatcctgggttcttaaagattacagagcctccctgctagccctagaaagcttacatcagggttgcctttgtatgagaaaaataaaccctcattgaagtcactgtgatttggagacttcagacacttacacaaagctaaccttgattgaaacacagtatcacttggaataatcaggaggtggctatgaaaaggaatgcaataaaaaagtgacattctgaaactcgtcatacactccactgccttccaggctctgaaactgagggctactcactttgtttaagaagacattagtcatcactagcccgagatgaaatctcactttgttcagagggactgaccgattgttgaaaagggaaagacgttctcaccgtgtgactcaacactgttcagtgccaagttcctcacctcaccattaactggagtcattgactgtctacacctgcaggctgaacgcaccgccccaggatgaagtgtgagtcctcggcatcccagggaggttagtgtcctcctgcgaagctccagccttggggagtgcctccacgtccaggctggagccacctccctactccctctccccagggcctggcacggtcagccatcatgagtgtcccagctagagtcaaccagcagatgatgtttagtgcctctctgtgccttcagaaatgcttcccaccctcaggaattccaatgcctgcttctctctcctgctacactcctactcattgcccatctctgcgtagatgccccagcggatcaccgttcagtcgacatttaccaggcactccctgttcgggggtgagtgttggctatggagttagccgccaggagcctgcctcctgctgactgggcgatctgggcaagttatttagcttctccgcctcagtccttcctatctgtaaaatggggataggaatggcaccttcctcaagggtgttggtgagggttagaccagtcgatatgctaagtgcttagaacacattaaccccctgggacatctcaggtgctgctgttgtctgtcaggctaggaggctaagggatctgctttcatgggggggatggagtgaccttctagaacctgctgcagatagagcttcagcttcaccctctgtattaagcatgccccatgggggtatgggttggatggtggtcgacttacttttttactggcccttcttccttatagcctggggacctgggatgtcagggaagcccatatcctactcacctttgactttttttttttttttttttttttttttttgcagtggggtcctgctctgtcgcccaggctggagtgcagtggcgcgatctcagctcactgcagctttcacctcctgggttcaagcgattcttctgcctcagcctcccaagtagcagggattacaagtgcctgccaccacacccagctaattttgatgggtttttgtttgtttttgtttttttgagacagtcttgctctgcctcccaggctggagtgtagtggcgcaatctcagctcactgcaacctctgcctcccaggttcaagagattctcctgcctcagcctcctgagtaactgggattacaggtgcccgccaccatgcccggctaatttttgtgtttttagtagagatgggatttcaccatgttgaccaggctggtctcgaactcctgacctctggtgatccactcacctcggcctcccaaagtgctggaattacaggcatgagccaccacgcccagctaatttttgtatttttagtagaaacggggtttcaccatgttggccaggctggtctcaaactcctgacctcaggcgatccgcccacctcagcctcccaaagtgctgggattacaggcatgagctactgtgcccggctgcctttgacttttatgtacccaccagcagcctgggcacaccaggtacttaggaaacaatactaataaaggaatccctgtgagatacaggctgggtgaagggactaaggctgagacgctaaggaggcccagctcccagaatagcagaatagtcagcatacaaggcctggccttcccatccaagcctggctgtgtcccgactgctttcatatgaaacgacttcaaggggctttcttactggtatagacaaagtcactgacatgcattcgtgcataagttcaggtgcaaagtggagcccagaccttgaagtcacagactggggttaggtctagactctcctatgtatttgccaggtgatcttggacaaatgtactccaaaggtacactctgagcctcattttcctcacctgagaaatggactgatgttccaatgatctgtttctgcatgacaaatcaccccaaaactgagtggcttaaaaccccagtaagtctcttgtgtctcagggcttctgtgggtcaggaattcaggaagggccccactgggtggttctgcctgacgctccggtatgggcttcctcccaacatgacagcctgaggacagctaaattgcccacttggtggcctgtgagtcacaaactcacccaggttcaaaatcaggagaattagactccagactttttgtttttgtttttgagacagggtctcgctctgttgtccaggctggactgcagtgctgccatctcggcttgttgcaacctccacctccccacatctggctaatttttgtattttttggtagagacagggtttcactatgttgtccaggctgtaaactctagactttgatggggcagtggaaaggtggaaaattggaaaggtggaaaagtggaagagtatatgggacaggagacactgctgcaataaccttttgggagatacagtctgccacagatgatagctctcacgtccactgggagggttacggatgtaaagcaactggaatatcttttttttttttttaagagatggagtcttactctgtcacccagcctggagtgcagtggcgcaatcctggctcactgcagcctcgatctcctggggtcaagcaatcctccttcctcagcctcccagatagctgggactacaggcttgagccaccacatctggtgcctggaatatcttacctgcccataagggatctctgtggtgaccacagctgtcattgcaggttggctgtccacatctgtcccttctcttcctatccctcctcggtgcaagtcgcaccctgtttatggcccataggaatcagctcacaggagacagttggacaagccaagaatccattggtccacttggagtggccaaccattaggccaaccattaggcagagggcagtgaatggggcactgagcccaggccaggtgaatggggggaggcacctgggaccagcagaggatgttacatgggagctgggcattcagaagaggcctctccatcaagccgagtgagcccgtggggccacgcgcccccacctcctccaggagagagggatccatcatcagcatggggcctgggaaccctagcagcctattccagatcctggcagagaccgaccacttgatttcatcccccttccaaagtagtggcacttaattaagaatttctaggtcaggcatggtggctcacatccaccatcccagcactctgggaagctgagacagaagaaaaactggaggccgggagttcaagaccagcctgggcaacatagtgagacctgcccctgtctctaccaaaaaaaaaaaaaaaaaaaaaaaaaaatttttttttcatgagcagaatgtggtggcgtgcacctgtggtcccagttactcagaggctgaggcgagaggatcacctgagcccagaagttggaggctgcagtaagttatgattgtgccactcactgcactccagctgggtgacagagcactactctgtctctaaaaaataaaataaaataaaataaaataaaataaaataataaataaataatttgggaaaagacttactacctaagaaatctttctcctgcacccccaggcccctggtttactttcacatctcaggaaataagaatcataaaaaagtcactttccttgactggagggaagaagggaaggcaggctggaccccaggcctctgtctcctccctccgtctcagccatctggacagaaggggcctttatttaaccggatgcttctccatagtcctgtcacccagagctgcaaacttgtcctgtggtctcttgtggcctctgacatgtgaatcaggatcagcagttctgaagctgatggtccccttctttaaaatggtggtaaacacatgtaacatacacatgtaacatacaaattaccatcttaaccttttcaagtgtatagttcaagggccttaagaacattcacagctgggcacagtggctcacgcctgtaatcccagcactttgggaggccgaggtgggcagatcacctgaggttaggagttcaagaccagcctggctaacatggtgaaaccccgtttctactgaaaacacaaaaattagccggacatggtgaagtgcgtctgtaatcccagctactcgggaggctgaggcaggagaatcacttgaacccagtgggtggaggttgtactgagccaagatggtgccactgcactccagtctgggcgatagagtgagactccctctcaaaaaaaaaaaaagaaaaaaagaaagaaaagaaaagaaaagaaaaaaaaaaaggaacattcacacattcacactgtggcacaaccatcaccaccatccatctccagaattctgttccatcttcccaaacggaaactctgtctgcattaaacactaactccccattcccctctccctgaaactcgcgacaatcagcagcttctttctgtctctgtgaatctgactacgctagacacctggtgtaggctgaatcttacattacagtcagactcccatgtccatgtgtcccaaatccatggattcaagcacccacagattacaaatattctcaggccagccgcggtggtatacacctataatcccagcattttcggaggctgaggtgggagggtcacttgaccccatctctacaaaaaaaaaaaaaaaaattattattattattattgagacggaatcttgctctgtctcccaggctggagtgcagtggtgcgatcttggctcactgcaacctctgtcttctgggttcaagcaattatcctgcttcagcctcctgaatagctggaattacaggcacctggccaccacacccagctaatttttgatttttagtagagatggggcttcaccgtgttgcccaggctggccttgaactcctgacctcaagtaatccacctgcctcagtctcccaaagtgctgggattacaggcaggtgcatccatagtcctagctacttgggaggctgaggttggaggattgcttgagcctgagagatcaagactgtagtgagccatgatcgtagcactgcactccagcctgggtgacagaccacatccctagctaaaaaaaaaaaaaaaaaagaaaagaaaaagaaaaaaaatgcacaaaaactttttacaaagttccaaaaagcaaaacttgaatttatcattgcattaaatccatgcaaatgaagtgatgcgtagacattttattaggtgttatgagtcacctagagatgatttagagtctacagggggatatatgtaggttatatgcaaacactactccattttatataagtgacttgagcatctgaggattttggtatccacaggaggtcctggaatcaaccctctgtggacatggagttgtatttgtctctttgtgtctggcttatttcactgagcatgatattctcaaggttcatccatggagtagaatgtgtcagaattctgatgcccctttttataacccacatcttgtacagttctctttactctctctctcttttttttttggagacagggtcttactctgtcttgcaggttggaggtgttcagtggcacagtcttggctcactgcagccttgacctaccaggctcaggtgatcctcccacctcagcctcccgagtagctgggactacaggtgtgtgccaccaagcccacctaatttttgtattttttgtagagatgggcatctcactatgttgtccaggcaagtctcaaactcctggcctcaagtgatcctcctgcctcagcctcccaaagtgctagggattacagatgtgagccagcacgtctggaccctcttcgctctcctgaaatgaaatgtctagaatgatccagaatgctgccctcccttctgccagtagatgtctagtagaacccaccatgataagcaagcccccattccacatttccaaaacgttctttaactgtcatgcagtgtgacccccagactacactgaaaaccactctcccaaatgaagttttttcctaaggagcccagagcactttgttcctcattaccttccccaagtcttaggcccctgacatccctataaagagtcttccttgccggcaaatagcatgtgcaaaaaggttccatgggcggcccaccagccctacaaccaaccttggctttggcttggctgagaacccacccacaatttccccactatcatcagtgaccactctcatttcaaagacgtggaaagtaaagttcagagacagatgaagacgtcgggactgacatttcctacacgccttctaggtgtgcacgcagtgtcttactgctcccagcatcctgggtagagaagacatcatcccattttacagggctaaaaattgaggctgggtgtggtggctcacacctgtagtcccagcactttgggaggttggggcaggcggatcacctgaggtcaggagttcgagaccagcctggccaacatggtgaaaccccgtctctaggaaaactacaaaaattagccaggtgtattggctgatgcctgtaatcccagctacttgggaagctgaggcaggagaatcgcttgaacctgggaggcagaggttgcagtgagccgagaccacaccaccgcactccagcctggatgacagagtgagactccatctcaaaaaaaaaaaaaaaaaattgagtagcagggcaccaaggaccttttctctgggtcacaaagctattggttgacaaaatgagaactgggaggtaggacctgtaattccaagccactgcaccctcctgcctctatgacaaaggatagaggggctgggacccactcttccccacagcagctgcaatcgaatcagaaagcaggcagcgcatctggatgctgtgagtcagtgctcagaggaggaggccgtggcacacagggcagtcaccgcagtcctggcacagccgggtctctgccgtacactgccacagcccacctggctctgtgcgtgggcaggaagtcatgttccttccatgagcaggaggtgattaacgaacaccgggtgaggacgagcgggtagaacaaggtcagaatctcaactaagccttcgagatcgtgtcgggctcatttccctgcgatgtctggtctccgtcccactctggggtgtcagcttcccggagactcgcccaggtctcctgccttccgagctcttgccttgctgctgcttttagccctgcctttcacagctgctagttgcccactccttagcctggcattcaaggctgcaatgccagcttcagcttcacccccatttcctgccacaaaccctccactctggccaaattcctcccatgccatgactttcctgcctctgagcctctgcctatgatcccccccaccaccccccaggcctgccctcttcacccatttcacctgttaggctgacaggtcaggtttgagtccagtgaacctgattccaatccctgactttgccaacttatcaacctgtgaagcatcgggcaacctcctgaatctctctgagcttcttcttcttcttcttctttttttttggggggggacggaatctcattctgtcaccaggctggagtgtagaggtgtgatctcggctcaatgcagcctccgcctcccaggttcaagcggttcttgtgcctcagcctcccgagtagctggattacaggtgcctgccaacacactggctaatttttgtctttttagtagagacggggtttcgacatgttggccagggtggtctcgaactcctgacctcaggtgatccacccgcctcagcctcccaaagtgctgggattacaggtgtgagccaccgcgcctggcctatctctctgagcttctgtgtctgcacataaaatgccactggattcaactcatttttattgagctcctactgtgtctacaacagtctgaggatttagcagtgaagaaaggtgattttttttttactgcttatccttgtgtacttttaaaatgctgtaccacgtgcaggtaaaatttatttttaaattttattaaaatgaaaattatcaaggtaatgagacttaggaagagggaaaatattaatatcttactccggtggtttctacgaggatgaagggaggcaacccagtccagtgcagggtctggggcccagcaaagaagtgctcactaaattgcagccatcgtcaaaatgctgccttctccaagcctctaaggagcctcctgcagttaaacctggcctcacccccactggagtgtgatggcgcctttgtttgtactatgtcatttactcacctacccatccacccacctgtcctccatccatccacttacccacccagccatcactcatactttcacccactcattgattacttattgcaaaccaccttagcccattttatgctgctataacagaatagcatagactgggtaattaattaattactttatttatttttatttttatttattgatatattttttgaaacagagtctcgctctgttgcccaggctggactgcagtggcatgatctcagccaaccgcaacctctgcctcccgggttcaagtggttctcctgcctcagtctcccgagtagccagaattataggcacacacccccacacccggctaatttttgcatttttaatagaaacaaggttccaccatgttggccaggcttttcttgaactcctgacctcaagtgatccgcccgcctcggcctcccaaagtgctgggattatagatgtgagccactgtaatttataattacaaggtaatttataatgaacagaaatgtattggctcacagttgtggaggctgagaagtcaaggggccacatctggcaaaggctttcttgctgtgtcatcccatgggagaaggcccaaaagagggtacggagtggggcaagagggagctaaactagtccttttataaggaacccagtccccagtaatggcattaatttattcaggaaggcagtacccccatgacccaaatactacctcccattaggcccacctcccaacactgtcacattggggatggagtttccaacacatgaactttgggggacacattgaaactatggcacacaccagccatgtgccaggtcttctgccaggtgggtaggagtgaatgataaaacagttccaatctttcccctcatacaagtttctgctgggtaagggagagatgacccaccatggaaagtatttgctacacaacgtacaagctttgtagattatatgcagagtacatgtgctccatagagcaggtggcaggggcaaaggacttgcagagaagggatatcaagttgagacctgaagatggtcccggcagatgaaggcagaggagaggacattccatgggcaaggcaggaggtaagaaggtgtgtagagaagataagaacagccggaatgttgagtttcatgttgagagcagcaaggggctggagaagtgaccaagggcctcacagattatgtaaggaatgtgatccttgtcccaggaacaggcttcagagggcttccagcaagggagggacatgagaaagttctggcgttggagagagaactctgactgcactgtggtcaccaggttggagtggacaggattgggtttggcagtgacggtgtgtagaagccagctggcaaagctggagcagagattccccaggcaggaggggtgctgggggtctgcagcagagcagggaagtgggagcagagaatgaggaaggtcagaagattaccccagtctttttttttttttttttttttttgagatggagtcttgctctgtcacctaggctggagtgcagtggtgcaatcatggctaactgcaacctctgcctcctgggttcaagcaattctcctgcctcagcctcccgaatagctgggattacagccaccaccacgcccagctaatttttgtatttttagtagagacagggtttcactgtgttggccaggctggtctcgaactcctgactttgtgattcacccgccttggcctcccaaagtgctgggattacaggtgtgagccaccgcgcctggcctccccccaaatttctaccagaaaaattcttaccttcctgaaaagttgaaagaccagtaccacaaacacattttcttctacctagagtcaacaatcattgatatctccagctttgctctctcaagacacagcaaagtgggtggattttctttttctgtaccatttgaaagtcagtttcagacatggtgatgcttcaccctgagctgcatctcctgagaatgaaggcatttttctcctgaatcgcagaaccagtatcgcacctcggaaacacaacaggagtgacgtctgctgcccagtttgtgtccagatggatggcctttcatggttgggtttttgttttgagagccggggtcccatcaagatgccagcgtcgcatttggttgtctctttagtctccaagaaagactctggaggtggaatgtgtagggcttgatgagtcactgggtttcaggggtggagggcagggaggatccgggcgatgaccgggttctggtttgggcagccagtggtgcaatccttggcatgaggaattctggagagggaacagatctcaggggagagtgggttttggaagggccgagtgtgaggaattgtctggctgtcaggtgggaagctcaggagatggtagcgagatacagtgagggctgtgttagcttcctggggctgccaaacaaatgaccagagatggggtggcttaaagcaacagaaatgtgctttctcttagctctggaggctggaagtccaaaatcaatgtgtcagcagaatcctgcttttcccaagggctcaagggaagaatccttccttgtctcttctagctcctcgtggttttcggcagtcattggcgacgctgcgctccaatctctgcctccgttttggcacatggccacctttcctcttgtagttcacatggccctcttataaggacaccagtcattaggtttagggcataccttcctgcactgtgacctcatcttaatttaactaattacatcagcaaagaccctgtttccaaataagctcacgttctgaggttcctggtggacaccaaatttggggggcacattatccaactcagtatacggtcagcagcatctaaatggtgactgagacagcaggaatggctgcaactagccagggagagcagatggaggaggaggagagggaaggaggggaaggggccctagaaaagaaccagggggcttagtcacagtctggaagggaggagggcgtggctctacagggtcaagtgctgtggggtgtcaagtagagaagggctgagccgcatgcagcctctggattccacgatgagctggccggagactttggcaagagcagtgtcaggagaccgcttggggaaaacccagactgcatggaattttgtttttacatttcagaccctggcctcatagacctcttttttatttgtttgttttttgagacagaatctcgctctgtcacccagactggagtgcagtggtgccatcttggctcactgcaacctctgccttttgggtttaagcaattcttatgccccagcctcctgggtagctgggactacaggggtgcaccaccacacccggctaatttttgtattttcactagagacagggtttcattatgttggccaggctggtctcaaactcctggcctcaagtgatccacccgcctcagcctcccaaagtgttgggattacagatgtgagccacggtgccctgccctcataggccgcctgaaggcaagtggaataagtggctcttcttacatatttatcttgctgttgtcagttcttccgtcgggctgtaagcccctccagattaggggctagattagattttgttccctgtaactctcccagacccctgcgggacccatggcctcctgtgagcatcagcactcacagccccagcacgtctgccccagggcggccaccacctgtgctgagagagggttccttataggataggaaggtgccaatttcagctgcaactattgaccctttttgcatgacttcacatgcatggatttgctcattgaaccctaaccctaacctctagtagtaggagagtactatagtactaaaatactacaagagtactattgttactcaacatagcagatgaggaaaccaaggcacagagaggtcaagtggcacaggaagtgagggagccaggatccagactcggtgatttggctccggagagcgcagtgccttgcagagcgcatggcttcacactgaccattgaatgggctccaaggtcatcagcagatctcaggtgaacctgtggatgtgctcctggagctccctggagttcttctgggtctgacctcacttggggcctggctacacgcgctgttctttacttcctgggataaagagcagacattggccctgagcactgtgtgtcatcagaagggcaggtgcaggcccagagcagggggcttccaacctaagcgtgaccattctcctcacagagcccctgcagactggagactttgaccccacaggtcacttgcagctgcccaccactttctcacctcacctttcatgtctcaggtgtgtttctttcagctgaaagccccagagggaccacgcctggcccttcctggctcagctgccccatagtggtgaggttttctggtttattttttcagttgttattagaggtcgtcgttatctttctcatgagtgactaaagcctattatccctaggcaagttcctgcctggccagtgggtgggagcctccagtgtctgcatcttcccccacaccacccccggagcctgagctcacacagctggggtggggaagaacctgcctgcggcccgtgggaaagctggggaaggaggggagccttctgtccatgctgagggggcagctgccgtgcaagcccggccagggggctcttctctgctgttctctgggtgtcctggagaccacaggctgctcccaaagagaaagggatgggaccaaagagaaagggatgggacaaagggatgtccttactccctcttgcaaaacttcttgcacctgaggtagagtaaatctgagcgcttctccaccccagatctttgggaagaaggtaagggacccatgccaggtgcagtggctcacacctgtaatcctagcactttgggaggctgaggggggtggatcacttgaggtcaggagtttgagaccagcctggccaaaatggtgaaacctcatctctacaaaaaatacaaaaatgagctggatgtggtggtgcatgtctgtaatcccagctactagggaggctgagggaggagaactgcttgaaccaggaggcggaggttgcagtgagctgcgattgcaccatggcactccagcctggcaatagagcaagaccccatctcaaaaaaaaaagaaaaaaaaaaaaagaagaagaagggaagggaccctgtattaggccgatctcacactgctgtaaacaactacctgagactgggtaatttatgaaggaaagaggtttaaatgactcacagttccacaggcttaacaggaagcatgactgagaggcctcaggaaacttacagtcatggtggaaggtgaaggggaagcaggcacatctttgcaaggtggcaggagagagagagggcaaagggggaagtgccacacacttgcaaaccatcagatctcgtgagaactcatgcactatcatgagaacagcaagggggaaatccaccccatgatccaatcacttcccaccaggtccctcccttgacccatggggattacaatttgacacgagattttggtagggacccagagccaaattgtatgagaccccagcctcagtggacaccgtgtgcctgccggctttcatgcttgcttgtcctctgccaggggccctctccccactctgctcacatgacaagctcttactcatccttgctgtttcaccttcaaagtcgctgcttccaagaaaacctccctacttcccccatgctgccagaacaccgtgccccctgccttctgtttttttcaccatggaatttagcttcctgcagggcagaacctgtgtctcgttgcccaccctgtgtcctcagcacctggtattacaaaacagcacaggtttgccacggttgaatcggcaggtggcctggtcattttcctctccttcccctcccagagccaggctcatctcctcatgcctgaggctcctggcttccctccccaagagggaccgaggccagcagtgagcaaacagtgcagggagcagaaacagtgccaagccagaggacagggctccttggcaggatgacctcctggaagaggtgacttcatggcccaagagctgagtggctgcaggatgtcagcctcgtgaagggctggctcagagtgtcctgggcagggagagaaatgagtacaagggccctggggcaggaaccagtgtggcagatctgagggccacagagaaggccagtaagagtggagtgaactgtagactttaccccaggtgtgttggaagttggggagcagtgccgtagggaggtgttcttgatgccggggtggcttgatgaactaaggctgagggcctcctcacagctgcctctgccatcctgcagacgctggccaattatttggaaatattcacagaaaacacagcaagaaaagcatccagtgtctgggagcagtgagagcacttctcacctatcagttcctggtgttcatattagagtgagaaataggccaggggcaaagaaacaggccaggggctaagagaatctgtttttcagccacccacagggatggagacagcagcattatgaggattccagccccttctgggtttaagttatttacacaaaggtataagccatgtcataagaaggtatcaggttatatggccaaaagagccattcttctctcttaatggaaaggaactgagctgctatagagaccagctacgtgcttggatgctcacggactgatcacatgtgcccacctgcctgggtactgatttctccagtgctgaaaggaggcaccatcacgggccctgcttgctcattgaggaaactgaggcttggagaactttggagacctgcctcagccataggccagcacaggcagacagtgagctcaatgcctggactcaaatcttgtgccctttttaaaaaccttttattatgaacgatttcattcatttgccaacaacagaggtggtgttttgcaagatgaaaataatgatcacataacgtggacacccacgcaccaccgtccacttaagaaataaaacatgctgggaccaaccatcctcctgttgctcctgatggctgcgtcaccaccattcggcccctaggtacccaggacaactctgaagtttacttgtatcttccccttgccccatgcacctcttgctttctgccaactgctttgtggtttcatagtgtacataggatattaccatggactactcaatgtagaaatgcataaatttgtatgagagtgtgttcatttcctggccaggcacggtggttcacgcctgtaatcccagcactatgggaggctaaggtgggaggattgcttgagctcaggagttcaagaccagcctgggcaacatggtgagacatcgtctctacaaaaaaatgcaaaaacaagccaggcatggtggtgcacgcctgtagtctcagctacttggaaggctgaggtgggaggatcgctggagcctggaaagtcgaggctgcagtgagccatgattgtgccaccgcacccaacctgggcaacagagcaagacattgtctaaaaaacaaacaaacaaacaaataaacaaacagtgtgttcattccctggggctgccgtaataaatgaccacagactgagtagcttaaacaacagagatttatcctcccagttctggaggctggaagtctgaagtcaaggtgtccgcagggtgggttccttccggaggctctgagggcatatcttttccaggcttctcccagcttctaggggctgctggcacccctcagtgtgccccggtgcatggccgcacccctacagtctctgcttctgtctctcatggcctcgtccctgtgtgtctctgtgtctgtgtctcttcttctccttctttttttttcctttttgagatggagtctcactctgttgcccaggctggagtgtagtgtcatgatctcggctcactgcaacctccatctcctcggttcaaccaattctcctgtctcagcctctcgagtaactgggattacaggcacatgtcattatgcccagctaatttttgtatttttggtagagatggggtttcaccatattggtcaggcttgtctcaaactcctgatctcaggtgatccacccgcctcagcctcccaaggtgctgggattacaggtgtgagccactgcacctggcctctgcgtcctttcttcttctgataaggacacagtcattgtatttagggtcaccctaaatccaggatgctttcatcttgagatctctaagtcaattacctttgtaaagacccttatttttgtttgtttgtttgtttgtttttgaaacggagtctcgctctgtcacccaagctggagtgcggtggtgcaatctcggctcactgcaacctccaactcccaggttcaagcaattctcctgtctcagccttcctagtagctgagactgcaggtgcatgccaccatgcctggctaatttttttgtatttttagtagagacagggtttcaccatattgatcaggctggtctcaaactcctgacttcaggtgatccacccacctcggcctctcaaagtgctgggattacaggtgtgagccaccgtgcccggccaaagacccttattgtacacaaggttgtattcacaggtaccaaaggttgggacatgaacatatctttttgagggccactattcacctactacttacaggaaggcactcaaaatttacttagtggtcaaagtgcttgatcaaaaatttagggccccctgtggtgtgaagatgtttgtgttattgtctctgtcttggggcaggggccacatctcatgccccctccaaccccactggctgctcagtaggatggaggaaaggggcctctggactatggcctgagtttgccaggatgcagctaagaatgagagtgggggccgggtcttccctcttgcgctgccatcacagagcccacttgcccaccgccctcccccatcagactagctcagtgcttgcagtgtggttcgccccagttgtcagctctccttgcaccctgtccttgttctgtggggcacgtctcacctagtaatgaaggaaatcatgggtgtcgtttgtgtttaaggctcacgttctccccagatactgccttcccagttcttcctttgtagaccctcaagagatcattgtcacctaaatgaacaaggtcctgtgcggtgatctggacccttctttgcctagtccaaaggagaccgcagggtgtgctgtgtcacagtgaggtgtccagccagcacaggaggaaggaattactgtagttcaagtggatttagcctgcttggcctatagagccgagagcacaaagcaaacagctgctcagacaccttggctgggaacctaggaggcccccatgggcagtagtttccccaaaatgatggccaagcacctgcttcgtgctggagaccgagacaggagtacacacagatggaggcacgtggatagactgcctctctggccctgcttgcagtacgatgaaagtcctgcctcctgaccccaaggccacccctgcccttgggcccttctcccactctacttcggccctgagctactttttttctttcttttttcttttttttctttctttcttttttttttttttgagatggaatctccctctgctgcccgggctggagtgcagtggcatgatctcggctcactgcaatctccacctcccaggttcaagcgattctcctgcctggtctcctgggactacaggcgccccccccccccccccaccacgtggccctgggctatttctaaccatctgtgtgctcaggcttgggtgaggaacgcctttgtctgcagtgggaatgttctaccctacaactttaccatgttgggaagcggcttgggaatcctcgtcatgattcccacacgtgttcattccattccgcccatgtgaaaagcctggagccatcgagtgcaacgagctaacagggtccggcttccccggggaggctgtggcgctcaggggtttaggagcccccagtctgtgcgttcccagagccagggctgggagccctgcctggcttctctttgagaatcagttcttggaaatctgctgtggcaacacttcccggcacaaccatgggttccttttgtgtcccagctggagccatctcgggggtggtgttggctgctggcttgagacgacgcgggccccactctcccaggagctccgtggctcctttctgcagctccgcctctcccagcggctcctaaaccccaggctcaggccttctgggctccatccttgtgcacaggtgccgccttctctggcacaagccaaccattactcacagctaaaaacttcaatccaaattaaaaagaaaaaaaaatccccacctccactgcccaagaaacaggcctcatttctcctttattctgaatcacagccagcgggttctcagaatactgggctagaggaacaatatgatgtcctccatccatcctggccacattgtgagcagtcatttcgccatcccaggaccaggagaaggtgtggcgggagaggcttccaggccctgaggcatcagtggggtcctaggccgttgggttgaggggagatgaggagggcgggctgggggccaggggactcatgcagcatgaaagagcaggctcttaaggccccattcatgggacacgtttccttgatatgtggtgactttttctgtttttttttttttttttgagacatagtttcactgtgtcgcccaggctggagtacaatggcacaatctccgctcactgcaatctctgcctccggcgttcaagcgattccccaacctcagcctcccgagtaggtgggattacaggtgcccgccagcaagcccagctaatttttgtatttttagtagagatggagtttcaccatattagccaggctgatctcaaactcttcacctcaggtgatctgcctgcctcagcctcccaaaatgctggaattacaggtgtgagcccctgtgcctggctgatatgtggggacttttcacatttgaagagacccaaccaacctaaacctactgacctcctgcaacataaagcacagatccgtgaagatctgtaaggcgcacataaagcactgatgtgtgaagacctgtaagaccacagcttcctttccgaacacagtgtgaacacaaggccgtggaaagacaacagccaggatcaagaacccgatacccgctacatgtgaaagcaaactgtggctaacaacctacaactccagccgggcgcagtggctcacgcctgtaaccccagcactttgggaggccgagacaggtgcatcgcttgagcccaggagtttgagaccagcctgggcaacagggtgaaaccccgtttccactaaaaatacaaaaattagctgggtgcggtggcatgtgcccctggtcccagctacttgggaggctgagatgggaggattgcttgagcccaggagttcaaggctgcagtgagccatcattgcaccactgcacaccagcccgggtgacagagcaagactctgcctcaaaacaacaacaaaaatgacacatatggcgtaagggaatgactctccagtaatctttaaggcatgacagtgaaaaatatcatgtgaaaatagggatttaccctgacagataacactgcgattgctcggtctctcgggaaatatggcatcatctgcagagaatctgattcgtgagatctatatcattggaaaacgcttcaaggaagcaaataaaggctgggcgcagtggctcatgcctgtaatcccagcactctgggaggctgaggtgggtggatcacctgaggtcaggagttcaagaccagcttggccaacatgatgaaaccccatctctacaaaaaatacaaaaattagccaggtgtggtggtgggtgcctgtaatcccagctactcgagaggctgaggcaggagaatcacttgaacctgggaggcggaagttgcagtgagctgagatcgcactactgcactccagactgggtgacagagcaaggctccatctcaaaaaacaaacaaaaaaaaccaaaaaggagcaagtaatctcccatcatggcccttcaaattatccttttcacgaggtggatgaagaaaaagcccatccatgttacagaaggtggagctgctgtcaacagggaaggccagatcagcaggcttatcagacgggtgaattaaagtgtctgccatgattattattgttattatttttgagacgaagtctcgctcttgtcccccaggctggagtgggatggtgcaatctcagctcactgcaacctctgcctctggattcaagcgattctcctgcctcaccctcccgagtagctgggattataggcatctgccaccacgcccggctgatttttgtatttttagtagagacaggtttgccatgattatttttgtaatctggtcatttaataaacagtgactgctctcaaactgaaaaagtgtgtgtggggggatcatttagcccaagaaactactcccaactggggtgttctcggttttatttttattattattatttttttgagatagaatcttgctctgtcgcccaggcaagagtgcagtggtgtgatctcggctcactgcaacctctgcctcccagattccagcaattctcttgcctcagtctcccgagtagctgggactacaggcgtgtgctaccatgcctggctaattttttgtatttttagtagagatgggcttccaccatgttggccaggctggtcttgaattcctgacctcaggtgatccacccacctcggcctctggaagagttgggattacaggcgttgagcccctgcacccggcctcctcagtgtctttcttttttttttctttttttttgagacggagtctggctcctcacccaggttggagtgcagtggcacaatctcagctcactgcaagctctgcctcctgggttcacgccattctcctgtctcagcctcttgagtagctgggactacaggtgcccgccaccacactcggctaattttttgtatttctagtagagacagggtttcaccgtgttagccaggatggtctcaatctcctgatcttgtgatccgcccacctcggcctcccaaagtgctgggattacaggcgtgagccaccgtgcccggcctcagtttcatttttaaaatgagggtctcgatagggtaaaatgtattctgggatctttgagtctcatccctggcggttctgctttacccttgtcagctgtctcgcctggaaaatggaaatgtggtatccaggcgctgatgctgaaggtgggggaggagtcccatgagtctcaccagagatggccaaggacgccgtcgaggtgggctgttacggcctgaactgtgcccccactttctccaattccgatgttgacgttctaacccccagtaccccggaaatcaactgtatttagaaatggggtctttacagaggtgattaaattcaaatgagcctgttagggtgggtcctaatcccatatcccatatgactggtgtccttatcagaagaggagattaggacacagacatgcacagagggacagtcatgtgaggacacaaggaaaagtcggccatccagggagagagaaaccaacctttccacgccatgatctcggacttcagcttccagaatgtgtgaggataatcgtctgttgaagccaccccatctgtagttagtcccctgtgagtttgtctgcctctctgatttcttttgggagcagctcatcgtgtttcccatgtgatgggaggagctggagggccctcccttcttaggaagactgatcggagctcacagccgcagggcaagctcaactctgtggcctccatttcgcagatccaattaacatgcacccctttaaagagctgtcactacctgcagcacacaccacttttcaaaccagattacacattttttgcttcttcatctgtttagccaccgagactatgcgttctgatgtcttgatttacatattttttacttcttcatctgtttagccgtcaagactgtgtgttatgatgtcttgatttattgatgtactctcagcacctggcccggtgcctggcataaagtggctccacaccagaatgtctgttggatgaatgaatgaataaaattacaacatctaacagttgtcacatcctctctatacatactaaaaaaaaaaaaaaaagtaattttaagaagtgtcattggccaggtgtggtggctcacgcctataatcccagcacttagggaggttgaagtaggaagatcccttgagcccaggagttcaaaaccagcctgggccacatagggagaccccatctctacaaaaaataaaaaaaaataagcccagcccagtggcacatgccgttagtcctagctactcgggaggttgaggagggaggatcccttgagtccaggaggccaaggctgcagtgagttgtgatcatgccattgcactccagcctgtacaacagagtgagccatctcaaaaaaaaaaaatatataaaaaaacatttaaaaaagaaaaaagaagacaggaactgtggctcacgcctgtaatcctcgcaatttgggatgctgaggtgggtggatcacctgaggtcaggagttcgagaccagcgtggtcaacatggcgaaaccccatctctactaaaaatacaaaaattagctgggtgtggtggtggacgcctctaatcccagctacttgggaggctgaggcaggagaatcacttgaacccaggagtgtgggggtggggggtgcggaggttgcagtgagccgagatcgcgccgcttcactccagcctgggtgaaagagcaaaactccgtctcaaaaaaaaaaaaaggtattttaagaagtgtctcatctgtcaagttagctggtattaaataaataaaaagaaaaagcatcacttgttgggcacaatggctcatacctgtaatctcagcactttgggaggctaaggtgggaggatcgcttgagttcgagatcagtctgggcaacatagtgaggcccccaccaccaccactctccctgttccttgtccccactcccaatctctctctaccaaaaaaaaaaaagaaagaaagaaagaaactgctaggaagaaaggaaagagcttttgtggttgtactgctatgctattgcctacagcatcaaacactcaactaacagaaggtgcccaacacagacacaggtgtttactattcacttaacaagcctgctagggggcagctcccagtgggcacaagccttccagtagtctttccttagcacattagcagacacggtttccaaattcccaacagatattaatcttcaagactcgagaatgtcattcaaaaacaaggacacagcctgaattctaaatgccaggttgtactaagggaacaccttgatctttgagtcttgactgtgttgttgggttttttgttgttgtttttttgtttgtttgtttgtttgtttttgagacggagttttgctctgagatggagttttgctctgttgctgggctggagtgcagtggcgcaatcttggctcactgcaatctctgcctcccgggttcaagtgattctcctgcctcagcctcccaagtagctgggaccaggcgcgctccaccatgcctggctaagttttgtgtttttagtagagatggggtttcaccatgttggccaggatggtctcgatctcttgatctagtgatccgcctgcctcagcctcccaaagtgctgggattacaggcatgagccaccgcacccagccccttgactgtgttttgttcagggcattcttcgtactagttggttgtggttataaaacaattagtgggccaggcacggtggctcatgcctgtaatcccagcaccttgggaggccgaggcgggcagatcacaaggtcaaaagattgagaccatcctggccaacatggtgaaacccaatctctactaaagatacaaaaattagccgggcgtggtggcgtgcacctgtagtcccagctactctggagactgaggcaggagaatcacttgaacccaggaggcggaggttgcagtgagctgagatcgcgccactgactccagcctgggtgacagagcaagactctgtgtcaaaaaacaaaacaaaaaaaaaaacacacaaaaaaattagcgaaacagcttacattcatatttattttattttattttatttatttatttatttatttatttatttttgagatgaagtctcactctgttccccaagctggagtgcagtggcatgatcttggctcactgcaacctctgcctcctgggttcaagcaattctcctgcctcagactcccgagtagctgggattacaggcacgcgccaccacgcctgggtaatttttgtatttttagtagagataggtttcaccatgttggccaggctggtctcaagctcctgacctcaggtgatccacccgccttggcctcccaaagtggtgggattataggcgtgagcaaccgtgcccagcccaattttcgattccatacttctgccccatgttgttttgtctcagaatccatttctttaaaaaataaatcttttgcagatgtggaaaaaaaaaaagatatgggcatgagatatcagaattccccaaaccctaagttattttgtatttattaaaaacattgtgtttacttgcttgtaaagaatgggtgaccataataagcaggttcagaggttttctgtaaaaaaatttttaaaaatctgaagtgcatggttcttattataaaccaatatattttgacaatattgtttttttttttttttgagacagagtctccaggctggaatgtagtggcatgttctcggctcactgcaacctctgcctcctgagttcaaatgattctcctgcctcagcctctgaaatagctgggactacagtaatgcaccaccactcctggctaatttttgtatttttagtaaagtcaggttttcactatgttggccaggctggtgttcaactcccggcctcaagagatctgcccgccttggcctcccaaagtgctgggattacaggcatgagccactgcgcccagccagtattacatattttaataacataaaaaacctccatctgatacagatatttgataataaaaaaattaaaagaaaagaatattagtaaacaataaatgtcaaattaatttttaaaatcttagaataattccacaaatatccaacatttaaaagcttaattgtcctatctcataatcttgatctttgtttcatcataaatattccagttgtggaaaaatttcttaggactgtgcccaaaagcatcctcaagttgggcaacaggaagagtatagggttgtttgtttgagacaaggtcttgctttgtcacccaggctggagggcagtggtgcaatcacaggtcactgcaacctcaggctcctaggctcaagtgatcctcccacctcagtctctagagtggctgggactataggctcatgccaccatgctcagctcattttttttttttttttttttttgagatgaagtctcgttctgtcacccaggctggagtgcagtggtgcaatctcggcttgctgcaacctccacctcctgggttcaagcaattttcctgcctcaggctccctaatagctgggatcacagacacttgtcaccatgcctggctgatttttgtatttttagtagagatggggttttgccatatattagccgggctggtcttgaactcctgacctcaggtgatctgcccaccttggcctcccaaagtgctgggattacaggtgtaagccaccacacctggcctcattttttattatttttatttatttatttatttattttgagacagagtcttgctctgtcgcccaggctggagtgcagtggcgccatctcggctcactgcaagctctgcctcctgggtgcacgccattctcctgcctcaacctcccgagtagctggaattataggtgtgcaccaccacacccagctaatttttgtatttatagtagagaaggagtttggccatgttggccaggctggtcttgaactcctgacctcaagtaatccactcacttcggcctccattagtgctgggattataagcgtgagccaccacacctggccttcgtttttaaatttttttgtaaaacagggtctcactatgttgccctcaccgatagagattttttgtttgttttttgttttttaattttgtggtaaaatacacataacacaaaatttaccatcttaaccacttctgagtgcacagtgcagtggcattaagtactttctcagtgtttcactgcgtgcaaccatcaccaccatccatctccaggatttttcttttcttttcttttcttttttttttttgagatggagtttcactctgtcacctaggctggagtgcaatggtaagactcgggtcaccgcaacctctgccttctgggttcaagcgattctcttgcctcagcctcccgggtagctgggattacaggcatgcgccaccacgcctggctaattttgtatttttaggagagacagggtttctttatgttggtcaggctggtctcgaactcctgacctcaggtgatccacccgcctaggcctcccaaagtgctgggatcacaggcatgagccactgcgcccggcagtctccagaatttttcatcttgcaaaactggaactctgtgcccattaaatagtatctccccatttcccttcccccagcccctggcatgcaccattctactgtctgtctttatggatttgactactctgggacctcaggtaagtggaatcacacggtgtttaccctttgtgcttgacttagttcactgggcataatgcctttgatactcatccgtaaggttactttttattttttttttaattttattttttctgagacaggatctcactctgtcagccaggctggagtgcagtggcacgatcaccactcactgcaggcacaacctcctgggctcaggtgatcctcccacctcggcctcctgagtagctgggactacaagcgtgcacccaccacacccagctatgtttttgtatttttagtagagatggggtttcaccatgttgctcaggctggtctcaaactcctgggctcaagccatccgcccgccttggcctcccaaagtgctggaattacaagcatgagccactgcacctggcccagattacttttttaatggtgaaactatttcatctgcttcacaaaaaaactatagcccacagtgaatactcagactctggaatgccagcaaatacactgggtaggattcaaataacacgaacattgagatctgttagcaaggttcacagtgctaatattcaaaatcacacgttgaagttgccggtttgaggacttagctgcttatttcttagaataccactcataggatttggataaaatacactatgtgtgtaaactcaacaacatttattttcaagaataactcaccatttggcagaggcaggggccagggcaggcatacacaacagggcacagccacaggcaagatggactggttctctcccacatacttctgtcccagttctaggaatgttggaatgttgaccttaaccttcagctccacgtgtcagcgcttcctactctagcttttttttttttggagacggggtctcactctattgcccagaccagagtgcagtggcatgattacttcttctgtttttttttttttttttttttttttttttttttttttttttttttttttttttgagacagagtcttgctctgttgcccaggctggagcgcagtggtgtgatttcagttcgctgcaatctctgccttctgggttcaagtgattctcctgcctcagcctcccaagtagctgggattacaggcatgtgccatcacaccaggctattttttgtattttttgtagagacggggcatgttgaccaggctgatctcgaactcctgacctcaggtgatccacccgtctcagcctcccaaagtactgagataataagcatgagccactgtgcccagcctgccctagcttttttttttgagacggagtcttgcagtgtcgcccgggctggagtgcaatggcgctatctcggctcactgcaacctccgcctcctgggttcaagtgattctcctgcctcagcctcctgagtagctgggattataggtgcctgccaccacacctggttaattttttgtatttttagtagaaacggggtttcaccatgttggccaggctggtctcaaactgctgacctccttatccgcctgcctcggcctcccaaagtgctgggattacaggcataagccaccatgcccagccctgccctagcttttggcttgacatcagtgcattccttagagctggtaacctccctctatgttaagtttgtttctcctgtgggaatcctactcttccctttttttcccatctatcaactgattttttttttttttttttttgagaccgagtctcactctgtcgcccaggctggagtgcagtggtgcgatctcggctcactgcaggctccaccccccggggttcacgccattctcctgccttggcctcctgagtagctgggactacaggcacctgccaccttgcccggctaattttttgtatttttagtagagacagggtttcaccgtgttagccaggatggtctcgatctcctgacctcgtgatccgcccgcctcggcctcccaaagtgctgggattacaggcgtgagccaccgcgcccgggcttgctttttttttttttttttttttttttttttgagatgaagttttgcttttgttgcctggctacagtgcaatggcgtgatctcggctcactgcaacctctgcctcccaggttcaagggattctcctgcctcagcctcctgagtagtggggactactggtgactgccaccacgcctggctaattttttgtatttttagtagagacggggtttcaccatgttggccaggcctgacctcaggtgatccgctcaccttggcctcccaaagtgctgggattacaggcatgagccactgtactcagccttattgactgatttttcttgttattcaggattgggaaagggaccgatttcctgtgagatggtgggaaggaatttcctggaagcacagtgggcagaatctttccttatggtctcacagcagctgccacagtccccagtcccagtcctcaaggacagaggccatggggctttcttctgctctctctttcttcagagagggaagtcccaggagtctccgcacactttcccttatgtgtcacagatgagaacaggactctagcttgtcaggggcaaaggggaagaagatgctagcagagttggtccaagcctgattcatgctgtggggacgggcatggcgcaaatataaaagacttccaccagtgataatactgttcatatggcgcttcccaactcaaccctcacggcaatcctatgaggtggtgctaccatctttgctttacaaatgaggacatttggcccagagaggccaagcagcttacctaggagtacacagctacggcaaagaagcagagccaaatctgacacaagctacctgtctccagggtcggcatccacacccactgtgcagagtgtcttcaaagagggcacggtgaccaggcaggggaccagctggggggggctgctgcagtcaactctcatttccagccgtaagagttcctcagcgaatatcgcagggtggtctgtgggtgttattatccccatttgacagatgaggagagtgaggcttagtagaggttagtgccttgccccagggcaaggtaaagagctgggagtgcagctgagacctctgagagttggactacctctgtctgggctcttctccctataacagcgggacatttttattaggtggctctgtttgatgaacacaatgaggttgtcaagagaagcaaggtgcaaaatgcttgacttccctttgaaatataattatacacatacattatattatgaatgagactaaagtcttcatgtccaagcaggcagccaggagatgcccaaaggattgggaacctccctatacctggcgttgggataggggcaatggagacgatttcagacaagatggatcaggaagacagatacagagaccagggctcagtaccttggtgtcccacccctggtggaagggtttgactcctgctttgggggcctggagataacttttgatgtagcagcaggaacattggctttggagccagagagttttgagctcaagtcactgtttttaccaaatcataaactgtggggtgtggggtatgttatctaatccttctaggtctcagtattttcaactgtaaaaggatgcaggatatacttgtgaggatttggggagttagatgggttaaagattttttgtaaaatgctctggaaattgtaaaatgctctgtaattttcttattatcacttcatccagaggtgtccgtgtccgtgctcttcggactgacctgaacaaaccaagtcatagtcactgatggaccaattttctttcttttttttttttagagatgaagtctcactctgtcgcccaggctggagtgcagtagcacaatctcggttcactgcaacctccgcgtcccgggttcaagcgattcttgtgcctctcagcctcccaagtactgggattacaggcgagtgttaccacgcttgattaatttttgtattttttttgtagagaccgtgttatgccatgttggccagtctggtctcaaaatcctgacctcaagtgatccacccgcctcagcctcccgaagtgctaggattacaggcgtgagccaccgcgcctggccaatggaccaatttttaattaatcggtttaccatgaggcatcgaactgccatggaaaccagaacactcaggccaatgatctccccagcttatggccactaggggctcagttttctcatctgcaaaatggaaagaatacaggcatagccatggggagaactattttttttttttttttgagatggagtctcactctgtcgcccaggctggagtgcagtggcaccatcttggctcattgcaacctccgcctcccagccctggagaactattttaagaatgaaatggtggccaggggcggtggctcacacctgtaatcccagcactttgggaggccgaggtgggtggatcatctgaggtcaggagtttgagagcagcctgaccaatatggtgaaaccttgtctctactaaagatacaaaaattagctgggcgtggtggcgcatgcctgtaatcccagctactcaggaggctgaggcaggagaatcatttgaacctgggaggcagaggttgcagtgagctgagatcgtgccactgcattccatcctgggcgacagagtgagacttcatctcggaaaaaaaaaagaatgaaatgagatgaataagtaaaatggtagctcttggccctgggaattgaattatttcggctgcactgcagaccaactggtaaaatgttttctcttcagttgttccttaaagaggccactccttgatcacaacgacgtggggacaggacggggaattgagagccctgggttcactcaaggctccacctccagctctgccccaaactctctgagtgtctacagggaaatctgttttgcatctctgggtttcagctcccttctcttaaaggaacgaccacatcctccaccatctactgccctagggctcctccagctcagacctccccctgaactgtgttgtcacagcactcattcattaggtggctttacatgttctgggtagatttgggcacatcctgatctctatgattgaggtcagaccacaacgatccccgcaggaacctccttcttaagccgcttacatctctggagtggagaggtgtcctgagtgatgctcatggttgacaactaactgcatcatccaggcaccttctagagagcagaggctggctgacctccaccgcagccacatttgcaaacatgaaaccccaggagtagtgataaattctctgctccctcctcactccttctatcataatttctttatcaagtcttttacagaagaactggagtgaaaacattttccatcttcactgttttcctgacagagccttgggtgacagcatgtcacccaagctctgagaaatgttttccagataaatacttctgggaagtagtttagctgggtggtatgagtaaatccatctgaaagtcatgttagcttcctgaaagcagttctccatggttctcacttgtccagattgaattttaatgaacatttattggaggttttcctattgattataataatgacgcacattcatgataaagtatctagaaaataaagactagcaaaatgaaagaaatgcagcttccaaccacaatcccacttaaagataaccaccgcgaacattctgatggatctccttccaagaatatatacatatatatatgcgggaagtggggaaagataaagaactaattgactacagtaacaatattttcttatgtagacatatgtttttctttcataatttgaaacttaaaatttaatttctcatttcaagaatagttcatgtcatataaaactcattttattaaaaatgtatcaccttaacattctagagttattcatctacaaggtaaattttacataatacattcttaatctaaacacagactgttttctttttcaaattggggttcacactctgtatacttgtttgaatttgcttttttaaaaaagtttttgtttatgtataaaaattaaggcatactctacatattaatgtacagttatttgacaaacgtatatagtaatgtaactaccaccacaatcatgatatatgtagttatctaaaatatgactgtgggccaggtgcggtggctcacacctgtaatcctagcactttgggaggctgaggtggatggatcacctgaggtcaggagttcgaaaccagcctgtccaacatggtgaaacccagtctctactaaaaatacaaaaattagccaggtgtgcctgtaatcccagctacccaggaagctgaggcaggagaatctctggaaccccaggaggcggaggctgcagtgagccgagatcaccccactgcactccagcctgggcgacggggcaagattcagtctcaaaaaaaatgactgtgaatgtcaccaagttttctgtcatttggaagtgcaataatttaaccaatcttgttttcttggccatttaggttgtttacgatttcccccttactgattttgcgatctgggggaatgaaataataaatgaattaaaatgaatgagggccatgagtggtggctcatgcctgtaattccagcactttgggagggtgaggtgggaggattgcttgggctcaggagtttgagaccatcctgggcaacatggtgaaacctcttttctaccaaaaatacaaaaaagttagccaggcatggtggtctgcgctggtagtcccagctacttgttggggagctgaggtgagatgactgatgggcctgggaggtagaggctgcagtaaactgtgttcgaaccactatatcccagcctaggtgactacatgagaccctgtctcaaaaaaaaaaaaaaaaagagagagaaaaagaacaaaggaagggtaaggggaggggagggagggagagagagagaggaaggaaggaaggaaggaaggaaggaagggaggaaggaaggaaggaaggaaggaaggaagcaaggaaggaaggaaaaagaaagaaaagaaagaaataaaatgaaattcagaattctcattttcctggagctataccaactgggtgtctcccttctccgctggaaaaatcccacatcattcaagacccagctcagatattgcctcctctatgaagcccccatgatgccagctggagagcgggttcctcccttccctgtgattccacagcaccaagtcacacactgtttacgggacagacattgcaatagtctgtttttcttctctttctccagactgtgaactcatactagaagtgatgtcttagctctgcgttcccaagacctaagccatgcttggctcatacatgctgcacaaatattcatgaaatgaatgaacattctaccctgccgaactaaattttgatcttgagccgatttttctttttttttttttttttgagatggagtctcgctttgttgcccaggctggagtgcagtggcgcgatctcggctcgctgcaagctccgtctcccgggttcacgccattctcctgcctcagcctcccgagtagctgggactacaggcgcctgccaccacgcccggctaattttttgtatttttagtagagacagggtttcactgtgttagccaggatggtctcgatctcctgaactcgtgatccgcctacctcggcctcccagagtgctgggattacaggcgtgagccactgcgcccggccttgagccgatttcttagaaaacagacactttatgagcatggtgcaaacataagctggctgcattaagcaggtacccctaaggagagctggaaatttgctggtttcagacagtggttcaggggaacttgggagttgtgcagaattgctggggtgtggagaggtacagggtacttgcagaacacctcatctaagcgatcaactttacaattttattatttttgagacagagtctcgctttggcacccaggctggaatgcagtggcacaatcacagctcactgcagcctcgacctctcaggctcaagcgatcctcccacctcaatcccccaagtacctgggactacaggtgtggcccaccttgctggactaatttttaattttttgtatagacatgggtctcgatatattgcccaggctcaagcaatcctcccacgttggccccccagcgtgctgggattacagacgtgagccactgcacctggccaatgttttttttttttttttttttctgagacagagcctcgctttgtctcccagcctggagcgcagtggcatgatctcctcattgcaacctccacctcccaggttcaagctattcttccacctcagcctcctgagtagctgggattacagatgcccgccaccacacccggctaatttttgtatttttagtagggatagggtttcaccatgttggccaggctggttttgaactcctgacctcaagtgatctgcccacctgggtctcccaaagtgctgggattacaggcttgagccaccgcacccggcctcacctggccatttttacacttttaaaatagcaagaaactaggggcaaaaagtacatattcatatctatgtgtagtcagtcaataaatatttattgaatgaacgaataaattaatggaaggtgttccagatcctggtaggcgagagtcagtcggagggagtgcttgttcttggtgcactcacaatggagaatcaaggaattcaccttggacgggctcatttctccctctcctaggccccgtgcagcctcttctcagacttactagttctgaggggctcctggctgcctcacaccaacagcagtggccagtggacactggcgatggtgtcctgacattttggtttgtgaagagtttgtgctccgagtcaaatcctgggaggagtggggagggcatccgctttaattaattagaggtgtctctattcatctccgtatctgcaacatctagcacaagacttggcccatagtagatgtttaaaaattcttgctgaggccgggcgcagtggctcacgcctgtaatcccaacactttgggaggctgaggcgggcagaccacctgaggtcaggagttcgagaccagctcgaccaacatgtagaaatcccgtctctactaaaaatacaaaattatctggacttggtggcgtgcgcctgtaatcccagctacacgggaggttgaggcaggagaatcacttgaacccgggaggcagaggttgcagtgagccgagatggcgccattgcactccagcctgggtgacaagagtgaaacaacgtctggaaaaaaaaaaaaacttgcggaaaagatgaaatgaccaagactcgcgcagtgctgcccgtcaggctctcaactagtcgctcttcacatctgattcatgtcttaaagcagcctcgcaggtaggtctgcatcattttcccatcctacatcggaggcgctgaagcccaggcgggtttcccgagtcgcccgggcccacgctgcagagtgaaagccacagcggcaaagcctgcactctggacgctgcgccgggacgtccccaggtgcggcaggcagcgctccgtaagtgggtcctggcgggaactccgtccttctgaacccagatcaggcccagggagaccgtaggggcgccgcggcgggcggggtctgggtcctcggtggtgactgaagcctcggttcgctcttctgcaaggtgcgaatccagagcctccagctcgggagggacctgacgtgccggacgcgtccagctcagaactcgaggcgcggtagacactcagcaaaggcctccggcgtccctgcagccgtggggggaaactggggacgcccggaggaagacgctgacccggcgagcacctgagcgcccacctgtggctcatcccggagaccgccccctcccccgcgacccgggcggggcctggggggcgtggctcccgtctcgctcagccaatcagtgccccggggccgcctcccgccccctcctgaggagacagcgcttgcgtactcgggccaaggtgctcctcgggccccgcccccggggcggtgctgacgctcgcgccgacgcgctcgacgtcgggcacgtagacgccggcgccgcgcagccgggcccgctcctcctccgctccgccagtgtccggccgcgggccggccttagtgactggggcggcgggccccggggccgcggcgtggggcgggcaggcggacgccggccgcgggctgctttcgtcggctcccaagctctcccggagcgagcagccgcccgcgagccgccgcggagcctcctcgcccgctcccgccggcgagcaaggtaagggagcgggacactgaggcaggctcggggcccaggcgtcaccggcgcgtcccggtctccgcggcggccacgcagccgattagatgtctccgcggggaagggtgcgctccgggacgggtgggggcgaggccgcggcgccgggtcgcgctgggagagctccggcgggacacccgcgccccaagggacggctccggggactgcgcgctgcccctccccgagccccgcgccccgtgacccgggcgctggggcgaggggcggggacctgtggccgctgaaagccctggcccgagcgggctccgttgtcaacggtcctcaccccccggggttcggggcttccgccgcacctgatacaggaggggaggagtgcggctcgagcaggctggaggtcaccatccccatcaggtgcgccgtctggggcatccccctctcaggggtccaccgcgcccccagtactgcccgaaaggctcagaagcgacttcccctttccctggcgctgtctttatatcccagacacttaatagactctcgtaatctcacctttcacttttccctctttcctagccgcccccggctgtatcgacctgctatatttccattgtggattttttttttcggttgtaaacttacgtaagttaggttgaccaaccgttgcagccattggaaaacacttctaccagcgtttaacgaatccggttccttttagtgctcaccaaatccagcccaagaattcagggagccgtcagttcttcccgggagctgactgcacacattcctgcaagatgcctgatggattttgtacttgtcagttttgctggttgtatgctccttctgtgcttttcctgaaaaatgattgggtgacatgtgttttgactttctccccccctacccccccaccctccccaccccactgggaagtaaaaaaaataggtaacagaagcacacttgttttcagcaaaaacaagtacagctttgcaaacagactaccccagggcttgcccttttttgtgagggtagtcctttgggatcttgaccccttccctggatttttgtctgtgttaatgtcttcatgttgtgtatttttgcacttaatatttgccctgtgtatgttttcccagcttatttacacacaaagcataacagatctgagcataatgagactgcccatctttttagctacagatacctgtaaagttgcatatttgtgggaacctgtattctgagcttaattactgtagcctgggtctttcatttcaagatgatgtgcgaggtgatgccgaccatcagcgaagcagaaggcccccctggaggaggtggaggccatggttccggctccccttcacagccagatgcagattcacattttgaacagttgatggtctccatgctagaagaaagggaccgccttcttgatacactgagagagactcaagaaacgctggccttaacccaggggaagttacacgaggttggtcatgaaagagattccttgcagagacagctcaacacggcacttccacaggtatgagtgcttttaacctgaaactatagatttttctccactaaatgtttttttattagtgtcatcttttgttaatgtttcagatgagtattttccgtaacgatttgtgaaatgatagtttctggtgtttgtaagtcaaatacaaagttcctagggattaaacttcttagggagaacaaatcgttgtactctaaagtcatgtgaaaatacctcattattttcattcctatctttgggaactgcctaggttcaggaagttctccagagtttttgaaaaagggctctgaagcaaccaatctatttggtgcctccattctgttgtcttaagccttttctggctaaacttgtacttcccatggattatctcatgtatttctaatttcctaatgtaatttaatagacaaataggattgatttcacggaaaaaaaaaattattttgatagcccacctttatcagaacatctaggttttgtaagtcacatttgttttaggggatagaagactcgagattgattccttaggaactttttccttggcagatgagaattttaaagcttaggccgggtgtggtggctcatgcctgtaatcccagcactctgggaggctgaggcaggcggatcacctgaggtcaggagtttgagaccagcctggccaacatggcaaaaccctgtctctaccaaaaatacaaaaattagcagagcgtggtagcgcgcatctgtagtcccagctactcagaggctgaggcatgagaatcacttgaacccgggaggtggaggttgcagtgagccaagattgcaccactgctctccagcctgtctcaaaaaaaaaaaagatttttaaagcttagaacaactgaaattgtttctctgagtatgttacatttggaccagtgtttgaaagactttgctcatggagttgaatgaggatttacttaatggtaggtaaagggagaaagtaaaaactagaagagtgtaaggtgagtggcacggggcatagtgggagagaagtgggttatttatgtgtttcagagctgtctaggcgccacgttactcatcataagtgcctttggggtgcattcaggtagacccgcataagcacacatttatactcgcatgatgggtctgcagtgataaattagtaaatgaataagtactagccttaatgtgtttcttggctgtagtcagttctcctgaaagattgataagccaaacgtgggtttcctttttagcaacaataatttgacgttagcgctctatgttccttttttgttggattaaagaatcattaagatttttcttatttcaatcttataaattaccaagtttatttatgttgaattttattactacaattttaaaagaagtagccaatttatgttttaccaggattttattgtatttgtaatttaaggtacacgtattgaagtgtatatcaaatactaatatacttaataaggtaggttttggaaagaatgggcacacaagacatgtcagggaagtgacaggagttttgtacagttagtcgcaggctgtggaggttgtcacacacactggtgacatggttgctcagtgatttgtttctggcactgctcagtgtagcagcctgggaatgcctagttcagtggataacatgatgatgccaacggttcacgttaccacctgagcacctgattccagcctttcaaaaatggaaactattaagtaaacttgttttggacccttccctttcctggcatctggttcatctttggtggctggtagtgtgaccagataatgagtccaggaagtgcatttgtgctcctggcacattgtggaggcaagttagagtgtacttaaaaatatacataactatagcatacagcagaaaaattcacaaatcgtaagtatacatctcagtggacttttcacaaagttaacacacttgcataccaccacccagatcaagaaatggaacattatcaggcttcctagaagtcccctcctaactattcccagtagttgtcccccagagctaaccaaggtcttgacctttcaccattgattacttttgcctgttcttgactttgtttaagtgaagtaaaataatctgtatgttttgcttcttcattctgtcgtcagcatcatgtttgtgagatgcagcttgctcattctcacctgctctctggtcatcccgtgcacgaacagacagaacttattctttctactgctcacagacatttggggttgtttccagtttttacacgtgctcccctaatattgtttgttttttggtgcagatgtctataaacttttttttttttgagatagggtctcactctgttgcccaggctggagtgcagtggcatgatctcggctcactgtagcctccacctcccaggttgaagcgattctcctgcctcagcctcccaagtagctgggaatacaggcacgcatcaccaccctccgctaatttttgtattttttgtagaggtggggttttaccatgttgcccaggccggaggatatgtgtacacttctgttggatttctacaaagaagtggaatgcaaatgatggtgtgtgcatttgttcagcctcagtagagagtgccaaaagtggtggttgtgacagtttgtactaccccagcaatgtatgagaagtcagttgctcctatgctcttcagcacttggtattgttgggtctttacattttagctgttctggtggctgttagctggtaggtggctcagtatggtctgaatttgctgctccctgatggccaggaacatgcagaggtaaagcatctctacctgtgttcactggccacctggatgtcttttgtgaaacggttatcttttgcccatctgttgattgggttgtctgttttgttttttactgatttgaaggagttttctctatattctgagtacatatgtgcatgacagattgtttttagactcttgtgtttgccttttcactctctcagttgtatcttttgatacatagaagtgtaaaatttttaatgtagcccagttgatccatcttttcagtaatgtttaatgctctttgtgtcctgtttaagaaatttgcttggtcaagttcatgagatattctacattgtcttctaaaaactattttttaatcttccatctgaaattgactttgtttatggtatgcgatggggccaagagtctctctttctttttttaaatggatatctagttgaccttgcataatttcttaaaagactattctttccccagtgtactacatgcagtgtcatctcagtccagtgactgtaagtgtgtgggtctgtttctggactctcttctgctcctttgatctttttgtcatctttgcacaaatagcacaatgtctaaattcccatagatatagtctgtcttgagatctggtaatttaagaaaagggtactcactcggttgcccagactagtctccaactcctggtgtcaagcgatcctctcaccttggtctcccaaagtgctgggattaccactgtgagccaccacacctggccctgtagatattctttatcaaaatgtaaaaattctcctcttcttagtttgccaagagttttttaaaaaccatgagcaggtattaaatttcttaacatggattttctgcatcttttgagacagtcatgtgatttttctgttatgtgggaatttaactgtttttgtttgtttatttttgagatggggtcttgctccattacccagcccggagtgcagtggcaccatcatagctcgctgtagccttgaactcctgggctaaagtgatcttcccacctcagcctctcaagtagttggaattatagacgcacgccactgcgccttgcttttttttttttttttaattgcatattgtttgtagcctggggaagcaacttcaggagctcctgagaaagagcacctcccttttaaaaaaaatttacaattgtagaataattccaacctgatcttgatgtattctccttttactggattatatttggtagtattttgtttaggattattgcatttatattcacgagaaagattgacttataatttcagtttccttcagtacccttgttgggatttggtatcaaggttatgctggtttcttaaaacaaggtggaatgtattccttctttttctactccctagaagagttcctacgaaatttgtgttttcttccttaaatgtttgaaataattctttggcaaaaccagctggtacagggttttccttgtgagaaggaaaaattttagaattaattttataggtagatgtaggattttgaatatttcttcatgtgtctatttagataaagcatttttccccgctagagatttgttcaggccacccagactttccaatttgtaagtttaaagtggtttgtaatccttattatctgcaagatctgtagtgatgttcccttttaataattcttgatatcagtaattcatatattatctcttaatcagtcttgttgggggtttgtcaattttgtaagttcttttaagggaccaactttcggctttacatttttttctacttacatttgttttctattgcattaatttctacttttttttttttgctttttttttgtttgattgagatatatatatatatatatatatatttttttttttccaggcacagtctcattgtgtctcccagggtcaagtccttagatacttgaactggatttaactccctcctaccttttgtgtcattgttttatatatttcagtttaatttatatttatttttaaaaatagagacagcgtcttgctgtattgccccagctggtcttcaactcctggcctcaggtgatcctccccccttagcctcccaaaacaatgggatccaggcgtgagccactacacgcttttagctgcatcttacaagtttatgtactttaattttagatatacttttgcagtatcataattattttgtacagttaatgtttatttagatttatcctcttagttaccatttttgttgctcttcattctttattgttgtttcatgtttctgccggggattatatttcttgttttttttttttctttttttcttttttgagacagagtctcgctctgttgcccaggctgaagtgcagtggcacgatcttggcgcactgcaacctccatctcccatgtttgagcgattttcttgcctcagccttctgagtagctgggactataggcatatgccaccacatccggctaattgttgtatttttagtagagactgggtttcaccatgttggccaggctggtctcaagctcctgacctcaagtgatctgcctgcttcagcctccaaagtgctgggattacagatgtgagccactgcgcccagcctatatttcttttccctgaagaactttctacggtatttctttgagttcatatctgtggataatgaattgtcatttttgtttgcctgaaaattttctattttgcctttagtttttgttttgttttgttttgttttgttttttaagatggagtctcgctctgtcgccggtctggagtgcagtgatgtgatcttggctcactgcaaccaccgcctcccgggttcaagcaattctcctgcctcagccgcccgagtagctggaactacaagcacgtgccaccacgcccagctaatttttgtatttttagtagagaaggtgtttcaccatgttggccaggatggtctctatctgttgacctggtgatctgccctcgtcagcctcccaaagtgctgggattacaggcgtgagccaccatgcctggcctttttttttttaaatgtgatgtttcaccatgtttgccaggctggggtcaaactcattggctcaagcagctgcctgcctcagcctcccaaactgctgggattacaggtgtgagccactgtgcccaatttgccttcagttttgaaggatgattttgctgggtatagaatactgggatcgtggtcatttccttgcaccattttgtagcagcgaattcattgtttttttagctcgcttcctttttcttgacaagtcagcttttggtgttattgttgtcccatttgaagtaatacttctttttattttcccctctggttgctttttatttttattttttggagaggatatgacttttactgagtttatccaccagagtggaaataatgtttgtgcaaaaccaaatgtttgttactataactctccatcacaattaaaatccaaacagttttttgaaaacagtcaactcaatcaaaacccactacttcagaatcaatagcttctttgaagccacagtaacaaatatggttaagacttgaatgtagaaatttgttggttggaaagctaattaaacttccaacttgctcaagtagaattacagaaaggcagaattgtgtttttcacagagatatagttcactggaatcagccacactggacagctggtagagtgtttagggtcctgagataataaggaatccaggcagcctttagacagtctgctgttgtcctttcttcccaattagagatttgtggatgtgtggaatgacacctttaccagcaattgtagacttgaagagagagcccaattctttatctccacgaatggcaagttgcaagtaatgaggggtagtatgctttactgtgaagtcttttgacgcatttcttgccagttcaagtacctctgcggtgaggtactccaggatggctgtgctattcacagcggcagtcgcgcccacacgtccaggactgattgtcctagatttcaggtgtcagtgaatacggcccaccaggaactgcaaattggctctcttgtgagtgggaagctgcctttgttggcctttctggagtccttcccagccttactgccagccattttcaattctgctgaagctcaaacaggcaaggcagagaaaggactaatcagacacacagcaagatctcaccatctactcattcctcacaccaggatttgaagctgcctctggtggcttgtaacattttctttgcttcaggcattagcaaaacttggtatttgttgtattggtggcctggttcctaatcaattttggaagttttggctcttctctctataaatattcctattttccactcatcttcactcagagggcctccatttttgtgtacattaggcattttttttttttttgagatggagtttcgctattgttgcccaagttggagtgcaatggtgtgatatacattaggcttttatcatgtcctatgtgtctcttgtgctcctttccgtattttctagaccttttctgtgtatgtgtctaggtgtgtgtgtgtgtgtgtgtgtgtgtgtgtgtgtgtgtgtatttagtttttagagactgggtctctctgttgcccagggtggtcttgaactcttgggctcaagcagtcttcctgccttggcctcctaaactgttgggactacaggcgtgagccaccgtgtccggcctgtgtgtgtgtgggggatgtgtgtgtgtgtatatttttgggacagggtctcgctctgttgcccaggctgtagtgtagtggtgcagtctcagctcactgcagcatctgccttctgggctcaagcgatcctcccacctcagctcctgagtagcagggactacaggtgcgtgccaccacacctggctaatttctgtattttcagtggaggtggggttttgccatgttgcacagactggtctcaaactcctggacttaagtgatccacttgcctcagtctccgaaagtgttgggattacaggcatgagctagcatgtgtgtatatatgtgtgtatatatatatacgtacatacatatatatatataaatatatatgtatataaaaatttttaagagacaggtggctgggtgcagtggctcacgcctgtaatcccagcactttgggaggccaaggtgggtgaatcacttgaagtcaggagttcgagaccagcctggccaacatggtgaaaccctgtctctactaaaaatacaaaaaatagccgggcatggtggcacatgcctgtaatcccagctacttgggaggctgaggcaggagactcacttgaacctgggagacggaggttgcagtgagccaagatcacgccattgcactccagcctgggtggcaagagcgaaactccgtctcggggaaaaagaaaaagacaggcaccctgttgttgccgaggctgcagtgcagtggcgcgcgtgatcactgttcactgcagcctcaaactccagggctcaagcaatccttctgcctcagccttctgagtagctgggactataggtatgtgccactgtgcccagctaatttttaaattttttgtagaggcagggtcttgctattttgcccaagctgttcttaaactcctgacctcaagtgagcctcctaccttgacatgtcaaagcactgggattacaggtgtgagctattgtgcccaaaatctaaagtccagattttttttactgacccatcttccacctcactcatcccctcttcatttgtgtccaatctgctgtttagcccatagattgagttcttaatttcagttataattttcagttctagagtctgcttaattccttttactattctagttctctagtgaaattttttccttttgtcaagtatatttttgaatagttgacatttgcatctgataactctattatatgggtcacctccggatccatttctgtttttcttttttctctaggttcatttgttgataacgcccatttttgtttttttaattgagtcagacattatgtatgaaaaactgtagaaagcgctgggtgatgctgtcttccttcagaaagtttccctctgtcatctggcacatgcccagagtagggacagatcatctcagctcagtcagggcctgggtgaccagaggctgggattcagtcagtaagcgtcagttgaagctgccttcccccaacctcctgctcctggtgtaaccatccgggggttccatctgaaaccctggagtgtttcccagggcccctctttcttggcgtgtcctggagcccaagttttgtctccttaacgccatgagactactgaaagcccagcttctcggccaggtttgcagagtgttgggctcatttcctgtgtctcccttttctctgggatcttggccccttaagtcctggctgactgtcaggcctgtacttctttttgtctccccagacccttggggctttctagagctctgtagcctctactttctgctgagttttcttcccagttatcagtgtactgcccccaaatccttccaaattgtcaaatgcactgacagaaagagtgggggctctgaatagtggactcacctcagtgggcctctctttggtttggaatgttggtcccttcatttgtggctgccttggcatctctttgatgcctgcagactttcaagtcatactcaccttttctagtttttggtgggttgccgggctacaggccaccccgcgtatcactgaaactggagctgaagcgggcgtgctctctctgtctgcagcatatgcggagtctggagacattggttatcattacttgatagggagcatacagaacccactcacctcgcttaggctaccttgtccagtttcttttttttttttccagtctgcttctcatgacattgtccagtttctaatcagaatcccccatttgcccctgcccagtcacttaaccacttaaagacagtagagcaagtggcctgcccagcgggagacacagcccttggcctccaattcccgtcttggccactgtgtgggctgttccaccctgctgtagtctctactcttccccatgccctgtgtcagaccgagggagggtttgtgatgacatatctggcagtggcaaagaaggaggctagggaggtaggagaggttgtgtgcgtggtgtttagtcttactttggagatggggtcttgctgtgttgcctaggctgatctccaactccagggctcaagccatccttctgccttggcttcctgagtagctaccactacaggcatgaaccagtgtgcccagctacctaatgtttattctatgacttgatcccatgtatgtttcctttttgagtgctgattttttttttttttttttttttttttttgagatggagtcttgctctgtcacccaggctggagtgcagtggcgtgatctcggctcactgcaagctccaccccctgggttcacaccattcttctgcctcagcctccccagtagctgggactacaggtgcccgccactacatccagctagtttttgttttgtatttttagtagagacagggtttcaccatgttagccagaatggtcgcgatctcctgacctcatgatccactgcatgccttggcctcccaaagtgctgggattacaggcgtgagccaccgtgcctggctttttttttttttttttttttttaagaaggaattttgctcttgtcgcccaggctggagtgcaatggtgcgatctcagctcactgcaacctccatgtcccaggttcaagcgattctcttgcctcagcctcctgagtagctgggaccataggcgtgcatcaccatgcccggctgatttttgtatttttagtagagacggggtttcaccatgttggtcaggctagtcttgaacttctgacctcaggtgatctgcccgcctcagcctcccacagtgctgggattacaggcatgagccatcatgcctgaccgactgaccgagtgcttttttttttttttaaagcaaatattgcctttgggcttctctctaatttcattttaaagtttcagttgcattttcaaatggagattttattttaaactggagtgcagtgatttttacagtctttttgaaagcaacaaatgagatttttagaagacctcttgcttgaagaactcttttgtgtgaaacctagaagagagactgttcacctttcattgcaggtgaggtcccaaattttgccagtctctctcccaatctgccaatccctgaagcagggggtacaaaactcagaagattctaaggaatgaggtcttcaaatcaaatccaaacttagtgaaaaagaagtctacctgtgtcaggggtgttccctgtcaaagtgatgggtgagcttcagctggttgcagtggaaggtgtgctggatggattgaggaggcgagagggtgcaagacagcccatttaggaggcagttcctgcaatgtgggcatgaagtgttacagcccaaactaggatgctagaatccgagggcagagggcagtagaaaagaacaacctggcggaattgtgtaggactagaggatgacagccgagtggcagataccagggtcaagcttgcggggagaagggggacgggggtgggggagagtaaagaggagacgctggtgtttggtggtgttgagaggtatttgtggttgtcacagctagggcagggatgctcctaaacattctgcagtggagccccctcaacaaagaattatctggccccaaatgttggaagtgtccaggtttaggtataaagaatcagaagcttttctcaagtattgctgttaggttggtgcaaaagtacttgcggattttgctttacttttaatggcaaaaaccgcaattatttttgcttcaacctaatatgatgcaaaattggctacaactgtaatttgttgagtgctgcaaacaaggtacttgctaagcttaactttagtgaacaaattaggaagaattggaataaggtaaaactagctaaatgactcttccctgagaataaatactaatgactgccccttcagatggtgccccctcatctgctttactgactgtttcttagtagtagttggcaaaacacctcttaaaataccatacttgttttcatcgtctttggtgtatgaaatagttgaatatatcctttcagaataatatttggccatttacatctctcttttgcacacactgaatttgccatcttgtcttcctgttcctacacctttaattgtcagcaaggagacagagtccttcctcctattttgttgagccctgtgtgaatattaccgttctaggctcctgcagtcagtggtagagacagggtctctgcctgcagaagactttcacaatatacccatgctcaaagcaggtgcaggttgcgagacacatccagatagaatgaagtggttcagaagaaatccatgatctcgactgagtggggtgggctgccaggcacactgtggtccagaaaggtgaggctttcgaggggattggcttagagctgagggatgaaggctaagaggaaccaggtatgagagctttcttggcggtggggctacttgagcaaaggccagagcaagggagagcttagcatttagctgagtcaaagctggggtctgtggccatggttacttggcctggagggaagggaagagtgaacatggtaaggttggctaggtaggttgggatgggatcagacagaggtgaagacttgcttgtttttgttttaagtaccttagggcttcagtactttgcgtgcatcgtggcctcaggggagggaatgatgtgatttagctgcgttgttatttatttatttttatttatttatgtatttctttatttaagatggagtcttacactgttgcccaagctgtagtgcactggcatgatctcggctcactgcaacctctgcctcacaggttcaagcgattctcctgcctcagcctcccaagtagctgggattacaggcgcccgccaccgtgcccggctaatctttagtagagacgggagtttcaccacgttgcccaggctggtcttgaactcctgacctcaggtgatcctccctccttggcctcccaagtttttaaaagatcatgctatgtggataatgagctggggatggagggaagaatggacctagggtggaaaccactggttagagtagagccacttcaagtgcatgggtttgggctataaagttagtgctgtgagcaaaaattaaaaactcttgccgggtgcggtggctcatgcctgtaatgggaggccgagatgggcagatcacgaggtcaggagttcgagaccagcctggccaacatggtgaaaccctgtctctactaaaaatacaaaaattagctgggcgtggtggtgcgcagctgtaatcccagctactcgggagtctgaggcaggagaatcgcttgaacctgggaggtggaggttgcaatgagctgtgatcgcaccactgcactccagcctgggggacagagtgagactctgtctcaaaaaaaaaaaaaaaacctcttaacatcacccatcacataaggcacagaacaatgtgtactttttaattatcatatacataaatgcatactgttttcatgcagtatacataatgtttatgtatatagtgtatacatgaatgtattcaggtattttgagtgtctgtatgtggcatgcaccgttctaggtgctgaatattccataggtaaaaagggttatttagcccacatttttttcgttgtatgaagagaaatggaaaaaaccaaacttacatagttcggtttgagcaagttaaatgcatggatgatgtaatgtgggagcactttccacttttcgttgatgtttgtgtaggcagaactagggaggtggttttccttgggagtttcagctgcccactgtactcctccactcttggccactgtgcctcgcaggtgccttacctgactgccatgctgtgtactttcatttgggcaggctttgggctccttaaattcaatattggctcaaaccatctttcccccgcatccgtaccccatcctgtgaacggtagttttctacgtagtcaggtggctatgtctcttcttttcttttgagatggagtctcgtcctgttgcccaggctggagtacaagggcacaatctcagctcgctgcaatctctgcctcccgggttcaagcgattctcctccctcagcgtcccaagtagctgggactacaggcacatgccaccgcgccctgctaatttttgtatttttgtagagacggggtttcaccatgttggccaggctggtcttgaactcctgacctctgatgatctgcccttcttggcctcccaaagtgctgggattacaggcgtgagccactgctcccggccctatctcttttctgcgctaaccttatccttctagtctccaggacctgtgggatggacctttccatctcttggaggttacccctgaggcccactgactctcagacccgaaccctttgtcttcaccgggttgactcccatggcccctgttctggagcctctctgcagtatcttatccctttttgcagcaagatctttctttctttctttttttttttttttttttttgagacagggtctcactttatcacccaggtggagtgcagtggtgtgatcgggctcaagcaatgctcctacctcagccttctaagaagctgggactacaggtgtgcgccactatggttggctaatgttttttctgtgtgtgtatacacacatatatatacacatatatatacacatatactatatatatacatatacacatatatgcacatacacacacacacacacacacacatacatatatgtaattattattattttgtagagcaggggtcttgctatgttgtctaggctggtctcgaactcttgagctcaagtgattcgcccacctcagcctcccagagtgctgggattacaggcgtgagccaccacgccgggccaagatctttctaaaatgcatgtacagctgcctttcctttgctcagaacacttgagctctccattcctcctcgggctgaagactcctgtgtcatcacatcctggcccagcgcctccctgctctcccagttgtggatagttcctcacttgcagactccttttttttgtacaactttgtaaataagccgttgtctgagattaggcctttcttatcttctacttgccaacttcattctagctacaaccaagtaatttggtgcagctctttcagcgatccggttttgccctgtgtatactgattctcaaaaatgcccatattctgatgcagtggtttgacttcagctaagtttttttttttttagtagatacaggagtctttatgttacccaggctggtctccaatcctggtctcaagtaatcctcctgcctcagcctcccaaagtgttgagattacaggcatcagccactacacccggccttttttttttgttttttaaaaaatttgtttttagagatggggtttcactctgtttcctaggctggagcgcagtgacacaatcacagctcaccgtattctcagcctccctagctcaggcagtcctcccacttcagcctgttgagcagctgggaccacgtgcatgtaccgccacacctggctaattttttgttttatttttgtaaagatgaggtctccctatgtgccccaggctggtcttgaactcctgggctcaagtgatcctcctacttggcctcccagagtgctgggattacataatgatgttggccctaacaacttgtatggttagatttttaaattcaggcgtttataagagttaaagtctaagtgtgtataggtcccactgcgctggggctcaacatctctcacttgctctccagccatgcctcatctcacctctgcttttttttttttttttcttttttgagacggagtcttgctctgtcgcccaggctggagtgcagtggcacaatctggctcactgcaacctctgcctcctgggttcaagcagttctctgcctcagcctcccaagtagctaggcttacaggtgccgccaccatgcccggctaatttttgcatttttagtagagatggggtttcaccatcttggccagtctggtcttgaactcctggtgttgtgatctgcccgccttggcctcccaaagtgctgggattacaggcatcagccaccgcgcccggcctcccctctgctttttgtatcccttcgaggctcacaattcccagagctctccttcttggtgatagaaagtggggccactgcctgaggtgtgattgcagacctctcctttgactctttctctgcaattacttgttcctgggagaccgtcaacctcatggttttagtgtccatggtgttccctgctcaaatcacttcttcctggaagttgcaaagaggtgatttttccagctgtccgtccgtgtacagtgatgaacagatattcctgtgtgaagaagagtgttctcctttgttcactttccagctctctcagtcactgaggacactgcatattagagtcaggcgtcgtcattactccttggatgctcatattgtccctttcagattggctcctgtgtctttttgccaagaccccattagttcttgagtgcttcattgctttctggcacagaaatttgtcccaggcctactttgtacttttcctgcctcagatctgaaatcattcctctcaggagccctggttccctttagtgggaagtggcatttagaaatcagcatttggggctgggtgtggccactgtcacgggggtagcatctggttgtttttttttttttttttggggacggagtcttgctctgtcgcccaggctggggtgcaatggcgccatctcagctcactgcaagctccgcctcccgggttcaagcaattctcctgcctcactctcccaagtagctgggattacaggcccacaccaccatgcttggctaatttttttttgtatttttagtattgatggggtttcaccatgttggccagactggttttgaactcctgacctcagaactccacctgtcttggcctcccaaagtgctgggattgcaggcatgagcccctgtgcctggctgaaggtagcatcttttatgtcctttcattggacagagctagaaaaaaatgttcattaaaaaacctccaatttcatactgattctttaaaataaaagttttttccccttattttatatttacacagcttaaactgatgattttgatttctaataatattaacattgttttccttatctatgatattcataaaatgggttcagcattttaatacattgttcttacaaacaacccttcgaatgaagtttaggattccttagcaattcttttggctttagaaataaatacatcttaagaatatatagttagagtaatgggtttaaaacaatttgttgtaacataaccaaagtaattaccaatttgataaacaggttcatttgttcctatttattcttaattcagagtttgcattttataaactttttaagtagctgggactacaggcatgcgccaccacgccccagctttttaagtgttggcattacaggcgtggctcactgtgcccagccaagtttattctttttcaaaccaggtgtggtggcacacacctgcagtccaagctacttgagaggctgaggtgggaggatcgcttgagaccaggagttggaggccagcctggttaacatagcaagaccctgtctctcaaaaacacatttttttaaaaagtttattatttttcagccaggtgcagtggctcacacttgtaatcccacacttcgggaggctgaggcaggtgcatcacttgagcccaggtgttcaagagcagcctgggcaacatggtgaaaccccatctctacaaaaaataaaaaaaattagccaggcttggtggtgcacatctgtagtcccagctactcaggaggctgaggcacgagaatcgcttgggcctgagagatggaggttgcagtgatccaagatcataccactgcactccagcctgggtgatagagcaaaaccttgtgtaaaaaaaaaaagtttattatttttcaaacacacaaaacatttacatggttcaaaagaccagaactttgtaaaaatgtaaactcagaagtcttgcacctagccctgtcgcacccacctccgataggtggggtgaggacgtgtctggtttgcatggaatagtcccggtttttgcctgttatcctggagcaattagtgacagtgccttctttcactctcagaaatgaagcatagctaaggctttgttggcgcctgctaatgctaatttagagatgtggacaaaatgtttccactttgtggatttttttcccctgtagctaaaagtaagggcttggctgaatcctgtagacttggattgaggttctcttggcaggggaggtccaaccatggagttcatactcttttcacagagtctcattcttattcggaggaggaaatttcattttactctgaaaatttgggagcttgaagcatattgtacatttccaagtttttctgctttgcaaagggccaattattcctcctgcctatgtagttttaaacctttgccagtactaatataaaaattgatttcaagtagtgacatgctgaagttgttgaatcatatagaaaagttaaagttctacttgagatgaatcagtgtttctgagcgattgatctcttgaaatctcttttttttgagacagtttcactcttgttgcccaggctggaatgtagtggcacaatcttggcttactgcaacctctgcctaccaggttcaaatggctctcctgcttcagcctcccgagtagctgggattacaggcatatgccaccacgcctggctaattttgtatttttagtagagacggggtttctccttgttggtcagcctggtcttgaactcccgacctcaggttatccaccagctcccggcctcccaaagtgctgggattacaggcgtgagccaccacgcccagccgatctcttgaaatcttaaggtgctgtgaggaagctagtgcagtctcttccaccttaaaaataatttgtgggggaaacatgaatgacagccgaggtcatggtatcctacatacccttaaagagagatgtggcaggatgagatgatttcgaatagcctgagtattaatttgaatagtgtgacgtggtatttcttttcatacaaattaaaatctaaagaacttcacttgtgattaagtgtgagatcccattgatgcagaaaggcttaaagaaattccaagtaaaattttacttagcagccctgtggctcagctcattttcctccaccatagatgctgaggcgttcacactggagggcgatctcagcagacaggcattgtgctctttgtgttacctgaaggcactttacaaacaggaattcagtgcattgcccttcctctgtttctttttgtgattgatggagatctgctgacttaaatgaatagtttacttatttatttatttttgagacagggtctcactctgtcatccagtctggagtgcggtggcatggtcacagctcaccacagcctccacctctctgggctcaggtgatcctcccacctcagcctccccagtagctggaaccacaggcatgtgtcaccacgcctggctaattttttttttttttttttttgagacagtcttgctctgtcgcccaggctggagtgtagtggtgcgatctcggctcacggcaacctccgcctcccatgttcaagcgattctcctgcctcagcctcccgagtagctgggactacaggtgcgtgccaccacacctggctaattttttgtatttttagtagagacggggtttcaccatgttagccaggatggtctggatctcctgaccttgtgatccacccacctctgcctcccaaagtgctaggattacaggcgtgagccaccgcgcttggccagtcgcctggctaatttttgtatttttttgtagagacagggtttcccatgtttcccaggctgttcttgaactcctgggctcaagtgacccccctgcctaggcctcccaaagtgctggaatcacacatgtgagccaccacactcggccagtgaatagtttagaagcaggccatgtgcgtcctttctgcctgcctctgtaggtagattccactccgcctcccctgtgtggattcccacattggagcgcgggctgggtgggtggcaaggagagcagtaggtttgtgtggagcatgggcttggagccagctggactcgcatgtcccctttcccttgttacctttgtcacgttccctcatcactgagccttctgtttcctcacagtaaattagagataataatcatttgggtattttttagcaaattcgtattgtctactgtgtgtaaggtaccgtccaggggctgggtatatggatgtttgggagatagaatgagatcatagtgaatgtttattgcctctaagcctctttataggaatgagcccccactgaagcctcgtgacagtgctataaagcaggacactgttatgaccccattttctagatgaagaaattggaaactcactcaggatcccatagatattacatggtagaggctgtatttgaatccaagcagtctgactccagagttcttcaactgcatgaaaaagtgggcacaacagtatccttcagacccctctgcccccttatagtattactggagtgcacacacttatggttctttaacggagggacttgtctctcagttagatccccttccactccttgcacctactccacctttgagcatccggggcagctgcttgggcttcccctgcctgggatgggagcctagtctgagcaaggtgcctgcccatgtggcctgctgcctggtgctattctgtccccagtgttgagcgtagcctctggcacacagtagacacacacacagtgatgcatcctagaatgatgaaataatttcctaaacgggatcttttaacggttacctacctgttcttcagtggctcatctaattctgttcctagctcttccacgtggttaatccaaggcattcaaagtttcagtttttttccccttcttcattgctttttccagaaactttttcacagtgcagaacaaggggatttaagtgtgctatatgttggcttcatagcaagtgtgtgacactattgtttggtttcccatcaatcaactcttggcccatcataacgttaaaatttgctaacctgcaatttcgttggtattttgatgattacttgaaacaaatcactggaacaatagagaagcaaataaaaccaatggctttgaaacataatagagtcgcggtggcaaggccagtcccctaccccactgcctttggcacgtggtagctgctgattagcaaagtgtgagagcaggtggctcaggagccagtggcgtcttctggtctgccatcacttaatctgctggagccttgtgttacttctccacatatataaactgggtggactgggccctgtagtttaaagctttctggaagaagccagtctccgaagggtctttttccataggtaaaaccatgcagagtggctcagggcaaagtcagctgccctggggagccatttgctgagaccctcagcctctgctttaccctgccctcgaaggggtcctaggaagacagttggaaagccctaggactagcgattggatccctttcagctctctgattctttaaatactctgtagttcctgcacagttctctctctctctctttttttttttttttttgacagggtcttcctgtgtcgcccaggctggagtgcagtgagatcaaggctcactgcagcctcgacttcctgggctcgagcaatcctcccatctcagcctctcgagtagctgggaccattggtgtgcagtgcaccaccatgcccagctgagttttgtattttttgtagacacagggtttcgccatgtttcccaggctggtctcaaactcttggcctcaagtgatccttctacctcggcctcccaaagtgctgggatgacaggtgcgagccactgcacctggcctgcacagttcttttgttgcaaattgtagagaaaggtaaactttgattccagtattcacctgcagaagacctgagtgaacgtttggagatggcgaggtgatggaagttggcgagggtcaaaggagaggaacactgggaaggaaatccagtgtttctgctgaagggatatgcccacgtcctttagacatgggacagaaagcaggattttggtgtctttgaatgggggatgtaaatcctaccttgagtgtaacgaggctttgtgacaaaggcaaaaagtcaaaagggaaatggtgagaattttctttctttttttttttttaatttttatttttattgatcattcttgggtgtttctcacagagagggatttggcagggtcataggacaatagtggaaggaaggtcagcagataaacaagtgaacaaaggtctctggttttcctaggcagaggtccctgtggccttccgcagtgtttgtgtccctgggtacttgagattagggagtggtgatgactcttaacgagcatgctgccttcaagcatctgtttaacaaagcacatcttgcactgcccttaatccatttaaccctgagtggacacagcacatgtttcagagagcacagggttggggggtaaggtcacagatcaacaggatcccaaggcagaagaatttttcttagtacagaacaaaatgacaagtctcccatgtctacttctttccacacagacatggcaaccatccgatttctcaatcttttccccgcctttccccgctttctattccacaaaaccgccattgtcatcctggcccgttctcaatgagctgttgggtacacctcccagacggggtggtggccgggcagaggggctccttacttcccagtaggggcggccgggcagaggcgctcctcacctcctgggtggggcggctggccgggcggggggctgacccccccacctccctcccggacggggtggctggccgggcgaggggctgacccccccacctccctcccggacggggtggctggccgggcgaggggctgacccccccacctccctcccggatggggcggctggctgggcggggggctgaccccccccacctccctcccggatggggcggctggccgggcggggggctgacccccccatctccctcccggatgaggtggctggccgggcacaggggctcctcacttcccagtaggggcagccgggcagaggcgcccctcacctcctggacggggcggctggccgggtgggggggctgaccccccccacctccctcccggacggggcggctggccgggcggggggctgacccccccacctccctcccggatggagcggctggctgggcagaggggctcctcacttcccagtaggggcggccgggcagaggtgcccctcacctcccggacggggcggctggccgggccgggggctgaccccccccacctccctcccggacggggcggctggccgggcagggggctgacccccccacctccctcccagacgggacggctggcctggcgggctgacccccacctccctcctggacggggcggctgctgggcggagacgctcctcacttcccagacggggtggctgctgggcggaggggctcctcacttctcagacggggcggctgccgggcggagggtctcctcacttctcagacggggcggttgccaggcggagggtctcctcccttctcagatggggcggctgggcagagacgctcctcacctcccagacggggtcgcgaccgggcagaggcgctcctcacatcccagacggggcgtcggggcaaaggcactccccacatctcagacgatgggcggctgggcagagacgctcctcacttcctagatgggatggcagccgggaagaggtgctcctcacttcctagatgggatggcggccaggcagagacgctcctcactttccagactcggcagccaggcagaggggctcctaacatcccagacgatgggcggccaggcagagacgctcctcacttcctagacggggtggcggccgggcagaggctgcactctgggcactttgggaggccaaggcaggcagctgggaggtggaggttgtagcgagccgagatcacgccactgcactccagcctgggcaccattgagcactgagtgaaccagacactgtctgcaatcccagcacctctggaggccgaggctggcggaccactcgcggttaggagctggaggccagcccggccaacacagcgaaaccccgtctccaccaaaaaaatacgaaaaccagtcaggcgtggcggtgcgcgcctgcaatcgcaggcactcggcaggctgaggcaggagaatcaggcagggaggttgcagtgagccgagatggcagcagtacagtccagcttcggctcagcatcagagggagaccgtggaaagagagggagagggagaccgtggggagcgggagaccatggggagagggagaggagggagagggagagggagagagggagggagggagggggagggagggagagggagaggagaattttctttatcacatttgtttctttgcttatggagaggattgcttgttaatgtggtgtgatattgaggttgtgtgtaagagcatggcctctgggtctgcgctgtccccttagctctccgctgctcactgtgagacgtgcctcacagactcgtggtgaagatagttaattcatgacgctctcagaagagagcctggtatttaataagcattcaataaatgttagtcattcttctgatagtcattattgaatgggctaaagaagtttggttttggcaaagaatgcttttccctgtaattcccaaagttaattgtgatcaatagaaaacaaaaccagagaggccgggcacggtggctcacgcttcaggctcccagcactttgggaggctgaggtggaaggatcacttgaggccaggagttcgagaccagcctgagcaacatagcaggaccctacttttacaaaaaatcaaaaagttatttgggcgtggtggtgcgtgcttgtagtcccagctactcaggaggctgaggcgagcggatcgcctgaacctagcaggttaagactgcagtgagctatgatcataccactgtactccagcctgggtgacagcaagacttgtctctaaaatgaaaaaaaaagaaaaaatgaaaaaagatgtaaacaatatggaaacatatggtgtccacagtaacagtctctccttgtactcagtgtgtccacagtgggtgtattgtctgaagggtgcattcatgtgtgagaagaatggatgaaattcaaaattactcatattcaaaatatgagtaatgggtaaaataagcctgctaagtcaaagggcttgttacacactacctgtgtgatctgcacagaaaaattattgtaaggattctgactgggtcacagtgtctctgggaaggtggagaaccaggtttggaggacactggttagccaggccctgctagccgggccccatttccccgtaatgtctgtgctccgaggttgtcaccagcagatgcaggagaggctgggagagcaagtttctggtgctttcagcccctcgtctgggccacttgcttttcctcaagagtggaccatttcccatccataggaagaggctcagatgctgggtggccagcatgcctgacaaatggcaacagcatgataaaacccttgacagctgtgcctcgagatctgaagagagcagtttcgcattcgcttacatggtggtggtaatgctccttccctctagaattatcaggaaaaaatgccatgtgattctctcctctctgctctgactttcctctagaaagaaaaaagaacacatattgaatgaaaatccaaatcagatgtttgggtttccttccttccgtcaacttttctgttatatcactgcccatgttacttttattcctgttcctgattattccatttcaaggagaaaggttcataaacaagaaatattgcctttttggttgtgtgtagtggggtgctgagctgagtggtagaaggcctatgcaggaggcagtagtgggtgggtagaataaaggttttacatcggaaagaatctacattccaaggttgttttcttgtgcaaaccatagaaatacttgttcctgaaacagtttgatgatgaattaggagactgcttaaaagcacattcctgtagatagggtctgggtgcttttcacaaacccatgaatgcctggcactttcttttttgtgttccccaaactatttttactataaatggttgttattaaaaggcccaggtgctgccaggaagtgacattttctagagtgtacctagaagtgttcatcccagaacctgttcattaaaagacttccaggctgatctgtcccacggtgctggcctgaaaacatcagctgctgctcagagggcttccctgggctcggggaagagcttccctgcctccccaccttagagtgctggttctcctgtgctgtgactcactatggggattgctgttacattcatctttacgattctcttagaagtttacagtgatactgcataaagagatacggacacttaccatagtaagttacagtcactttttaaactgtcagtaatttagagggtaagtgtctagatacagttattctgtcatcattgaacaattttaccatgcctttttatttaaaggaacatgttctgggccgggcacagtggctcacacctgtaatcccagcactttgggaggctgaggcaggcggatcacttgagctcaggagtttgagaccagcctgggcaacatggcaaaaccccgtctctactaaaaacacaaaaattagccaagcgtggtggtgcacacctgtagttccagctatttgggaggctgagacaagaggatcacttgagcctggtaggttgaggctgcagtgagccaagattgcaccactgcactccagcctgggcaacagagtgagtctccgtctcaaaagaaaagaaagaaacaggttctgggtaggccttttgttagctgcagctttagaataaaatggttttctttttcttacaggggtcagacaccataggataaaatgttaataccgtgcttctgctgacatctctctgtttactactcaacactggcaggcattagggatttcttttcatgttaggtaaacccctgtgaaaagaatcaagggaaaggtagcacttgctatccacaaagatactgttctcggacagttactttcatctgaacaaaccctctcctcggcccctccagcagcctttatcgtggggtcttcttcccttctggatgctccggggacctcagccctgtgttttgtgattgtttcagacgtgtccattgggtgtcctgctgtctctcctgccagaactgtgctctccttcccttccaagtcagcattgccctctgcctctcatccaagcttcgctcttggcccctctgctcccctgctgccactcagaggctctgtcaggggtttctttcctgatccccctgatacacactcgcctttgatgttctcgtctcagagccgggacctcggtgcctgtggtccaggctgtgcttctgcactctccctttggagtccacccagcacacttgccacagccaccagcctaacctcagccatcgctttgggagggtttgttcagtgtctgtctaggcgcaggaacagaatctcgacttgcttagcccggctaccgactccgtgttttggctccctccacctaccccacagatctccctccatcagtgccagccatgccctctgccccttccacccgccccacagatctccctccatcagtgccagccatgccctctgccccttccacccgccccacagatctccctccatcactgccagccatgccctctgccccttcccataggcctggactcccttctcctgagatgtcccgcagactcctcttcattaccatgcgcccctcaaagccaaagtcaagcctgcatggtttcttctcactcctcataggtgctttttctccgccagttcctactgggattcaggggcttggggctgattttactatttattccttttatgtttactcaagcttttatttttttaatttttatttatttattttgagacggagtctttctccatcatgcaggctggagtacagtggcccgatctgggctcactgcagcctccgtctcctgggttcaagcacttctcctgcctcagcctctcagtatctgggactataagcatgtgccaccatgcccacctaatttttttttttttttttgagatggagtctcgctctgtcgcccaggctggagtgcagtggcgtgatctcggccctctgccagctcccctcctggtttcatgccattctcctgcctcagcctcccaagtagctgggactacaggcgcccgccaccacgcccagctaattttatgtatttttagtagagacagggtttcaccatgttggccaggatggtctcgatctcctgatcttgtgatccgcccgccttggcctcccaaagtgctgggattacaggcatgagccaccgcgcccggcctactccaacttttaaaatgctaccggctttaagaaaaacacagatgaaatattaggatcaagataagccatgagggggcaaaagaaaccaccaaaagataccctgggaggtgaggccagcatgattctctccatttaaggtcatgggtttactgtgtaaacaggcccttcatttttactaactgctgcaatggcagtctgttgttttctgcccagtcactccttgttccctctcgcctacatacctgttagaagttttgggtcctctgcgtaccaattttctgatcttggccaagatagttcacctctaagactgttttgccatctataaaatctgtaaaatagagatactacttattacccaataagtagacttgatgagaactaacataaagtatctaccatgctagcctgcacaaagtagacattcatttgatgtgaggcatgtctctgcaaaccactcaacacagcccccaacacagggaagatggagagaactcagcttccctgcgcacttggttttggtcctcaccatggtatcttcccctgaagataacatctgcattgggctgcgagtcccaagccacttactagctgagtgacctttgtacctctctaatctgcctgggtctgtattctaatttgtaaaataaggtaattatgagtgccttactgggttgctgagagtaaaatgtgataaaatatatgaaagtattttgaaaatcataaggcattagacaaatatagttattgcagtttacatcttttgagtacctagcatatagcaccttagaaatatttttttgttcaggaaagtgcttgaattaataggggtacttgttcttaagcttatatgtctatttagtaagcttaatagaaccacagagaggaaattcttaataaaggaccttcgtttacagttgtgtatctgaatctttggctcattttgagatgccttcttgttaaagtagagggtgaaaccattcatagagctctcgtcagactgctttgccagacgcagtacgcagcacatgaatgtttcacgggaccaccgtgcagtaatgtgagctgtcagtattactcagttaattccatatgcagtgaccgtgtgaacatggctgctttgctcggttccttgttgtggcttggggttttaacagtgatgggcacagcctttcagctgggaagcatggagtctaagtggactcacgaaagtgcagtgaagcggtggctgtgcagtggcacagtagacagaatccagcatagcacaggaaaggagctggccaggttgccctcaggggccagaagagccttcccagaggagggggaatggttgaactgagggttgtgaggtcccattcagcatcaaggggatcgtggggatggcagcagtgggaagagaggctcgattggaggagggagcagccagcagcttcgtagggtggggcagccacactggtccttagaggggatgcttccccagggagcagtgggagaagggtggctgaccaggaaacaggaaaggcatggagggctgtgagctcacaggaaggtggctatccagggctggagtgcattctctgagagcctcgtgggaggatggagatgggcagtggagtctgggcgggcagagggagcacactgcggcaacagagctgtgagctggagacagggcacttgagacgcttccttggttgacaataaaccctttctttttatcatttctgccagtcagttatgtcgttttctggtaggcaatgtcatgcttgttaagaaaactgcatgagacagaatcaaaagctttaacaagtccatttatatttatacattcagccttagctgtatggtctcgaacactagagtgttgtgttttcttgactcatcagcagaatatcaggaatgtaaatgtaaatgtagccgtagatactctcaacaccattttttttttttttttttttaaagacatgtgatcccagtatgttgcccaggctgatcttgaactcctgggctcaagcaatcctcctgcctcggtgtcccaagtagctgggactacatttgtgccaccacaccacaggaagaaatccctaataaggcgtctttcagttacagctttatacgtagacctttgattcctctgagatacctgtttattaaattagcaaacttcccaattttgacctgacatctctaagaccatgtcacaggctgaaaggaaagtggcagcccagttttccttggtcttgcgtatgctgaggcttgagttttcagttgtggtctcccatgtctgttaaaacactggccagcgttctcagttggcgtaccttgcattctttcagcattgcactgtggttctagaccccggtctgacgcagtgtcgggcagccctaccgcgtgttcgagtgctgctcttcggtagcacttggtctagcagaatataccgagtcctgtctgcagaaccttgacaagtcttggaaagcggtctcagaatgcttactcacacacatctgggacatttccaatttaataaatgtcacggaaaaagtttggcagattgtttaattacatgtaaaagctgcttgtggctttccttgctaatatgagcctgaaaaatgctaactacaattgttatgaaatcagggaaagcttgtgcataccctaaggtttttctggagaattgcttacctgtgaactctaaagccattcctgagcggtgccaagtgtgatattgtagcataagaagagatgtacatttggtctgtgccctggcccctggcacagagcttctcaagctcctggactctctggagtactgagagtgtccttatgtgctgatcaggtgactggtgactggctaccccctaggtagcctcaaggtaaggactggtaactggaggcctggcacggtggctcatgcctataatcccagcactctgggaggctgaggcaggcggatcacttgaggtcaggagttcaggagcagcctggccaacatggtgaaaccccgtctctactaaaaatacaaaaattagccaggcgtggtggtgtgtgcctgtaatcccagctactccggaggctgaggcaggagaatcacttgaacccaggaggcggaggttgcggtgagctgagatcgcgccactgcactccagcctgggagatagcgagacttcgtctcaaaaaaagaaaagacaaaaaaaaaagaaaaaaggagtggtcactggaaagacctaggcaggattagagggttaggactttgagctccatgccctagcttctgtttgaaggttgggttatccagtggccaatgatgttaatcagtcatgcctatgtaacaaagcctaaaaccctaaaaggataggattctgggggctctgggttcctgaacatgtagcagtttctggagggtagtgccctcagagggcatggaagctctgcaccccttcccacatactttgccctgtgcatctctccttctgctgttcacctgggtcctttgtgatagcctttaaaaaaaaaaaaattagagatgggatctcactatgttgcccaggctggtctcaaattcctggccttaagcagccctcccgtcttagcctcccaaagtgctgggattacagatgtgagccaacatgctcagcctgtgatatcctttataatacatgggtaaatgtaagtaaagtgctcctctgagttctgtgagctgctgcagcaaatttaattgaacccgagaagggtatcatgggaaccctgattcatagctggttggtcagaagcacaggtcacaacctgggacttgtacttggcacctgcaaaggactgggggagtggtcttgtgggactgagccttaccctgtgggattgatacactctccagctggacagtgcagaattgcatggaattagaggcacacagctgcagaactgcatggaattagaggcacacagcggcagaattgctttacacccccgacatctggtgtcagcagtggtggtgtgtgtggaagtagggaaaacactttgatttttcctatcctcattagccagggaggtcagcaccccctcattttactagagaagtggggatgttaatcaagtgccctgcccttctcaagttcaaggtgcctgagacactggcacccctcctgtcacctgcatatatttacttcatgttttgattgtcccatcactgccagcatcaccaggcatgaccaccgtgttccagagcatggtggcagtttgtgagtgacagagtggcagccagtggcctagtgtcccgcaggcagagcagactctttgtttctccaaggcaaggatgtggcagtgccaccaaatggtcgtgtcaattgatgcccaaatggctcaccaaaagctgagtgacagttgccacagcaaaaaaaggggagaaaacataggttcagaatttcttggaaatgtttgaaatgcatgtgatagaactctaggtgggaaattggcttgttagatacagtaacttagcatgcaactagagtaaacagtttgacctaccaacccaccgactcatctgtttattttacttctttttttttgagacaaggtctcactctggccaagctggagtgcaatggcatgatcacggctcctgcagcctcgacctcctgggcttaagcgatcctctcaccacagcctcctaagtaactgggactgcagaggcacaccaccacgcctggctatttttttaatttttgtagagatgggttttcaccctgctgcctgggctggtctcgaactcctgaggtcaagcagtctgcctgcctcagctcccaaagtgttgggattgcagacgtgagcccctgaggctggccccatttgtttgttctaataaaaatgtaggactgaatttgactcacagttgactaatttacattctaaagtggccagaaaacttctattggtagtttccttcataggaaaattgggaggttctcactcaaaattggcttatatttgggcatatgttaggatacatgtaatgtttaagtaaaagtaatactttgaatatcaagctaactagtgataagtttatggttatttatactgttaggtaatagggtattttaatctaccccttattgccatggggaggtttaaaaaagcaaaattcaaaacggagaaattgtgctgacatttgaacaaaataaatggattatttttcaagtaatgttttgtttttagaaatagtaaggcagccctcattttgcatggtggtactgtgggactagaaaaatggccttttggggcaaactggtgcaaagtgacctttttcttttggagtaaaacatgcacgcacacatgcacgcttacttgcgaagcaatcttaatcgtcaatggagaaatggattgcttgtgatctttaatttttttttttgttaaggcacaaaaatctcttactgtaaattgtaaacgtataggggagtgacaagcagtaaaacattgattaaatacactgtaatttataacattaaaaacattgatagttaaagtacgtaaccctttgacgcagcaggttcatttctaagtggatagcttagagcaatctggtgtctccttttaatagtattttaaattataatttttatcataaaatgacattcataaaaaaaccctacctaaacacataattttagaaaaatcaatacaatgcctcaattgtgatgtaaaataaataaggggaaattagtttacagtaaaatgttttgttgtataaatgcttgggcatgacaaccctagaaggcataaggcccgatgtgtgtactttctgataacgaatgtttggctttaagagaagattgtcagaagctattacaaagaagaatatagcaacacaaaagaagaggtgactctgctggataaaaatgtgttaggataggtaaaagcagaccagtcatttatacgtaataagagaaaaggtaaataatgaagttagagataacatgccattcatattatagattgtcacctggagaaaatgaggaagtattataatctcacaaaaaaacccctgagccttctttgtttccagtgaaacgtcagaatccttccctgggtcatgacagactcagaggagcaacagggtatcacagaaaacatattgcttcccacctctcccagcagatggccagacatgcacccagttgagtacatgaagagattttggagattcctgtatgataggcaatggcgaatggagaatggatctgaaaaaagggaaaattaacctcaaggtttaataacacaccagggtggtaagccacaaggaaacaagcattttattatgttgctggcctactggggataatttcgcagtatcttttaaattacaaattccctttgacccagaaattctaaggttttatcttactggtatagatgcacaggtatagaatgatgtatttacaaggttattcattgccatattatttgtaatcgcaaaagattggaagcaggaacataaacctcatcagtagttgaacagttaaattatgattcatattctttgtatgccaggaagctgtaaaaagggaggaggatgttatgcaccgatatggaaatatccttaactgaagaaaagcaagggcgaaagaatagatttgctcatatatgcattaaaaaatctctagataaacaggaaaggcacaactttagttacctactgtgtggaagagtgaacagggctgaaagggagatttctctatatacacctttattactgatccaaaaaaattaagtactttttctaaaggtgtgtgtaaaaaaaaagaaagaaaaaggtctgttaggctgggtgtgatcgcccctgtagtcctagcactttgggaagccatggcaggaggatcccttgagccaggagttcaagaccaacctgggcaacatagacagaccttacctctacaaaaaaaatttttttttaaattagctgggcatgatggtgtgcacctgtggtcccagctacttaggaggctgaagtgggaggattggttgagtatgggtgttcagggctccagtgagccatggttacagcacggcactccagcctgggaaacagaacaagactttgtctccaaaagcaaagaaaaaagctctgtcctaatcccctttcctttgctgctgctaccactgtttttaaaccttgttagggccaaaatgtatttagaaatatgggttatacactgaccttagtgatggcttatttatttattttgagatggagttttgctcttgttgcctaggctggagtgcaatggtgcgatctcggctcaccgcaaccttcgcctcctgggatcaagcgattctcctctgtcagcctcctgagtagctgggattacaggcatgtgccgccacggccagctaattttgtatttttagcagagacggggtttctccatgttggtcaggctggtctcaaactcccgacctcaagtgatctgcctaccttagcctcccaaagtgctgggattacaggtgtgagccaccacgcctggccagtgatggctttagactgtcaagttcaaacaggcattttctgatttcatgctttgaagacagtttatgattcattgattttttggcacatgcataggtctattaaatatttgaaattgaaaaatattttatattcctgtaagcatgatcaatgccaaaagtcacatacttgctctattgggaactttgaaaaatactataaatataaactggatgtcatatgtttgtattttgttattttctagtgttttaaatgtatccgaaactcttaagtgaatattcttttaaaaaattgatcgcagaggctgggcgcagtggctcatgcctgtaatcccagcattttgggaggtcaaggtgggaggtttgcttgaggccaggagttcaagaccagtctgggcaacataacatctcttaaaaaaacaaaacaaaacaaaacaaaaaaacccaacttgaacattgtggtgcacgtctgtagtcctagctacttgggaggctgaacctaggagttggaggctgcagtgagctatgattgtgccacttcacttcagtctgggtgacagggcgagactctctcgaagagataaacaaatgtaagaataaaaaggtgattgtagaaggctttcatttctgttggaatcaagggtttctgccctttatttatttttattttgttggtttgattctgcccctcccctcaggctgtttaaacatgttaattagaatgtattttctttgggtttttttttactaatatatacttgaattctgaagtatatgaaatatacattctcagtaatatttcaggttgttttgaaacatacatgctaacttttttttttttgaaatggagtcttgctctgtcacccaggctggagtgcagtggcgcgatctctgccgaccgcaacctccgcctctcgggttcaagcgattctcctgcctcagcctcccgagtagctgggattacaggcatgtgccaccacacctggctaatttgtatttttagtagagacgggggtttctccatgtcagtcaagctggtctcgaacttgcgacctcaggtgatctgcccgccttggcctcccaaagtgctgggtttacaggcatgagccaccatgcctggctgctaatatttttaattgtcttgcttgcttattctatgcaattatatgtgtttaagtattgaaatgctaacaacaaccaaagatagtttggtttgctcttagcagaatgataaaagtacaggaagcaaaacttagaaactcccatgaaaaaatcccagttttgcctaaaaaaaaaaaagttttccaaaaaataaaaaggaataaaaaggagtggagctaccatatgctacaacatgtccgacccttgaaaatactatgccaagtgaaagaagccaggcacaaaaagccacatagtgtatgattccattcctgtgaaatgtccgaaacaggcagatacacagagacagaaagcagattggtgggtgcctagggcggagaggggagggagggtcggtggtgattgctgataggtatggggtttttttggggggtgacgaaaatgttttgaattagatagtggtaatggtaacacagcattgtgaatatactaaaaaccactgaattgtacacttaaaatggttaggatggagaattttatgtgacctttatcttgacaaaaattttaaaacataaaagcagtatggtcataaattttttgaatgtatattcacatcagtatttcagttactatgaagtaatgcaactcccttcagagtcaaaacaaaaaacaagttaaatcattaaggataatatagtttcagagctgacggaccagatggattataaattgtgtttattataaagtggctggcaatgccactgtagctggtgaagagaccacgtcttgaattaaggtttctcaggtttgaccttcagtgatactgatttgacatttagaaacacacaaatgcaccctccttagttgctaagccagaagttaagagagaggcacagtgcatttttatttcatccatgtactttttttttttttttttttgagacggagtcttgctctgtcgacaggctggagggcagtggggcaatcttggctcactgcaacctctgcctcctgggttcaagcgattctcttgcctcagcctcccgagtagctgggactacaggtgcgcgccaccacgcccagttaattttggtatttttagtagagatggggtttcaccatgttggccagaatgatgtccatctcttgaccccgtgatccgcctgcctcagcttcccaaggttctgggattacaggcgtgagccaccacacccggccccatgtacttttctaaaagcactaagggcttttttcctctttttctcttccaaatgaaaaccccactctgtttttgttaagttcaagctgcggttggtagtggtgagctccttgtcatttaacggagactgaacgagttctggaagacaggaccaggtttgagggctaagtgctgtttgccgtccatccacaggccaaggacccagtatcgggagagcagagaggccgaggacacactggttcttaggagcgctcaaggttgttcacccttgggagcagtttgtgagcagtgaaggcaggaaggcaggccgtgagcacccaggaagcaaaggcagagaatgcagacattcttggaggatttttgttagcaaagataaaggcttcgggaggccgaggtgggcggatcacctgaggtcgggagttcgagaccagcctgaccaacatggaaaaaccccgtctctactaaaaatacaaaattagccaggcgtggtggtgcatgcctgtaatcccaggtactccggaggctgaggcaggagaatcgctgaacctggaaggtggaggttgtggtgagccgagattgggccattgcaccccagcctggacagcaagagtgaaactccatctcaaaaaaaaaaaaaagataaaggcaggtgcagggtaggctagaaatccagaaagttgtccatagactgacagtgatgagggcgtgtgtgatcattttccacttcatgcgtcggaatgcacacaactgctttcttcaaactgttaacagtactgctaagaactgaattaacagttgagatattaagtaactttattttagccatgtggcaaaaatcaaccagtccatcacaggccaaggatttgcatttgaggagcagacagagaggaggtgttaatgtggaaggggctgcgggacacctgtcgagctgctctcctgggttagagggctggtggcgatactgcctttcagttgaatggcacttttgatggttttcccatttgattgttacggttgtggaccatgggtagagtgtagctgtctttgcacacattttgtggatacataaaccaagaggaataataacttaagtgacatgtttgaggttggaagggtcagtttgtttcaaacatggaaggacagtgagtcagcttttttttttttttttttttttttttgaggcagggttcaccttgtcacccaggctggaatagagtggtgtagacacagctcactgcagcttcaacctcctggactcaagcagtcctcacacctaacctcccgagcagcagggactacaggcatgcaccaccacgcctggctattttctatatttctattttagagatggggtttcaccatgttgcccaggctgctcgaactcctgggctcaagtgatcctgcctgcctcagcttctcaaagtgcagggattacaagcgtgagccaccactcctggccgtgaattagcattttgttgtctttttttatttgttttgagacagggtctcaaaacagccttgagcactgttgccctgggcactgttgcccaggctggagtgcagtagtgtgatcatagctcactgcagccttgacttcctgggctcaagtgaggctcccacgtcagcccgcaaagtagctgggaatacaggtgcgcaccaccacacctggatcatttttgtatttttgggagggaccaggtttcaccatgttgcttgggttggtctcaaactcctggcctcaaatgatcctcccacccgagccccccaaagtgctgggattacaggcaggagccgctatgcctagctagcgaattagcatttaaaaaatatatacttcctggttccccctacaggagtgttgattcagcaaggtgaggcccaggagtctgcatttgaatcagctccacaggtggttactgtgcagccagtctgtacttcccgtcttgcctgtgccgcctcaacatcgtggagcctgcgtgttttgctaactcgagagcccaggtgtgcagtgcattatttttcctgataggcagcattctggttttgtgaatgggtgtgcctttggttccattgccatcatctgggctgcggacattgactgggttccccctgggtgcccagcactttgtcacaggtctgggcttctgcttttcagagtagagtggggaagacagctggacatgcagccgggaagtgaggaatgccggggctgggggcgggtgtgaccacctagcaaggggacctgtccatgcccacgtgggaagtagaggaggcctctgcaggaaatggcctcaagctgtgaacatcaggtaagtgggagctggtcagggaaaagtggcagcttcagaggtcagagggaacaaccgtggtgtggagggccagcagaggaacagacggcatgttgagcgagctgtagattgctgtgaccgatgtgctgtgaggcatgaggtgaggagggagacgctggagtcagaatgggcggagctgacttctagagcggccactctgacctctcttctgtgtgctcatggtgtcacctgatagagtatcaaggtctggatgagacaatccatgttaagtgcttagaacaatgtctggcagataatgcaacagaagtgtgtgttatgacttctcatttgggttagaagttattaggggggctttgggcttgaccttaagggcaatgggaagttactgaaggattttaagcaggaaagtcagagtctgatttgtttcggaaaacatagagaatggatccgagcggggaaagattgaaggcagggatgagttaggcagcttttttagtagaccaaggagacacagtggcttggataaaggaagctggggcgaggaggtagaggagtgggcagttctagaagatatgtgtgtgagggcgaatgaggggtcctcagccagtggttactgtggaggaggaggcgatgtgatgtctcagtgtctgacttggacaactggatgctgatgtccactgcgtgagagcttatgaggagttgggagcttgggcaggaagatgatgatgagctcagtgtggacaaaggtttttgaacctccaagatatcttgcctgtaatcccagcactttgggaggtggaggcaggaggatcacttgagcccaggagtttgaggccagcctggacaacatgacaaacccccatctctccagaaaattagctgggcatggtggcgcatgcctgtggtcccagatacttgggagactgaggcaggagaatcacctgagcctaggaagtcaaggtttcagtgagccgtgattgccccactgcactccagcctggatgagagattgaggtcgtgtctcaaatagaaattttaaaaagtgcggttgggcatttgcctagggtaggtgattgaagccacggacaccggccggatcaggcaggcacactgcatagggtgagcagcagaccggaaatgtggaaccccaggagcaccagcattctgtgaatagacagacaggaaacagggtgaggtgaagagatgggggtgaacagtcagaggctacccagtagatgaggactggagctggcctttgggtttagcagaggagaggtggtgagtgccatgaaagcagcaggcgctggagacaattgcagtggtgagtaaggggccaggaaacagaactgaagaccgagacaacccaggctggggaaaagtttctgaacaagttacgtgtccatgtggacaccgtgtattctggtcatgtccttgggtttagcattgtttagaaagacagaaaggaggactgatcttttttgtttttaatactaagcaatacagacttaaaaattaaaacaaaaaaaaattatcttacttccaactctcattcccaactgtagtgggtaaccagcatcagcagcttggtgtgtatctttctatattttatcttatatatacttgaaaaatacataaaagcgtgtgtttgcttttaaccaaataggatcatatggaaatgcggttctgtactatgtttttttaactcaatatttatgtggtccctaaatactaggtttgggcatacattttttcagcatgtatttcttaaagagaaactgacagggaaaataaataagatattgtattagtccgttctcacaccgctatgaaaaaataccaagactgggtaattcataaaggaaaggtttaattgactcacagttccgcatggctggggaggcctcaggaaagttacagtcacaggggaaggcaaaggagaagcaggcacctttttcactgggcggcaggacggagtgcatgcaagcaggggaaatgccagacacttataaaatcatcagatctcgtgagactcactcactatcacgagaacggcatggggtaaccgccctcatgatccagttacctccacctggtcctgccctcaacacatgggaattaggggattataattcgagattttgggtggcttcacagccgtatcagatatattggaactttaaaaatgtttatgtaatctgttatacgcaaatattgtccagtgattgaaaagccagtgctacttcagtcacagtggctttgaacatgtttagaattcagtgagatgatgagaccaaatttttataaaatttataaaaatgtgaagtttgtggtcttcttttctagtgtcctcctgtcccccttttatcattaggagtggtgcaccctgccatctatctatggactgacgggcagatagatatagatgtttattagcatacttttaatcgtggcaccagggtttcaaaacatgatttgctcattcattttaatatataaacttctaattttctttatttcaaatttgacatgcttttaaacctagactgaggcgagtagcttctactgcctgaagatcacagtgtgagctctgcatgccggtttctcatgtccttgtgtccatttattagacgtctttttgactgagaagacacaagactttgccttctgtgaagttctttttttctgtttttttttttttttttttttttttggtggtaaaatacatgtaagataaaaataccatcataaccatttttaagcacccagttcacggcattaagtatattcacattgttgtgcaaccattactgccacacatttccagaacttcctcatcttcccaaaccgaaactccatccccattaaacaccaactccctatctcaccctccccacccagcgttgtccagacacctaccattctattttctatctctatgagtttgactgctctagagacctcatataagtggaattctacagtgttttgtcttttcgtgactggcttatttcactcagcccaacatcctcaaggttcacccatattgtattatgtgtcagaatttccttcctttttttttaaatttttttttctttgagacagagtttggctctcattgcccaggctggagtgcagtggcgcagtctcggctcactgcagcctctgcctcccaggttcaagtgattctcatgcctcagcctcccaaatagttgggattacaggcatgcaccaccacgcctggctaatttttgtatttttagtagagacgaggttttgccattttggacaggctggtcttgaactccttgcctcaagtaatctgcctaccttggcctcccaatgtgctgggattacaggcatgtgccaccatgccctgccaatttcccttcctttttatggctgaataatattccactgagtgaagttttatttcattttcagcaaaaggttagtgaaatgttgaaaagcagttaaaaagcaaaacagagctattgaaggagattatagagagtaagagatgtggaattgtaacatggccaagtaaagaaaacgggaagaggaaagggtaaggggtggggcccaggcacccacgtgaggttggggaccatgaggctctgttgcccctttcccactggcgatggggctacttcgaggcattgggatgatgggaagagggcccaggcacccacgtgagggtggggaccatgaggctctgctgccccttttccactggcgatagggctacttcaagccatcggaatgacgggaaaagatggatcacttttggcaataaatgtcacatctgatcttaacttgaaattgacctgattgtggcttttgagtaataatgtctggtctatataatatgaacctgttagccagatctaaacctttcgttcagaagtgataaacatcagcattatcaggcattatgtgaaaccaagttctttagctgattttagtgttactttctgttgtctcaatcctagataatgtcaaatagaaatacatatttgcattcttcagatttatattttaaatgaaaatattccggtaattattgcatctattctatttcagaaaatacttgacactttaattattaaatagaatgtcactttaaactagtgatatatttgacttacagtatttttaaacttaacatttttttttcctaaataggaaaaaatgtacactgacaattagattcctctgatgtaataaggtagatcatttattgcacatatttggggttcctactatttttttttctgcaataataatgcaagcagtacatacaggaacatgcttttgggatcttaaactttggaatgtcccgtctaatgtttacctaaactgctaagtttaaatttgctttgatatattttcagttgttggattcttctgagcagagagaaaggtttttttctttaagtggagtaatcatgaacgtctatgaattcgttttctactgtagccacagcagtataccatagaatagttttggtagttgaatatattgggaatacttacatttaaccaaaataatagaaattccctgtattctctttggttttagaggcaaatctaaaatctggaagttgaaatgaggatagtttggggttcttaggaaaaccttagggaaactgtatgaaacagaaaaaggcttgctgctggtgccggaagagtgacagcgtgctggggggtttgtgcatgagtgaaggtggggccaggtgggagccttcctgtttctggatggatggtctgtgcagtagtaactcaggctgcatggttcttgcatcatccgagttgtgaagtgctcttcctccacttccaggtcctccttgttatgaggacttaggctttgactagggctttcatttaaaggtgacgaaatttgttcataatagacttttaaaaataaaacaccgatattccaccttcctgggaccgacagtcctaggaccctgccaccttgtcaggattcttcatctcccctactggtccattattaccctcccagccctgccagcctttcagctcccttgcctcttccacttcattgcgcttacctggcagaaaccaccccattcagtccgttctccatgcccattcacctccactgacccgcagaggccctaagtgccgccagcatctctgttagtgcatcccgccctctttcttctacgcggcatgctgcctacccgtcctctcttctagatgccatttcataccttctcctctcctatcttccccaaatgtaaatgcagaatgatgacattgtgtttgtttttttctgtgtgaaattggaagaaatcagaaaagaagttccaccaactcccaccacacctctggatctgcaccccgcaccccatgtcgtctgccctctttccctttactgcgggtgatctgtgtgccccagaaaaggtcagcctctcctcttagtcacttgacttacctgctttcagctggactcatcagttcccacctccccactggattcttgccctcactatgcaaatgtctgtctcatcctgcaaaggtctttcttgacctcatatcttctccagccactgcactgtttttcttcccctttactgcagagttccttggaagaattttctgtactccctgctttacttccactcttcccattctctttgaactcagtccagtgagggttttgacccgccactgcagcatgctgcagatgtcacagtcaccatcgatctccattccagcaagtccgaccaacaagcatcagtcagctcatttgatccactggcatcagtgaatacagttgatcatcctcctggaaataaggatcttcaaagatcttgaagggtttcctggttttcctcctcatccctgattgctcctagcctcttttgctgatgcccctcaatgagactgttgggggcttgatccccatctcttctcaccctccacccagggcctcactgacttgcatggaacaaaatgattatccccatttgcagtctctacaacacacccaaaaactccagactgtgaattgcgctcaactgtctaataaccatttcaaatttagcacgtccaaacccaaacttttacaccttcccttcaaaacatactcttcccgtagtcactcccttctcaggaaccaatgactccatccttcacttgcttccgccagaatccttggaggcatcctcgtgcctttctttctctgcgatctttgacctgtcaggagctcctgctggctctgtggtgaacaggtccagagtccctgcttctcaccacctgcggtgagcccaccctggtctgctgcataattgcagtcatttcttacccatctccccacttctggcctcaccttctcacaggctgttctgaagacagcatccaggggaatcctttgaaaacgggtgaagggcacggctcatgagaatccttacttaggctctttcttttctctaatattgattttagttcagatcctcattaatccctgggattattgcagtgaactcactgctgatttcccagtcttaatctcctccagcccgggggtagcagtgcttccagcgacctttcattgctccaacacacccattttgagcacatcccttatgctaatgactgactgagactttaccagttttgccccattttctgttcagagtcctcaaagcctgtagataaggtgatttctatagccttcaacattaaatccaggtttcatgctgtgtgctgttgttctctgaatggctgcccacttatgacctcaccggcttcctccatacacgctgcccatgccccagccctgctgaagcccttgcttatcagataccttctgcttttgtgaaagaggctctcactggctatacagcatgttcagaattcagctcaattcaagtgctgtgtccttcagcaaaccttccgagaagcactcccacttcccatcatggatggcttcaactcagctcccgcagtatcctggtcacctctcacccagagcacgtactgctctgaggttcctgccagctcgtctgtctgttctttaaagcatcctgaggagtggacaggccctgtttctgtgttgctgcagcggccagcatagacgagatatgcactatttcttgaaagaactgtaacgtccgatcgaggtggaagcactcacttgtgctttgatgcatctcccctccaaacacaacagtgaaaaggtacaatttaagtagagaaacaaaccaaaaagcatagccagcccaccaagcaagagaaatacccttcagtacacaaacagactagaaacctagcatggtaagcctgaattgactggatttcactggccactgagccgcaggctccaagcaggcagtgtcagtaggaaagtgggttcttacaggggtaagggtaacagggactaaagtgttcagtggagttagaactagatgtagctacttttttttttttttttttttgagacgctctcgtcacccggcctggagtgcagtggtgtgatcacggctcaacctgctgggctcaagcagtcctcctgtctcagcttcctgagtagccgggtctatgctactgggtctacgcatggtgtgtgccaccatgcccggctaattttttatgttttgtagagatggggtctcactatgttgcccaagctggtcttgaactcctgggctcaagcagtcctccaaccttggcctcccaaagtgctgagattacaggcaagagccaccatgcctggccttagatggtttttggagctggagttagataaggtttccccatctaaggcaattctctgctatacagattggggctctactggcagttgtggtcctagggaggtagaatgcaaggcctgggatgagccatgctattccatggttctctaccagggtctgcactgttggtgacataaccacgcaacagaatcctgcatcaccatggaaaacctagttctggacggaggccttggaaggcttggagggcaacaaccacagaacactagtgctatgggctgaatacttttgtgttccctgctctgccaaagtcatatgctcaaatcccactccctggtttcactgtattagaaggtagagcccttgggaggggattaggtcatgagggtggactccttgtgaatggaataatgtgcttagaagagaccccatagagatccctggtcccttccatcatgtgaggacatagaagctggcagttgggccctcaccagacaccaaatctgctgatgtcttgcttctgaacttccagcctcgagaactgtgaagaatgaatttctgttgtttaaaaggtaatgggagttagttacagcagcctgaatggactgagccactagacagggaggagagcaccagcaacagaaaaccttctgtcgcgatgagcccgagaccccaattcctctatgctcaaagacctctaatacacatcctcacagagctgatgccttacagagctgtgcatttactgcatcggaaatttaaggacagtctggcaaaaactgtcaaaataagtatgtttaagatgcttaaaaagataaattagcatccatgaaaacaaacaagaaattgcccaaaaggaaacaagagtaagaagatatgacccaaaaaagaaaaagaaaaaggaagaagaacttgaaatctagtaaatgaaaaggatattagccaggatgatagactctggaccagacatagtcaaagacaaaattagtggattggcagttacttcacaaaattgacccagatgacagggacaagatggaggggcacaatgataaaattcaaggtcctgaattcaggcaggcctgtagccgactctgtactttgacttgacagttatgtgccatattatggctatttattaattattattttttgagatggagtttcgctcttgttgcccaggctggaatgcagtggtgcaatctcggcccaccggaacctccacctcccgggttcaagcgattctcctgtctcagcgtcctgagtagctgggattacaggcatgcaccaccatgcaccaccatgtccagctaattttgtatttttagtagagatggtgtttctccatgttggtcaggctggactcgaactcccgacctcaggtgatctgcctgcctcggcctcccaaactgttgggattacaggtgtgagccaccatgcctggcctaataatggctttttaactgaagctagtttgagtctgtttgctttttgcctgcaagagaaataatctttcctcatgtacgaaccccttcatgagatgacagtgtttcgttaaagttagccattagatgatctgacagtcagctagagttaattatcagagatgtaaatcggtatttgatatgattaatattggcacataagaaatctctgaaacttaggaaggaaaacaaacttggtgggaggacatggacagaagaccggtctacttggcggcctctccctaccctcctcccgcacgctgcccagcccaggagcccgcttctgaatgctgcgttcgatctctgaagaggtttcagcacttacagatccttaccaggttttaagccacatttgggtgatcttcattagtattgttggcatttctttgtgtttgcaagtatgcactgaaatactgaattgaagagctattcatgttctttagctaattttatggtctcaggagcagccttgtctccaaaactcactgtataatatgtttataatgtctatatatatttaattgcaataaaatatactaagataaaacttgccagcttaagcagttcagtgaatgctagattcatgtagtggaatgtgcttgtgtcccctccccacccccgctgtgttcagcctctgctgttactccccagccaggcgcagctttggatgtgtccacagtcaccctgctgctgtcttccactctctctgaccacactcagttctgagccccacatatgtttctgttgtcttcagcagtgccctgggataattagaaaccaattcagtgaaattgtggctaattctaagaaacagtttctgaagtcattttaggagatttgttcctactctggagggctcctgcagcaagaattctccagctctccctgctgactagccagccgcagtccaggctgtgcctccattaaacccacacctccagttgccttcactaggacctccactgctcctaggtttaaagagagtgcccagggtttaaatgttagtgccctaacatttaaagaggtttaaatgtcaccaaactcgtttctccctgaatgacgcccctggtcttatggcggcagccagggccctctcagcttgtcactccagccctgcagctaccgtcttacagagccagggcacagctgatcaggacccccagtattctcagcctgccacactcaaagttgagcctccattccagaatggaggctggacagaggtaggaaggcccactttgcccatgactccactagccaggatgcagcatcagcaccacgtagctggggtggggtggaactgggggagagggcactacattatcagctgcagcagtctggaacagagtcgctgcctcactgacctggaaaggggaggcagggagcagtcttggttcaaatacaacagactctggcctttcttactgaattttcagttgtttgctgtgaacccttagaacgatctccagagtctcagaacagttgttttcttacaatgttcacctgttttccttgggagcaagcaggtcagtggagcttcttgtgctgtcatgctagaagttgattacccacagtagggattcttgcagaagaaatattactttagaagagaggctgggcacggtggctcaagcctgtggtctcagctacttgggagggtcacttgagctctggaggtcaaaactgcagtgagccatggtcacaccattgcactctagcctgggtgacacaatgagaccctgtctcagaaagaaaaaggaagaaaaggaggctaggacaggggtggtggccttctaggccatctttcctctctctccagcaactctagatcacatgtctgtgagtcatttaaaatgtcttcattcagttcatgtcaggatcctgttcaggaaaatgttttggacttctctggctgctgagaaggtggacttggattccccttctttccctgctgtccttgtcccagggtgcagggatagagggaagtcagatggtctgtcagtgttgtgatttgttagggaatctgtgtggtccattgatgccctctttctctggaggatcactgagatcccttccccataacttgtaatgaggttgcctttgtgtgaagactgtggagccttgatgaaaggctttctttagggggtctttcttatttatttaattttgttttgtgattttctaggagttcgcagcacttactaaagaactcaatgtatgcagggaacagctccttgaaagggaagaagaaattgctgaactgaaagcagaaaggaataacaccagggtgagtgtgacctttctgttcactgcctgcccctggagccactgtcaggaggaggggcggtgtgtcaaaacgaaaggacgacccactctgtctggcctgaaatacttttcataccttttcccactgagcagactgtgattagtcagcatgatcacacattaatggcttgaaatttgtgatgagaatttatgatattttaatacaattgagaggaatttgtttttctgcggaattgaagggacttcattttagtatgagactgtaaaggagttatttgccccagattcaatcatgaaattaaaaatgctgtttaacaagtctttattttggccttttatttcagctgctgttagagcatttggaatgccttgtctccaggcatgagcggtctcttaggatgaccgtggtgaagagacaagcgcagtctccagcaggcgtgtccagcgaagtggaagtgctgaaagcactgaagtccttatttgaacaccacaaagctctggatgaaaaggtgccatcagccacataagtcttggtttgtgcacatgctgtgtattaggccagcttcacaagtgttggtgtaacttttgttttttgaagcttcttgaattcttggaaataacttctctaagaagacagggttttgtaggtttaaaaagtactaattggcttaaatgtcttaaaattactaatgtatattgatttgctgttacaaattgggtagtattaggttgttgcaaaagtaattgtgggcaaaacctgcaattacttttgcaacaacctgatatttcgggggaagatttatttttctgaaacttaatttagagccattaacaagttttcttgacagtaagatcaatgacagacattaatggtattttattatgttatattacactaatatatacattaagtgtatatattacacttaactatatattaagaataaaataaacagtatacacacacacacacaaactcaaccccttttattttcaggtgagagagcgattacgagtagcacttgaaagatgtagtttgttagaagaggaattaggtgccacacacaaagaggtaagcttgagacttcatcatgagttgaattgggggggggttatttttatcctttaattattaaaagcagcataaggccagacgtggtggctcacacctgtcatcccagcactttgggagaccgaggcgggcggatcacctgaggtcaggagttccaagaccagcctgaccaacatggtgaaaccccatttctactaaaaatacaaaaattagccaggagttgtggcatgttcctttagtcccagctgctcgggaggctgagacatgagaattgcttgagcccaggaggtggaggttgcaatgagctgagattgcaccattgcactccagcctgggtgacagagcaagactctgtctccaaaaaaaaaaaaaaaaagtaaaagaagtataaggactgtagttgtacatatcacatgttacttatcttcccaattgaggaccagcctatctgagtcattttaaggactacaaaatgatggttacctaaggactcgtctggccagtggataataaattccatcttcaatgatctggttattttcggattgggtagcattgccatatgctttctcttttatactatgttaagcagtttttagttgtgtttttccaaaaggagttttgctatctttacttatttctcttatgtaaggtattttacactcatattcaattttttgctttcagctaatgattcttaaagaacagaataatcagaaaaaaactctaacagatggagtgctggacataaaccatgaacaagaaaatacaccaagcacgagtggaaaggcaagtctgtaggctttgtctttattctgtttgatttcatttgttcacagtatgtgtcgggttatgtggaaaacagttgctaaagtaccggcttagagctgaagtggtcatgaaagttgtgtaatccaacagattgcataagtcagttttgattttagctatttcctggaagtatttttattttatagctcaccaaacaagggtatttaaggatttttttttccccctatcagagatcttctgatggttctttaagccacgaggaagaccttgctaaagtaattgagctccaagaaatcataagtaagcagtcaagggaacagagccaaatgaaagaacgcctggcttccctttccagtcatgtgacagaactggaagaggatctggacacggctagaaaagatctcatcaaatctgaagaaatgaacacaaaattgcaacgagatgtccgtgaagtgagcaataacaaaaactacagtcttgtcatgaagttgtatgtttgggacgttttagttaaatgattttttttctctgtttgtctcttactctcccaattactttcaacctttggattattgtataagttatattgaaaaagagagagtgctgtgaaactgccataagctacctccccatttttgttgtgaaatctcctgtccctgagctcttcaaagtagagaactagtcccactgactgacatggccatgaagtggacgccacactggcctctcctacctgtgctgctttaatattctttaatgtccttgtttgtagattcttcatctgtgcaatttctaggctgtcttaatttgttcttatgttcagattgccttctgttgcacacatacttagcaagcagatattgatactggctgtgctagctcacgtagggcaatgtgagtatagtctcttaactgtgggagggggcgttgctggcggtcttctcattttctgacctgctccttcaaggaatttgtggcgttgaatattaatggtcaaacaatcaagagtggaatttgcttctacatgggtcatcaggatcgtatagcaaaaatatgtcacaatatactcattgctgacaaatatttctgccattataactgtgagaaactatttgatcatgaatgccgggcgtggtggctcacgcctgtaatcccagcactttgggaggcttaggcgggcggatcacgaggtcaggagatcgagaccatcctggctaacacggtgaaaccccgtctctactaaaaaatacaaaaaaattagccaggcgtggtggcgggcgcctgtagtcccagctactcgggaggctgaggcaggagaatggcgtgagcccaggaggcagagctttcagtaagccgagatcgggacactgcactccagcctgggcggcagagcgagactccgtctcaaaaaaaaaaaagagagaaactatttgatcatgaaacagtgaggctgagtgctttctcaggtgcccttcctgtcactttctaacctgcgctttgtcccttgtcaggcgcctcaaccgttgaatgtctgcttttcagtttggtagtttgacgttgagtaatttcatgtaggaattcaccacaggaagaacatttgcatgtagtatgtcacctaaggttctattctttggctacagcaggagattatgtggcagagattaatatgcagagaattttgaaattcttttaagacctatcacttttattttttaattttttattttaacttttaagtttggggtacacgtgtaggtctgttacataagtaaacttgtgtcctggcggtttgttttacaaattatttcatcacccaggtaccaagcctagttatttttcctgatcctcttcttcctcctatcctccaccctccaccctttgataggccccagtgtgtgttgttcccctctgtctgtccctgtgttctcatcagttagctcccacttataagtgagaacatgaggtattttgtttttctgtttctgtgtttgctaaagataatggccgccagctccatccatgtctctgcaaaggacatgatctcattctgttttatggctgcatagtattccatggtgtatacgtaccacattttctttatggagtctatcattgatgggcatttaggttgattccttgtctttgctgttgtgaatagtgctgcagtgaacatacgtgtgcgtgtgtctttataatacaacgatttatattcctttgggtatataccccgtaatgggatttctgggttggtatttccatctttaggtctttgaggaatctccacactgtcttccacgatggttgaactaatttaccctcccaccaagagcaggaaaacattcctttttctccacaacctcaccagcatctgttactgattgacttttccacaatagccattctgactggtgtgagatgctgtctcattgtggttttgattggcatttgtctaatcggtgatgttgagcttttttcccctatcacttgtaatatttagactttgctaactttagtcattttataaatagggaacaacttgaaaatagtgaattctgggggtggaggacaggtatttctcaagcaaaaagttctggtcctagccttaagtgtttgaaactgtatagtaatcatcttgtagacttcaggtagttgcatccaattaaattaaactggtacttctgtttccatttgtcaatatgcttgagtcttgtaattgtatgagagttcatccaacccttatcctagaaagtgagacttgtatctcactactgtgtccactgagagaggccgcaccctgtcctgtgtgagaccatttgtagcgtgaggcagacgtagactgcgtcttctttgaggacactttcacctccttgaaaaatatttagatatttgagtgtatatatttttataatattatgtagaaacaggaaagcttggtcaactgagtggccagacatagtattaagagagacaagtctttgttaatcgtataggtgaatatttatggtatttgaggtagttacattttcattcacatttgagaaaattgacatcttcatcaatttaattttgaggacattattatttatttatttatttttgagacaggatctctctctgttacccaggctggagtgcagtggcgccatcatagctcactgcagccttgaactgctggactcgagcaatcctcctgtctcagactcccaagtacctgggactacaggggcgtgccaccatgcgtggctaatttttgtttctttaaaatgtttttggccagggacactggctcacgcctgtaatcctaacactttgggaggccaaaggaaggccaaggaggatctcttgagcccaggaaactcaagaccagcctgggcgatatagtaagacctctatttctacaaaaaattaaaaattagttggatataggagtgtgcgcttgtagtcccagctactgggaagattgaggtggaaggatcccttgagcctgggaagtcaaggctgtggtgagccttgattgcaccacagcattccatcctaggtgatagagggagactctgactcaaaaaacaaaataaaatatttttgtagagacaaggtcttgaactccttgcctgaagccatcctcccgccttagcctcccaaagtgctgtgattataggagtgagctgctgtatctggcctgaggatgctaatttttaatttgattggaaatttgggatttacttcagtttttttctctcttaagtatcttaatgtgtaatcgttaattacctacttttttgtcccctctgaaatacctaatttaggccatggcccaaaaggaagatatggaagagagaatcactactcttgaaaaacgctacctcgctgcacagcgtgaagccacatctgtgcatgacctcaatgataaacttgaaaatgaaattgcaaataaagattctatgcatcgacaggtaatggattttatcgacctttgtctggctttagttaattattaatgaagttaaagaccctttttctctcactttcatgttggaaatcaagtccaaatatcaagtttttatgaccttagaatattatgttcaagacatgtgggagttccttcagtttagaggttttgattacgtaggatttgatttaaccaattttgtcctcagttttttcttttgttgtaattgaaagttaatctattgcttgttagcatttttaccaaaggagcagagagtggcaaagaacttcaaggcaattggctatttgtaactaagtgggagcactatgatacatgaatagtatgacaaatgaagtcttggtcggatgcggtggctcatgcctgtcattctaacacttcgggaggctgaggtgggaagatcgcttgagcccaggaatgtgagaacagcctgtctctacagaaaattaataaattagccgggcatggtggcatgtgcctttagccctagctactcaggaggctaaggagggaggatgacttgagccctggagttcaaggcttcattgtgctatgattgtgccactggactccagcctgggccacagaacgagaccccgtctctaaaataaaaaatgcggccaggcgcggtggctcacacctgtaatcccagcactttgggaggccgaggcaggtggatcatgaggtcaggcatttgagaccagcctgaccaacatggtgaaactgcgtctctactaaaaatacaaaaattagctgggcttggtggcgcgcatctgtaatcccagctgctactcaggaggctgaggcaggagaatcgcttgaacccaagaggcggaggttgcagtgagccgagattgtgccactgcactccagcctgggtgacacagctagactccgtctcaaaaaaaaaaaaaaggcagtgaagtctgtagtaagaaattgggtctcctgtggtttcgtaaaccatacttattcttgtaattacgagtatcactgtattccagcctgggtgacagagcaagactctgtctttaaacaaacaaaaaaaaagcttcttaaaagttatttaggaaaagcaaacactttgacaagaggtgttttgcacattgaaaccaagaccaggaaagtgggcatgtactcctggcagcaagaaaaccttacccaggccgggcacagtggcgcacacctgtaatcccaccactttgggaggctgaggcgggtggatcacttgaggttaggagttcaagaccagcctggccaacatgccgaagtcctgtctctactaaaaatacaaaaattagccagacctggtggcacatgcctgtaattgcagctactcaggaggctgaggcaggagaattgcttgaactcaggaggtggaggttgcagtgagccaagattgtgccactgcactccagcctgggtgacaaagcgagactatgtctcaaaaacaaaaacaaaaacaaaaacaaaaacaaaaacctgacccagaagcaactcccatcactgtagctcttccatcatgactctcttagtctgtatctgcatttcagtttgtttcaatctgttaaaaactgatcagctagaagatttgttgcattttgatgctttgctctcattttatagactgaagataaaaaccgccagttacaggagcgcttggaattggcagagcaaaagctgcaacagacactgaggaaggcagagacgctcccggaggtggaggcggagctggcccagagggtggcagcgctttccaaggtagtgccatgagcttcattctggttcggctgccaggcctgtgactgtgccttgcctgtgtaccttgtttgtcactgttcttattacatcagcacctaaatccgtggaagagcacggatttggtttgagtgctctttcatctgagattggaacactttgtaaatgccagacatgatccttttatcccgaagtctaccttggttttgtgagctgtatactatttgtccacggcatgtgtgatctgagagttactgcttcttagaattgttttggtcaccagcttaagcataggatagaagtctctgtaaaagaagggtagtttttctcagaaataggaagatgccgttcttttaaaaacaccatcaagataaattcttcataaacacatttttaagtaattttattattttgaaattacttaaaaatgtatttttaagtaatatttattattttgaaattacttaaaaatgtgtttttaagtaatatttattcatttgtccaacaactgttgactaggcatgtgcaagacacagtccctccaagttctccccattcatgagggaagcagctaaagaggcaaatgctgtcataggtcctgggatcggcgagtacccagggagcgcatcaccgggcacaaacccagcctctggggcgtggggagcccagcactgcagtgccaggcaggcgagcagcaggagctgaggcccctgtctgtcgtcctgagtcttcttgctcaagcttttcaagctgctggggagggcatccttctggaccattcagatggttttagggctcacacacctgttccttctagcaagtttgttgctaacagctgtaagaacctatcctcccactccatgatctgcttttaaagtctcgatttcttttctcccctgttatctttcctgtcccttgtcggctttgtagtctgaccttttgtcttctgggagctctgctgctaaggaagctaaactgttggaacttacttccaagcttaggaaggtagaatgggtgcactgctccttgcttgtgcttgccgctgctttctgctttccatgcttactaaccagaagcagtccaaggatgggagaatcacgactccattgagattgggcataggggttggggggaaaacacccagtcagtcgccagcagcagccatgcttcagaatcaccaacacaagagggctagccacctcatggcccagcacgtgaagccccgtaggctgtgttgatggatgagtacatgctttccatttagtatggcggagcagcccacgcagagcatgttgtgcctgttgccactgcagtggtatgcagcatgtcgttaatgaagtgtaaggatgacgtcagcgtacgctgtttctgctgacaggctgaagagagacacggcaacattgaagaaaggttacgacagatggaagcacagttggaggagaagaatcaagaactgcagcgggtgagcatgcagccctgagggtgggggcgctgagtgggtgctgcaaggtcattgctcggctgtggggagctcagggcctcccacccctgactgagatgttggtcctccagctcagttctggtcgcgtgcatttgttttgcaccctcatctgtgagtcgcctgctaatgcgtacatcccacacagtagttgttttcagtcagtattgggagctgcggaagaaatttgagatcctaggcagtacttcaggtgtccaaaaatgcttcttgcttgtctagcggcctatcaggggaactgttctaggtagctgtggtaccggcgtggcccccctaccccctgcaaatgtagaggcaggtccattgtcctgaatgactagtccacttttctaggatatggcactgaattcccacatgcaggtcagaggcctgacctctgtcccaggttaaaatactccaaacataatggcgtgttggaatgaatgtttctaagcaagagcaacaccgtaattgagctacaataaaaagcactaggaaggagtgtggcagtggagacttctgtccattgaatcctaagattgttttcctgaaagagttgggtggatgtcaatatggaacatccaggaaaaagatatagcaagagcagtcccagggccagctggtaccaggcctggggtttggggtagatttctctttaacaagtaggtggagaaaggaagcatgcagcgtctaattttagaactcttgcaccgtcacatcagcccactttataacattaatttaaggctactagattttgttttcaccagaaatctgtattcttggccatgccctgcagagaatcaaaggagcttctgggaaacgacgattccgactcccagtgagagggtgcattttaggcagtccccacctccccttccaaaatgcacactcatgctcacagacacaacagtgaactttaagctgtgttctttaaaaattatttaaatgctgacggaaaataagcacaaagaaggatattgtttctttcccaagaggaagtatgcgatactccgtatggcacatgatgtgctggaccctttcaggtaatgatagttgctacatgttagaccttatgagaaaaggagaggtcactacccatgttttcccagtgcagaaattgggcgcacggggttcgaatgcactgctgatggcgcggtctcatggctgtctcctcctgcctgggcagcatgactcgggtgcacgtcgtaaccccgtgccattgcctcctgcctgggaggagccccctgagcactgcaagggcacttgggcgatgagggcatggaggtgccacctggacaggtgccacctactgacacttcctgtccctttctgcctgtcatttgagaaacaaaggttttaaaccatgaatttgattatggttttataaaataatagacatgtcagttttgttactacatattaaaattacttaaggtaattatttataatttttgaatgtaaatttccattacgagaaatttaagcaacataaagatataaagaaaaaatatgaaggtctctctagcacaatttttttttccaaaacaaactttttaacttttttgctttgtaaattaagttcacccttcctccccaaatccagacccaagcttttagttacacaaggggaaattcctctaccagcgtggagacaggctcatcctctaaatatctgctataaatctgctccttaagtccctctgacagttaacaactagtgacattcctgaggagtcctgtggcaggagcagtgggaccttctagttaatgacctttccaagacttgtcccgtgctccctgtgtccatgagttggttctggtcaccatgcaaaagtccactcaagatggcagtgtggggagcaactgggggaggggagggcacacatggggctcaccctgttggtccttgtgcttttaaaataatgatcgaggatttacgtgaggtttataagactttgtttctcctgctttaggcaaggcaaagagaaaaaatgaacgaagaacataataaacgtttatcagacactgttgacaagctgctttcagaatctaatgagaggcttcaacttcatcttaaagagagaatggctgctttggaagataaggtaagttagataacacggacatgctggagctttcccaccctctgccaaaagattgctcatctgcccctgagcaggcgtgtgtaacagtggttagcagctgttaccgaaaatgggaattattctttaaagtggaaaaggtatgcacagttatccagtcactgaattaacttattgtttgctaagtccatgccccatttgtgtgtatgggaaattgtttatcattcttattctctagaatgagagtaggtaagtggtttttataaagggccagattgtaaatattttaggcttttagtagttatgagtaattaaataattttatgccaatcaagtcattagcacaaaagcagccataaataacgtgtaaatgaatgagtctggctatgttccaataaaattcatttgtagaaacaagcagtgggctggttttggccgtcaggttctagtttgccagcccctgcactaggatcattttttgggcccaaccctcacccctttattattcatgcattggaagttaatttctggctgggcgtggtggctcacgtctgtaatcccagcactttgggaggctgaggcaggcagatcacttcagccaggagttcaagaccagcctggccaacatggccaaacgccatctctactaaaaatataaaaattagccaggcctgggggcacccgcctgtagtcccagctacttgagaagctaaggcatgaaaatcgcttgaacccaggaggtggaggttgtagtgagccaagattgcgccactgtacttcattcagcctgtgtgacagagcaagatcctgtttcaaaaaaaaaaaaaaaaagttaatttctgtctcatttataaataggtcacttaggttgtatcgtgtactagaaagggttcagtcagctgaaaccaaataaatattccaacctctaccttcgttctttttcatttgatttggaaaaagtttaagcctggactctgagtactgtcatcatggaaacatgttagctgtcaccagagcgaagggatatcctagaatctgtgtcggagaagctctaatgggcagcagctggattcccgtttgataaagcctgtcctgactgtgcagtgtccctagcgatgggactcagaaactgccctgagattggttgttaggattggggtctgctcatctgagagactaatgattcccgctcattgcatgacacgtttatttacacggtgctgaccatggagggcatttccagagaccatacagagtcattatcccactcacctccttgatcagtgggtcagccttaatggagcagtgtttttatctttgattttaattatgcatttgaaacttaaattcaggtttcccaagtgaccaagaaattgtaaagcctaaaagttagtataagccagtttaactgattaaaatgaacttgcaccatgaacttgacatacctacctttaggaagttcagttggtgaggagtagatatattagtaagagatataagagaaggtgtcgccgcctcacggtctaaccctgggactacagcagtgcttgctggtgtgctcttttactccgttccctttgtgtggtcctttttttttttaaacgaatacagccatgctatatttaaatgggacattttaaagaaacactaaaggactatctgtcttttttcagaactctcttttaagagaagttgaaagtgcaaaaaagcagttagaagaaacacaacacgataaggtactgaaatcttctctaaatccatgaagagccaagttgaactgagttgatgatgatgatagttactgcagatgtctgacagtggagagcagcttggtttgtggctctcatagtccactgccataagtttctagcactctcaggcttgtatgttgaatgcctttgtatttcaggtgattttgagtctggctatgcatatggttcagaattcggagtcctttctgggtttatttgaagctaaaatattagcatcaatgacagtgctgtccaacagaaatataatatgagctgcatatgtaatgtttaattttctaatagtcatattttagaaagtaataggtaaaatctattttatttaattcagtatatgcaaaatgttattatttcataatgtattaatagaaacaagtgagctactttgcgttctttttccactgtgtatttcctagtcatagcacatctccatttagactaacccattacagggctcagtagccacgtctggccagtgttggacagcacagctctagaaatgagatcaagtatacccatgacacagggatgggtgcatacttgatgtaagacaattaaacacaatacagagatgcacaggacgtgaatattgttccccttctcctctaaaagagtctgcttctctacgaaactaataattgttaatcatttggtgtttatcttctgaaaagcttttctatgactaagacacagcttttcattcattagggcttacaaagttaatatagtagtctgagtgtttatgtttattgcagtactcttggagaaaattttcccagaattaaaatgtttggtatttgtaactgctgatttaacctgttagggttatgcccaacatctgagcacatttgaagtaagtggttttaaaatctaaaagagatagcagtaatgtaagtcttttgcttttctgtaggatcagcttgtcctaaacattgaagcactgagggctgaactagaccacatgagactaagaggtgcttcacttcatcatgggtatggtattaaccagtgagcagccatattgtcagcacctgtggcaggccagttcttggctatgtgggcagcctaactggatgtggctaatggtgtgacctcaaggagcctgtagcttagtaggaagcgagagagaaaagtaactcaaaggttagagcttggtactgaggagacacatcattggcgaaactccaaaacacaggaggagttttgatcagttaatatttggatatcttaatttaggtgcccagcagagtgtgacactgatgatgtaagagcagaatgacagatcccaagatctcacaccacagatgctggcacgggtgggacaattgcagagcagttgaaggccagcagtggcgtgtggctgtgtttttcgtcagccctgggaaagtggagcagaaatgcagagccagacacctggacccagaggaggggtctctctcatcctagacagctgggctccttgtggctcatcaccttggctgtctgcacagcttttcctggagagctttctacctggtagggctgagagactaaaactgttggcctggagcaggcaacatgtagctcttggggcagatgagagcagtgccctccctggagaccctttcctgtgtggaataacttttccaaattgatagattctgccttaactaaaagagagtttattttcttttcttctaataatgatcattcttatttttcatgtttcagccgaccccacttgggcagtgtcccagatttcaggttccccatggcagacggccacacagactcctacagcaccagtgcagtgctgcggcgcccacagaaaggccggctggcagccctgcgagatgagccttccaaggcaaggtctttgtgtgaaatacctctgcttacgtgaaagttacctacttatcccgtggctttcagactactttgggataaaaatgttgataggtcattgctttcttgccctcctctcattttctattttctgactaagagtttagcttttagagcattttttaaaatagggttttgtttttgtttttgtttttgttttaaagaggtagggtctgtgttgcccaagctggtcttgaactcctggcctcacacagtcctcttgcctcggcctcacaaagtgctgggactacaggtgtgagccaccgtgcctggcctctgtagtttttttttttttttccttttaataggaattcttataaaaatacagtcacttttaaatacaatgataatcatggatttaaagtagtgattaaaaataaatgagtaggccaggtgcaggtagctcacgcctataatcccagaactttgggaggccaaggcgggtggatcacctgaggtcaggagtttgagatcagcctggtcaacatggtgaaaccccgtctctactaaaaatacaaaaaattagctcggcacagtggcaggtgcctataatcccagctactcagaaggctgaggcagaagaatcgcttgaacccgggaggcgttgcagcgagctgagaaagcaccattgcactccagcctgggctacaagagtgaaactccatcttaaaaaataaaataaaaagccgagtgcagtgcctcacacctgtaatcccagtgctttgggaggatcgcttgaagccaggagcttgagaccagctttggcaacacagggagacccctgtctctattaaaaaaaaaaaaaagaaaaaattagttgggtgtggtagtgtgtgcctatagtcccagctactcaggaggctgaggcagaaggatcctttgagcccaggagattgagaccagcctgggcatcatagtaggaccctgtctctacaaataaagaaattagctgggcatggtggcatgtccctgcagtcccagctattcttggggctggggtagaaggatccctttgagccccgggaggtcaacgctatggtgagctctatgattgcaccactgcgctccagcttggtcaacagagtaagaccctgtttctacaaaataaaagaagtaattgaatacatatattcgtcatttagtgaaaagaattcacctttgaacgtttaccttctttctttggtctgttcagcagcatttgtttcaatacacgcaagtataattttagcccccatcgtcactcaacagctagtttgggccaggccgcattacagacctgtagagtcctaggcctgcagcagtgtgtaataaaacaggaagaatgcctgcatcccagaggacacaaacagtcgacagatagagtctggtagtgtgtgtgtgttgactattggtgtggaacaaattactacggagctcagtggcttaaaacagtgaacatttcgtagttcacagctcctgtgagcacaggagcagcagagcaggatagtcccggctcaatctggcaaggctggagccacagaaagacccaactggggcaggaggcctcggggccatcagccaccacttggaactggccaccggggctgctctagggtccttgcattgtgatgcaagcagcccgtactctaggagagggcgaggagaaagtcccacagcctttccagtcctggtcttggaagccacagccttcacttcctctctattctgttcatttgagtgaggtgctgagtcctgcccacactcagcgtttggggtgagaatcaccctccacctcttaaagggacgagtgttaaaagtgtttgtggacatatttttaaacgatccctgtacgtcagatggtaataagcatggaagtgggactcagggcggccctgagttgtggagtgagcagggaaataagaattttaagaagggaggccagggagtcagtatagtgagggtgacgtctgagcaggggcgtgaaggaggaaggagaaggagcacatggagcgtgttcagtgtattgttatggagtgccaacaagatttgctgagggattggatccagggtgagaaggaaagagaggaagtcaaagatgactccaagcctttgggcttgaacagccggaaggatggagtctgttttttgagatgaggaagacactggcttagaggagactaggaattgagccagggccatgttcaggttgatgggactgtcagctgtccaggggaggtggcaggttggctgttgaatatcacagtctggaacccaagagacatctagaactagagatgaaaattggggcattttgcgcatatggatggtattaagaaacatgagacaagatgacaccacctcatgggtgcctggatggagacaaggtctaagaatggagctctggggtgctccaaggccatcggtggggagactgggaaggaatgagacagaggcatgaccagcgaggggtagggtcctgggaccaactgggtagagtgctcagggaagagaggagagcagcggagcccaccctgctgatgggccaggtcaggtgggagacgggacaaagggacagctggtggccttagtaacggggagcacgttggaactgccatagaatagtcccgctggcagggaagtaagcgctgaaagctggcctgcagcaaggtctagagaagtggggagaggaagacagaatggaggtggctcaccaggatcttttactctggttgggagcaaaacagtggaggcgtgggtgaaaggagacccgcccgggcagggactggggaagggccttggtttctgccgtggtgttttaaggtgagatgggggagaagatgtccttatgctaatgggacgagctagtggaacttgcttatccagagagggagctgtgatggccggagatccgggtgtgagccagggcttgaggctgctgcccagcaggtggggctgacctcagagaggaggaaggccgagtgcaggccttggttttgtctccatgaaatgggaaggtcgccagttgggagtgagaatgggagaggaggtgttgggggcttgaagagtgaggtggcatgaaagaatcacccctggggggattgcgtaggtcccggcacacacacttttccctctgcattctgatgacatacataatgcctcagtcagacacggccactcagcactgagctgcccatgccgcatacactgccattcttgaggttgcccttgattctctcagttgctgctgccctccttttcctcgttcgagcttggtagtgccagcctcaggtagggcgggatgtggacacgcaggttggttagagggaacttgaaaacacttatgaaatttacggcaactgagtgaactcagttgatatggatttaaatcttttttatttctgtaactttccagtagcatgtataattggagtaaggtgtatttttttattgatccatattaagtatacatattttggggatatatgtgataatttgatacattcgtataattaaatcagggtaattgggatatccatcaccttacgtatttctcttttctttacactaggaacattcaagttattcccttgcagctattttgaaatgtaccacctttttttttttttttttttttttttttttgaggcagagtctctttctgtcgcccaggctggagtgcagtggcgcgacctggactcattgcaacttccacctcccaggttcaagcaattctcctgcctcagcctctccagtagctgggattacaggcatgagccactacacctggctaatttttgtatttttagtagagatggggtttcgccatgctggccaggttggtctcgaactcctgacctcaggtgatcacccacctcagcctcccaaaatgctgggtttacaggtatgtgccaccacgcctggcgtgtatcacctagtaatgttaactttagtcaccctgctgatctgtccaacaccaggtcttatttcttctaaggctatatttgcagccattgatcagcctctcttcatcctccccctgcccacccttcccggctgattttcggtttttgtttctgactctgccatctcccagttgtgtatttcgccatggaaatgccacatgtccatgttagggcgttaatatcacaagggtccaaggaatggattgttgccctccccaatttcttaaatactgcctgcttcatgtcagtaccttataagcatggcccatctttctaaaatcttttgggctttcattaaagaattcctaaatttccgatagatttatgtttctacaactaatgttgttactttatctactgagatttggttttcttgtttataggtacaaactcttaatgagcaggattgggaacgtgcccagcaagctagtgtcttggcaaatgtagcacaagcattcgagagtgatgctgacgtgtctgatggtgaagatgacagggacactctcctcagctcagttgacctgctatcgcccagcgggcaggccgacgcgcacacactagccatgatgcttcaggagcagctggacgccatcaacaaagagatcaggtgtgtgcaaccgtgcatgacactcaccacacgcatgggtgtctctgaggaatctcatcttgcctggaaaagtctggatgaaatactattaacattttctaagtattacataataatagaacttacttaacttctgttttaagaattttaaggtctgaaattgcccttgaatataaaattcaggtaaccagggcactctccccacagttacggcactagtacctttctgtaggacattgtgggacctgagaggtccttcccctgagaagctcgccacatagctggagggtgctgaaggggctcagcccagctcccactgccgtcctgaaagctgcacctggaaggccacatgagctgagcacatctggaggaggctgatcggcctaccttcctgatccagagtgcagatgaaaggtgtgcacggtggtgggctgggaagagatgacggactgaagcctgccttgaatgaatagcagtggctgcctccacaggccagtgccactcaccagagagaccagcactcagaacacatgcacaccggagcgggcgcatatggtgggaagcgggaggaagggttgcttatcaaccctcttctggtcttagtgtccctccttgaccctgaaccctgaaaggagcgcgttgctatcacctgccgcatgtgcagcctcctgcacagaagaggctgtgtgtagtgacgtttaaaagtgtagaacgtttaccttcttactttggtctgttcagcagcgtttgtttcaatacacgcaagtataattttagcccccatcgtcactcaacagctagtttgggccaggccccattacagacctgtagagtcctaggcctgcagcagtgtgtaataaaacaggaagaatgcctgcatcccagaggacacaaacagtcgacagatagagtctggtagtgtgtgtgtgttgactgttggtgtagaacaaattactacggagctcagtggcttaaaacagtgaacatttcgtagttcacagctcctgtgagcacaggagcagcagagcaggacagtcccggctcaatctggcaaggctggagccacagaaagacccaactggggcaggaggcctcggggccatcagccaccacttggaactggccaccggggctgctctagggtccttgcattgtgatgcaagcagcccgtactctaggagagggcgaggagaaagtcccacagcctttccagtcctggtcttggaagccacagccttcacttcctctctattctgttcatttgagtgaggtgctgagtcctgcccacactcagcgtttggggtgagaatcaccctccacctcttaaagggacgagtgttaaaagtgtttgtggacatatttttaaacgatccctgtacgtcagatggtaataagcatggaagtgggactcagggcggccctgagttgtggagtgagcagggaaataagaattttaagaagggaggccagggagtcagtatagtgagggtgacgtctgagcaggggcgtgaaggaggaaggagaaggagcacatggagcatgttcagtgtattgttatggagtgccaacaagatttgctgagggattggatccagggtgagaaggaaagacaggagtcagagatgactccaagcctttgggctgaacagctggaaggatggagtctgtttgttgagatgaggaagacactggtttagaggagactaggaattgagccagggctgtgttcagaccagccttggcaacataggaagacctcatctctacaaaaaaaattaaaaaaaatgagccaggtatggtagtgcatacctgtcacaccagctacttgggaggctgaggcgggaggatcccttgagcccaggagttcgaggctgcagcgagctgtgatcatgctgctgccctccagccaggatgacagagtgagatctgtctcaaaaaatataaaaattaggccaggcactgtgatgagtgtgcgtacatcagagcctcacatgttcaggtcccgtcacacagtggcctggtacagaacactggagctcttcaggagtgcacggctccactccagtgttcctttccctgtgtgaagttaacatggacagtgagtgctcagattgcaggtttgaatctttcttgtctcgtcagtattttaaagggtttttctttagcaactttagcagttataatgcagaacttacaaaacgggccaactgtagaatggaatccaagaattgcttttatatttatgaagagaccggtaaaccctgcccacgctggcttggcctagggacacagcagtgtgaccagggggtgcctgggatctaccctcgggccctggcctgacgtgctgcttggctagcctgaatccaagggaggagcaggtgtgtgtgtggagtcctgcagcaggtctgggtggggtgctgccacgacttgcttgtgaagtttacgtgggtggaggtgccagtcctggtcagagagaacaggaggtaaagaagagaaggttgagagaaacatcaacaagagctgtgttactccagctttttttttttattaaaaagaaaaaaatagggctgtacattctgaagtaagaagttggtgtgctgcctgtgtttttgactttataactcccatttcatgtgccaccttgaaaactggcgaagagacctctgcagcatctgttgccaggcatgggggccctttgaaggaggaggtgcaaaataattagtgtgatgaagcgttcagaaagatcgtctttcctcatcattatgggagctgggaaaggattatataccttttgtttttatttcttatgatgtatagctagataaaagtgtttcctctttatgcagaaagttgacctgatgtaagtgttctgtccactgacttgtggattttcttctattaataatgatcaaaaagcacttttcttagaaatgtaagtagaactttaattggaagggttattgcaaggtttctatattttaatactagaataattattattggcacagtcaaatattaaaactgctgtctagtgatccatgacactctaggagagaggagcgttaatcttgaattccaaattaatgtagcatggttggcatgaatccagaaatttacatgaggatggtagagaatcccatcagataacgctctggttcaaatttaaactaaaaaaaagaaccaactcaatattttcgtttagtctaaacagttaagtgttgggaaactcctaattgttttgtgcatctgttctttatattagagttcctgatttccagttgaagaaatctgtagatttcttcagctttgctctaagaataggggagataagggtcataaaattttaaaatatcacttagtaaggaaattattaattgcaaccataggaaaaattgccatccagccttctccagaatttttgtgtaaataagtaaaatcaaatgttaatgatatccagaaccaacaagactcaatggaaggtttactttttgttgttgtaagatgtagtatattaaaaaagattgaggccagtgtggtggctcatgccagtaatcccaccactttgggaggaggctgaggttggaggatgtcttgaagtcaggagtttgagaccagccttggcaacataggaagaccttgtctctacaaaaaaaattttaaaagatgagccaggcgtggtagtgcatacctgttgccccagctacttgggaggctgaggcaggaggatcccttgagtccaggagttcgaggctgcagtgagctgtgatcatgctactgcactccagccgggatgacagtgtgagaccctgtctgaaaaaataaaaaatttggccaggagctgtggctcgcgcctgtaatcccactactttgggaggccgaggcaggcggatcacgaggttggaagttcgagaccagcctggccaacatggtgaaaccccgtgtctactaaaaatacgaaaaattagccgggcatggtggcacgcgcctgtaatcccagctactcaggaggctgaggcaggagaattatttgaacccaggaggcagaggttgcagtgagccgagatcgcgccactgcactctagcctgggcaacagagcgagactccatctcaaaagaaaaataaataaataaaaatttaaaaagagtagaacatttttgctgaagtgttcattgtttgagcagcttattactggagtttactcatagtaatacagagtataagcatggtttttctcatgcaaacacattaatctgtttgccgaaacaggaggactgactgcttttgttttattttaggttgattcaggaagaaaaagaaaatacagagcagcgggcagaggagattgaaagtcgagttggcagtggaagtctagacaatcttggtcgttttagatcaatgagctccattcccccctaccctgcttcctcgcttgctagctcctcccctccgggcagtgggcgctccaccccacgaaggatccctcacagcccagctcgggaagtggacagactgggcgtcatgacccttgtacgtatccgccctttccctgctgtggctgccctcagcatacctgtatgaaatcttggacactacaaatctacccacaagaaaatcaagtacattcgttattctaagaggttcaagattataaaaactagttactatttaatcattcagttatgacaaactaattttaatatctggggccgggcgtggtggctcatgcctgtgattcctcacactttgggagactgaggtgggcagatcacttgagcccaggaggtcaaaaccagctgggcaacatggcaaaaccccatctttacaaaaagtagctgggcctggtggtgtgtgcctgtagtcccagctactctggaggttgaggtgggaggatcacctgagcccaggaggtcgaggctacagtgagccatgattgcatcactgccctccagcctgggcagcagagtgagaccctgtctcaaaacaaatcccaaaaaatataaaaaaaaattttaatatttggatgaccaggctagcattacaccatttgtttgtgtgacattaggcatgacatctgtgcaaagtacagcagccagaaggggaaatattttctgttttataggaaaaaccacttagcaaaagtaaataaaggcagacatcagagcatatgggaaaatgcacaaagtgggtcagtgcatttctttcctttcggagtgcccaaccagcttcctgggcatctactaccaaaaaaaaaaaaaaaaaaaaaaggaaaaacatgaaatgggttctgcatttgaagccgtgaacaagccagctgcttcgtggctccctaaggaagcagatgggcttcttcccttcacagcttagggtcacctctcacctggaaatgcaatgaccttctggtgtttggtgtttgcaaagtgtgcagatctgaggaatgtttaaaactttcctttgggcctggcatggtatttcacgcctgtaatcccagcactttggagaggccaaggtgggaggattgcttgagctaggagttaagagaccaacctgggcaacatagtgagaaccccatctttatctaaaaaaaaaccaaactatcttgtatatttagaatttgtcagtgtgttgtcaatgaaatatttcatatttacaccatttgctttttaactgtgcttctatcatattttttcccgttaccatctattttcgtttttagttgtgttgttagccagcatgcaattaaatcgacggtgaatcattttagtggcatatgaggtggtaactagtctattttgcagtgttttgaaatactgtttttataatttacatcatctactaattaggtaacattttaaactctttgactgttttatttgtgggcttgtgcttatttctgtccagagaattcgtaaaaacagttgtgtatgtatatatattttttctggttttgtaattctgtatgctggctgacagtctctatgcttccgtcattggttttgatttcctgtcatccttttgttttattattttagccatctccagattcatttttaatccagacctcaggtccccatcagtcagtagtttactcatccacctcccctcccagttccaccccatgctatagcgattcttcacagcatgctcaggtaaccacgcaactgtgtgtgttcgatcatgtttgtgagtttgtgctgtgatgactttattaatgggttgtttttttctcagttaaaagtatctttttctcaatggtaatttaaattagtgtattactatatagtaagtatggatacaggcaagacataggtgtttaagagtttttttactcaaattatgtaggatttgtgtaattcataagtgtttcctacataactaatctaagcgtagaattaatggaagctgtttacacaaacagtatgctttctggttctgatgattgtgttcaagactgtaaatctcatcagcctgttgagtctcatcaactatctctaataggttatttttaaattaaaatatcttatgtgaatcataggatggatgtaaagattctacctaatattatgctagcttttgttcttatatattttcacaggataccttgctttaagcaataaatttatttttgaaaagtggtaaatcaaattctaggtaaggattttacattaatgtccaacaggtgattaactaaaagtaggtttgttcagttttataattggtattgcagtaacttcctcatccgttggaatatttttaattataacatggattttattaaagaaaactaagttatagagaggtttggcttagaatagatgattgttagggccttttattatatagaatgccatattttaataaaacacatgaaatagaattttatctaagtaataatttatagtgtttctctaataaacctttaataacttatatttaaattttttggtgaaaaaatggttctgtatccagttacattttctctaaatcctgtctcctgtcatttctattttaatatatttgcttatactgatccttgaatttttaacttcaaagtgtatatagtaaatctggtttctcttcatttctttgcatgcatctatcagcctagtgatttaaggaaacatcgtagaaaggtaaattgtttagtaatttaacatatctttgtatctccataatgtattgaagagtacctatcatattttccataaatgtagcattatgtagttgtataataatgaatggttggcgttttaatggaagtgtttaaagtgacctagcaccttactgacaattgttctattggaaattggtcattagcggttttcacagaacactgggacaaatgtaacagcttgccattctctcaccttttcagccttctgatcattacatgcttattcatagatgtagtagttttaaaaataagaaattactagtgcaaagctatagaatgtagatgcggggggacccattttcataataatcacagctagcattgggctcttgctgtatgccaggcactgtgctgagtgctttcccagtctggtataggctgagtgtccctgatctgagatgcttagggccagaggtatttcagatttcagatttgtttaaattttgaaatatttgcattacacttactagttgagcctctcaaatctgaaaatccaaaatctgaaatgctccattgaccatttccttcaagcatcatgtcagcactcaaattatagattttggagcattttgaatatcagatttttgggtttgggatgctcaacccgtatttaatccccatacacatccctgtgaggttactgttgttatccccattttacagatgtggaaactaaagcttagagaggccccacagtgcacagtgcagatttgagttcagatttgtctgatttcaaaacctgacagttgaccacttcaccatctagccttacttgtctcagatactctgacctccctggcagcgttcctacagaaggaggtccaaggccacttctctttagagataactgtggattgggccttcctgttctcgaaggaagtagagtacattaggaggagatctgctcagcagctgttctttatgttgaccccaaatctctccctcataactttcatgctctggtctgtattctgtgcccctgtttgaaacccgcctgatggtgcagtgactggacagctcttcagagatacctaaaggcagctgtcctctgacaaaagtgtgggacctggtcagcagctgtctgtgagctgctctgttgagtgatttagtgaaactgcttgggttcagatcctagttcagtcactgatgagtttgtgacctggagtctgtttgtaccttggtttactctcctgagaagtgaagataatgatagaacagtgccacttaaagtggcattggacctgtggctgtctgtggtgagataaggagcttacaccagcagcaacaagacacagagcacggccttcagttcagctgacttctgttggattgttttttctttattttttgatagcaagattttctcagtgaaggaagtagcatgttgattgacacttaggcatgataacctggccctgttggtcactggtaacttcagcgtgctacttggtgtctttgaggagcctaggcctcgggtggttgtgaggttaaaccaggggtgcgtgcagagtgccaggccttgtctacaagagactgtcgccttccttctctgtgtcagtggtgttggtgtagaccaagaggacttccctgctttctagtaggcctgagctgggatggaggcagaagtctggcacgtgacagcactacagcgtgtggaggggtgcggagggcggcgtgtggaggggtgggagggcggcgtgtggaggtgtcggagggcggcgtgtggaggggtgggagggcggcgtgtggaggtgtcggagggcggcgtgtggagggatgaggagggcagcgctggccaggctcacggggctttccccagaccctgttaccagcttatagctggctgcgtgtcagctttctctgtactctgtttttggttttgtttttttaaaacagatgattgttttaacctgaattttgaaacttaagcttcatattgataatttctagctttgaaagcctttcattgttttgtgattgcaactggaaattaggaaaggatgcaggattcatttgcattttaactgttagttgagattctgtcctaaatgagcacagctccattttgcattgaatgcacttggtcctccctgagccacagtggggctacagtaggattgatacactttacacaatcccatttaagaagcagaaattcaaactgagcccagtggtacgtgcttgtagtcccacctactttggaggccgaggcaagaatcagttgagcacaggagtttgaggctgcaccgcaccatgatcacacctgcaaatagccactgcagtccagcctggaatcacagcaagaacctggctcttaaaatttatttttaataaaataaagttcactgttcaagtcttgctgtttatagtaatgcttgctgaacatgttttatgaaatccagtcccactcaaaaccagaaaacacaaatgtataagcaggatctgcctagaccctgcaggggtgagtctgttcactgttgttaaccaccatcctgctccctcagcacatgggcgtattcacgttccactgcaaaaacaaaaaaaccctgggagtctgacaaagatcatcttgtaatgataagcctagaagtattttcttttaagctatattgaacaaaaatgtttaaactgcataaaagtgcttgaatttatagtgtccatccaaacattgagaaatatgagccatacacatgtgtatgggggtcatgggctgttccttgtttatttttaccccgttcagacaaaaaaggtatttgacaattttgcccaagtggtttcttgccctctctagtgtttcttttgaaggacatcaggagataaacgtatttgttactggctcttcattagtgcaagttaatgctgtctcacatttgtaacgatgtggtttatcggtgttgttcagatctctgctgccccttcagagactgtcctcatgatgtgcctaggattccggggagggcagaaccttgggctgcatggaggaggctgaggatgaggggcatacctgtgtcctgttgggccccagcgcacgctcgtggggaggcagaccaggagtctgacaactctgtggtgctgtgctgcgtggcccttcagaatggtgccagactgaaacaagactttctgtgctggcagaaagcacagcaaatcgattttcaaagaagtttatggctataatttaaggcctgagtttttcacagtctgctgttaactaactttgcacttctctcacccctcagttgccaccttccagagaagaggtacgagatgacaagacaaccataaagtgtgaaacctccccgccttcctccccgagagcccttcggttagaccggctgcacaaaggggcgctgcacaccgtcagccacgaggacatcagggacataaggaagtaaggagcctgcagcagccccatgcagagcgcacctgtcttttcgtttctggtgttgagaaatcgacaaatctttccttgagtaaaacagtgattttgtagaattacccattaattcagttgagtgtatttacatgttacacttagaatgcttaccactgctctgggctatagtgaaatccagcagaagatgcatatctgtttgggcaagcttagtttggaaagaaaggagttaaatgatatcagcaagttttggaaaaacttcatgtcttcagagtctataaattgactactttctattcttgatggagagtttggcaagcagatgacaggcttggtattggaaccgctctctaggacaacccgtgcctttcttgtgccttttgtaaactgtggagagttccaagttgtacttaccaatttagtgagtgtcccctctcaggaaaccaatcagctgttttgttactagtatgctatctatgctatctttttttttctttttgagatagagtcttgctctgttgcccaggctggagtacagtggcatgatcttggctcaccacaaccttcacctcccgagtagctggaactacaggcgcacaccaccatgcccggctaatttttgtatttttagtaaagatggggtttcaccatgctggccaggctggtctcgaactcctgagctcataatctgcccgcctcggcctcccaaaatgctgggattacaggcgtgagccaccgcgcccggcccctctttttttaaattccattggatttcggttctgtgccaggcaatatgcaggggaggcatgtatattaatttttgcagtaacccctcaggcagttaacattgccacggttctcagctgagtagagtaatgctcagggcggttgtgggagctgctggaggggaagcaggcagaccattgggctttggcacctgatggcgcggagtcagggcctcccctgaaggggaggggagctccatgtcagagagagtctcagctgcccagaatgggtctccgcgctggcctcgccgggagtctgcctttatcatgcatgatgcacttggtgaggaagatgtgtgtgaaagagactggaagtgcttgtagggaagtttgcgactgttaatatgtgaagtatcctacaagggcacatagtaaagatccgttttctttcctcgaagctccacaggctcccaggatggtcccgtgagcaaccccagcagtagcaacagtagccaggactcgctccacaaagccccaaagaagaaaggcattaagtcctccattggccgcttgtttggcaagaaagaaaagggccgacctggacaaactggcaaagaagcattaggacaaggttggttggttttccgcacccttctcagcacccaggggtcggggaggaaggcactgccttcggtgccatcagttcccacgcggtgctccaggagccgtgtgctctccagggagcagcagctgtgaaggcatgggagctagagagcagcagtttatgctcacttgccactcaggtacaacacatttcctgtcttgagcatttccgtcttgggcatttggttgtctagtcagaaacttagccttaagaaatgatttaaatctgaacctgcaaatattcatctgcctatttatgaaaacatagagctttgtcatgctgatttttacttctgggctgttctgcttcctcacagctggtgtttccgagacggataactcatctcaggatgccttgggacttagcaaattggggggacaggctgaaaaaaatcgtaaacttcaaaaaaagtaagctttgtgttatttcttcatctcattgaatggttttcagttgtgcctaagctctaactagtgtttgttaattataatagctagctatgtatatatacattatattctgaaagctttacctacagccttaattaagccgtactttctggaagatttagtgtttgtgaaatttcgaagaaactcacactggtatccctatcatcttggaaagctgtccaaccaggagatagggtgggtgagagttggactcagctgcctgagcactggagtcggccctggcgcctgcccaggttcactttgtgacgttgaggaagtggcctagcatctctgtgcttcagttttctcatctgtaaagtggggatcctagtagtacataccttgtatggcttttatgagaattaaatgggataatgtgcatacagttctttaaacagtaccagcaagtcataaacaagttgtagctgtggccagtgcagcgactgttgcttgccagcattcaggatttgctcttcatactgctggtctgtccgaaacagtcgccatgctgcatttttctctcttccgtagatcgggtagttttatctcaaatagactcctgattttatagcccgtttattcagctttaattctaaactaagtctgcttctgacaataagctctaatatttgggatggctttgaacaaaggagaacaggcattgtgatgccccagggtgaggacgtggaggaatcgggtttctgtccctgggccttctgggatgcggggtgagttgcgtgttggctgactgtagatgaagtagataggctgagacagtgcccaagtgagccaacaaatgtagaacaaaactaaacccagttctgcaataaaataggcagtttgtgtagtccatgggataagggctgagcttgagcaatgtggaagatggtaatgccaggcttacagggtgaaacttgacgggctgtatgatgactgtgactgtgggaaaaatcatctggccacttttaagtgccctgagaaaccagtgctcatctggaaattggggcccaaagatgcaccagagcctatggggaccctctcccctagaggcccctttgcctttagcccctagagttgccagctgatttttttctgttgtgaaatctatctcattttagttttcttttcaaagcctttataaatgctgtattgattatattttaggtaaaatgcttttatgttaacagtaccataggaatactcagttttttggttccctgtaaatggaaatttatagaaaccacgtaacagcaaaatctgatttgaacattgctatgcttgaactgtgtaagaatttttttttttttttttgagatggagtctcgctctgtcacccacgctggagtgcagtggcgcaatctcagttcactgcaagctctgcctcctgggttcacaccattctcctgcctcagcttcccgagtagctgggacttacaggcgcccgccaccacacccggctaattttttgtatttttagtagagacggggtttcaccatgttagccaggatggtcttgatctcctgacctcgtgatctgcccgcctcagcctcccaaagtgctgggattacaggcgtgagccaccgcgcccagccaagaatgttttcaaataacttgggtaattgccatttggccctgtgaaacttaatgttagagctaaactttctgcctcctggaaacatgctaggaaaatttcattccttagattttgctaatgttactgtttttatgatagtaagtatgaggaagtgaaataaaacttctctgtcctttatgttgtgcttgggatccatgtggaagttctgaaatgtaccagctccttagtggggaaaatttccaagtacaaagattatttgtctgactatagagggcagtttcgtttctttcacttaaactgagataaaactgattttagaaaaagtgctttatttattgattgattgattgagacgaagtccctcactctgtcgcccaggctggagtgcaatggcacgatcctggctcactgcaacttccgcctcctgggttcaagtgattctcctgcctcagcctcccagcagctggaattacaagcgtgtgccaccgtgcccagctaatttttttgaatttttagtagagatggggtttcaccatgttggccaggcttgtttcgaattcctgacctgaagcgatctgtccacctcggcctcccaaagtgttgggattacaggcgtgagccaccacgcctggcctaaaatgtctacatataaatgtgaaaaaaagtttgcgttttccagaaaaagtattgtgtgaatacagtttaatatttatgccatcttaagaacgaacgtatatttctcagaattattttcttcttattaacccctgatttaactcaaaggtgtgttttaactgcaaaatttacacagccagatgctttcacttacagagaacttaaggaatctggtgagtttggtggcaagctgatttcaagttttgtaagacacagcatggtgggcgcgtttggtgcctgggatacgtagtaatgaacccgcaagtcggggctggctgtcctagagccattcgtcagctttgatagcgcatagtgcctccacagcacttttagaattc

SEQ ID NO: 65 - DNA, 156297 bp, Homo sapiens
gaattcattattgaaggttaaagttcctctgaaatgaacactgaactccagagacagtctaaccaatgccaggcacagtagagccttgccactctcccatctggagactctacatccataatatagcctaagattacatttgattttttagcagccatgtcagactcaagctcatattgagttcgtggtcaactaaaacctcgagatctttttcacatcaattgctatcaagccaggtctaccccattctgcacttgtgtaattgattttttttttagcctaaacatagggcattccatttatccctgctgaatttcaccttgttggtttgggttcttaattctacccgattaaggtcataaggatgtcttctatatcatcatccaactagttttttgcaaaagagttattttccttgaaaacacaggaaagccacatggcccaccaatggggacctcctcctggctgctgtaagtgaatgaatgctttgggaactactgagcccaacagccatcaatcattttacttgttttcatcttgtccattatgctaggaaggagattcttggttaaatgttaacactcactacttccacataatttccttaataaattatttttaaaaatctggtttacatcgatgagcaaattgagtgcctgctatgtacaaagtatggcaggactgatttacaaaggtaaataggacacagtccttgacctcaagaaacttacaatctagcagggaggtagacatacacatcattatataatcagaatgtgatgaatgccgtgatcaaggcatgaagtcatatgatgaacgaaaaaaacaaaggagcagttgcttccactcagggcaactagggaagtgtttatgagggaggtatttgatctaagcgttgatatggagtaaatatgccacaacttatttttgtgagtgcgtgcaagctctgggatatcaccattttcttttctgttgcccataaattaactgtataataatttcatttaaaggatttccagagcctgatcctgaatttatgattttgagtgtcatttgcatatgtgtacctcttcccccttttctgacaggcaggatggccttgggcttgtcactgcctcaccctttctttgtgacatctcagggatcatcaacagcagttttagggtcctgtgtggacctgggaaagttcactgaaatggccagaggttacctgcctggcccctccctgaccagggcactagtgccctcctactgggctcagtttgaagattctttcatttggagaagacaaaagcaagctaaggttgagaagttctgccttctctctcaatattacatcctcttccctaggactgagccaaaacctgcctttcttttctttctttctccaaggcccttttttgttgtctcagcttgttctgagcttttgtcttcctgacaggctcatgccaccctcatatccatccttggttatggtccccgcttccatctgtcatgtatcctgcataagaggaaaaaaagtgacttctatgatcctaagtgcaatacatgctcattgggaaatacctggaagagatagtaaatttttaaaaattcactcacaatgtcgtcaccaggagataaccactgttgaatttggtatattttcccattctctttcttttttgtgtatatataattttttaatcaaaaattgaacaataccatataaacagcttcatgtcttgccattttcacctaacattacttaatataggaccattttcacatatcattaaatattctttgaaaacacgattttttaatggctgcataatcttccactgttcgatgtacatgtccttttaaaatctgggatcatcatattttaaagcttatctgtgtgcaacaacagtgattttcctgaaatgtccttctcttttcacccctcccccactcccactccctttatgctgtcaggttgattatttgagcttatagaagcagaatttcatttttagagcatcccatcctcgtggaattatggtctcttttagaatctcttgccatggaatccctggccatgtctttcccccagcatggagcattttgctttcttcagttcagattctgccctgcacccccttcctgagctactgccaactctagacatgcttgctttctccctgcatccccatcatttccctttcatcagtttttctttcttggtcagaattaagtggcctgcaatagtggaaagggatctgagctaggaacctcagttcccattcttatgacgactagctatgtgacatgggaaaattacctaacttctctgagcctggcttttggtttttgtcttaattttaaatatctaagagggaatccaattaaattctcttcatattttccagctgtagaacatgagtgacactgaattcagagtagcagcctcctttgttgcttctttttccttctaaaaggtaaaatgttgagcataacaagttaagaactgaccaatctttgcttttggaattcttgtcaacaaatcagccaacattcatgatcactttctctacatgaagtttataaagttgaaaactatgggacccctgccttcaaaattcacagttcagaggagaaaacaaacattaaataataactgtgatacgaagagattctaaatttggctctgccacttattggctatcataagttgttctgggtaaattacctaatctctctatccctcagtttccccaggttaggagcttagctgccagaggcatgttgccagggttgagttctggctcctctgccatctgtgaggcgtgtaaccttgggaaagttccttaatctctgcactttcatttccccatctacaaaatggggacaataatgtttaagttcttgtgaaaattaagtgagttaatatatgtaagattatcagaggagtgcctgatatatactaagcacttaataaatgttagttgctgttattgtaaggattacatcagtgcatgcatgttaagcatagtgtctggtatccaagtagaaactggatctgttttagttattattagtactatttctacaatagaggtttggatagatggctgttagaatgcagagaaaggagaaattaatggtgagggaggagctaacagccctcttgtatatgtctgaggaaactcaatccagaaaagctcaggagatttatagcaagtgagcaacaaaactaggatttcaatccaggagatgttacttctggtccagcattgtgttagggtcactagtacagttagtgtccctagaggccggtgggtgtgaatgggtacagcaagcctgaggtcagacaggcccacagccaccccagcctctccctattcatgaactcactgagtgtttagaagctaggcttggtcaagtacagcaggtagtttcccagggctagaaggctgggcagaacctggtcttgccccgagccaaggtttgggccagatttccaaagccttcttcatgtccacctcttttttttttttttttttttttttagacagggtcagggtctcactctgtctcccaggctggagtgcagtggcatgatctcaactcactgcagcctccatccccagggctcaagtgatcctccaatctcagcctcccaagtagcctggaccacagacacatgctaccacacccagctaatttttatatttttggtagagacggggtttcaccatgttggccaggctggtcttgacctcctgagctcaagcaatctgcccacctcggcctcccaaagtgctgggattacaggagtgagccactgcacccggcccactttatgcccacctcttgagcttggcttgggaactgtggccaggccagactcactgaatgtccagtttaaagatgggaggcaatggggcatatcatccatctccctggacaagcagtgtcaccatagctcctttcccagcccggccctctggagccccttccctcctctctcctttttcctatctattcctccctcactcccggaatcccactttcccctcatcctctcttcttccctcccttctcctatctcccttacctctctcttcattcctgaacactccttccttttctatcctcctccactctcccttgtgactcccccacccaatccatcaatcctccctcctctcccagtctggacagcacctgacctctggggagccaccccattcctcagctcccaaacctcactccctgttcccagttggacctccacctccctggtcctgctgtgccgccgtgggggtggggctgggcctgcacaggcaggctgccctgaatgacaagcggggatattgatcgcgttctgaactcagcccagccgatagaaggtaattaatgactccatttgcctcactaccgaggagaacaattgagtttgaaactgcaacaactggcagctgggaagactggggggcagcctgggggtgaacccctcagaggcggaagtaatgtgtggagtagctaggcagagagagcaccttctgagcagaggccaccatcagaacgggcagagcccccatccccagcacagctggcccctgagccccactgctcccccagcccttgaggcccaaggcccatcacccactggtccccccacctccacgcttttctcttttcttcccatatcactttttgaggtcattttctgcctgcggatgaagactcagttttcccaagactgcttcttgccagctgtgcaatcttgcacatattttgaactctccctgagcctgtttcctcgtttgtaaaattgaactaacagtatcacttttgcaagcattctgtgaagactgtggataatgtgtataaagtaccttgagcctgcccagaacacagtaagtgctcagtaaatgatgatgggtccttgacagagaaggcaaacatggtagagtggagagagcttcagagtccgacatccctgagttcacatccaggctctgctgcttcctagctgtgcagtgttgaacaaataattttgcctctctaagactatttccttttctagaaaatgagagtagtaataagtacctcgtaaagtttgaagaggttgatgagtgtaggtgaaagccctaatatcattactttctccatagacagatagatgtttgtatttgagcttagaaaactgaagttagtgtaattctttttttttttttttttttttctgagacagagtctcactctgtcacccaggctggcatgatctcaactcactgcaacctccgcctcctgggttcaagcgattctcctgcctcaggcctcccaagtaactgggattacaggcgcccaccactacacccagctaattttttgtatttttagtagagatggggttttaccatgttggccaggctggtctcgaattcatgaccttgtgattcacctgcctcaagcctcccaaggtgctgggattataggagtgagccaccgcgcccggccaaagttagtgtaattctttgctatacttaaattcttctcaaatacctcatcttgcttcctgggatttgatgggcaaccccgttcatcccaccctgattttgtagactttgatgagccttggtgctttctgcccaagcaaatgacatcatttcattttcattttctttatttttcttttcttttctttcttttttttttttttttttttttttgagacagggtctcactctgttgtccaggctgaatgcagtggcactatcttagctcactgcagccttgacctcccaggcttaagcaatactcccgcctcagcctcctgagtagctgagccacaggtgcatacaactatgcccagctaattttttatttttgtaaagatgagtctcgctatgttgcccaggctggtctcacactcctggacacaagcaatcctccagcctcagcctcccaaagtgttgggattacaggcatgagccactatgcctggcccattatttcattttatctattaccaccacccccaactgtctcttgtcccttgcagtgacccttctgtccctagccctgttcccaagacagggttcagggggtgtctccctccccaagctgctgagaacccactggacaactccattcatgactggccagtgccagggccctgacctggggtgagaggtgtgagatagggcccagctccagggccacccaggaatagatggggagtgagtgcagggctgaatgaatgaggagatgagatattttggttgaggagtaaagacatttttaatagtgattttagaagtagcacatactaattgcacaaagcctggatggtatggaaaaacttagatgaaaagaaaataaaaattgcttgtgattgggaagtaaccactgtcaccatgccggcagctctccttccagtcaagttgatctttggttttggagttctcttcgtttgcctggagactagggtcctgctgtcagtagccccacactctgggctctggctgggcaggcagccactctgtccgtctatttagtccacagctgtcagggcacctgccctgtgccaggatccccagcaaatgtccccttgagccagtcacttgccctcgcttcacctgcacctcatttactctgagcctcagtttcctccccagtaaaaagggattaaaatccctacctaccttggagagtggttgggaagcccatataacctaagatctatgaagaccttttgttaaatgctaagcaaataggaaacagtcagataagaagacaatatgagctttgttatcctcgaaagaataatctatgtcaaagttttgactcagcagtttgtttaatcgaattaatttatttacatactatctgtgttccaaaaagacctgtagtagctcacccccttgagagtgctcatgccacagtggacagagcacctggaatggcccagtcctgggagtcccattccccagttgtgtgaccttggaaaagtcactgcccacccctgctagttatggtaacatgaaaaatttggaccagacatcctctaatcatctgggcacagtctgcactcagccagcacctgtgccacaggctgtagcctccatttggggagggtgccaggcaaagaacgagggatgccgagaggaaggctgtgccctggatggagccaagtggccttcaactgggcccactgtgtttggcacccaggctgcagagtgaaatgatttagagggcaagctctgtactccgacagacctggattcaaatctggctgtcatttactagcttcatggcctttgacaagctacttaacctctctttgcttcagcttccttatctttaaaatggttatcatagtagttccctcacagggttgtcggaaggattaaatgagctctgtaaataacagcaatggcatgtaatgagttcttgatacttgtgagctgctacagaatgggagctgggcagggggcagacggagaatgaggctgaaccctccctctatggggactgactagcacacggtcccttccttgctctgtttggtcttattaaacccacagccaccatattttccagccccaatctaaaaatgtggccagagaatggggaagaatactggaaatcagaattcctcctgaaagcccaggacacatgaccagcagcctccagccctcttggtgcagggagttcaaatgtagatgtgttctccaggccccagtcttaagcagcctctgccacctgctttggatggcagctcagcagccccggggttaagttctgctgctcaccaggaacacagtgttctctgtctattggtagaggcaccagagatgggcaggatggtgttgctgagagtggaaaaggcctgtgcgtcagagctgatgctgttagaggctaacaagcagtggggatagcacatcttttgctagccagggatgtgtggggcttacctgatgagagactgggtgtccttgggtgccaggccagtcagatggccagtcccaaaaccttctgccagaggtatggctttgaatgccacccgggagagtctgagtacctactcggggccattcctgatgctggagctgcagaaatgcattagtcacggtccctgccacaaggtgctctttgactggctgctgggcctgggggcaaaggggctgttggataggggatcttctttgaaatggatggtgtctaatcactcacgcgctctccttccctgctcactagattaagatctgcttttacatcctagaaacctagattaagatcggcttctgcttccacctctgtttcagcccagctctgccagacagcccttcaacagctgggcctaacagtggtctctttcttcctccttgccgtcccgtctgagactttgcccttggaaagtcccatgccgagctcgctccccatcttcccgggagaaccctctaggtggtcagcactgacagctgtcttccttctttcctttttgactcttcctcctttactctcttcttcttttcctcctcctctccttcccctgcaaagccaccctcatccaggccctgggcagagaaggtatcaggacacccagtcttcagcgaaagtagagccagctggttttattcctgcagtaagtgtcctcaccccagccagcacttccagcttctggtgcggaaggcttcttccctttcttcccctccttctttctgcccttccacgcctctgggcttcctccttccctgagcttatcctccttggaccttctgatccagggcttctcccaacctcctttcctcattcccttcctgccctctctccttgccttcattcctcccttccttccctagctgatggaaggatgccaccccctcctctggaaagagcccttgagagcctatggtacgtgtggtgtatttggagggctggctggctgtcccccaccagtaatgccactgccctctcctgggccctgcggctcacctccctgcaccccataagtttctttgtgctccttcgccattcatcatgactgctgccttccttctcctacaggagttcccgcaagcctcctccagcctctctggggggtgggggttctccgcatgctttcatcacaccactttgttttccttctcctctaacgcctcctttctcctccccacttccctctcctctgcttccccgcctcccactgccacctcttccagtagcaggcttccttagcctttgcctcctttccctcccccttcccctcctttgctgcctctgtaacctgtcttaccaccagggcctgagtatacaaaaaaataaataaataaataaaaaggtcagtgagtggagggagcagcaataacccctaaaacagtactatcagtggaacatgattgatcaattgaattccatagcggctgaaaaatgtgggattaagtagtgtattatacgcacaatgagttgaggcatgatgttcatttcaagttcatttcgccggcctctgccaccagatcaggcaatcaataggggcagcagatatcatatatcacctctctgcgggccggggagagagcaccataatctctcgcaaatttagagtgacagatttgtcaagatctgaagggcccctgaataaatgaaggcaaagagactcctccagccagtgacctgaggacaaagcttcagttcagcccctacacacacacacacacacacacacagacacagtgagccaagccacacacagacaggcatatacacaaatctacacagaggcatgaggagagtcctgccacacatgcacacacataatgtgtgaacacacgctcacaaatacaccctctctgcccctacaataaccatatatgaagatatttgatgctttcctcagccctgagagtccggcttccccaaaaggtaggagggctccaggaagggagaatcaaacacaataggacacgcaaatagctacagggagtgaaatgaggatgatggcacatcctgaaaaaagaagtaggcacaggagaaacggggcatgtggcctcacagtcctcatgcaatcacacacagacacacacattctttcaggaagcttctcattctatttccacacacgcagacccttgtttatctggacgtttatatatgtacaagcgcgtagacacgcaatactcacacaaaagggaaaaataaatttaccacacttcaactttcaactcatatgttgatgcatacatcccgtaagactgaaatgattccagagccttatgcagaagaaaccacaaccaccaagttttgtgttcatgggaacaaataccattgaagctgcttctgtctgtcttcttcagatgtggtcctggtcttgatctctgtctctctctccctctctttctctctctccttctctctctctctctctctccttctctctctctctctctctcacatacacacacacacacacacacacacacacacacacacacacacacacacacactttctttgctttcccaccccctccagaatagatatggagggaagatgggaggtcacattaggaaagcaaaccccatgctcggtctgggaggccagcaagggaggatggctgcaggttgagttaatcaatatgtaatattttctatggtctcctgaatgatactgtatggtgttactgtatataatgcaatattgattatatcatatcgtataatcacctataaactgatatatataacattcccagaggaacaccctggggcctccggcatgggctggccccaggcccaaggctcctcagctggtcttgggctgagggaagcctggagtgaccaagctggtatggggtttgggggggaaaccccactttggggggctgcaaggtgtgggttcagagagaggccacagagcaggcacattgcctactgtacaccttgaaaactccaaggaaccgacgctgggaggcaaggataggggagggctgagaacgcctgaggaaaggggacatggagacaggattggcctgtagactcaggggagcaggcaccggtgtgataagactctgctccctctggagacttgcaggaggaaccaggtgaccaagaaactggctcctgtaggaggcttgagcctgggtctaggttggagacagaggccgagaaggcggccagggcatagaggcatccacaggggcccttctgtgggctctgcccaagcgggagctttgctgctctagcgacacctctttcctcccgcttggtttccctctggcctcagtcctggcccaacccaagcagagtgcctcagctctgcctcagagcccctcctccctcagggcgaagttgattacttcacccagtctccaggttacactcggcctcggaaatttgatggttttcaacccttggaattagtggaactgaaattcatctcggagccgagttcaattctccacaggctcagtaatgccagtctgagacacccagcttctttcttccccaggctggccctggcttgggggcagggggtggttcagggagacatgccccagggagctggctcctgggagccccctggctccacctctgcctaatccttcctgaccccacagtgtgaccgctccatctcttaccaggtcctcaggtccttctcttccttgggcttcctcagccagatctctgaggcagggccaccctctggtgtcagccccactggcccaggggctgagagtaaggggtcccataggggtgcagagctcctgggcccggaaccagatgcccacctctttgccctgcactgttcctgtgcctctgctggcctggcgctaacgccccgagtgtccatgtgttctccagatgtgtctgagggctcagtccccaatggagattcccagagtggtgtggacagtttgcggaagcacttgcgagctgacaccttcacccagcagcagctggaagctttggatcgggtctttgagcgtccttcctaccctgacgtcttccaggcatcagagcacatcaaatcagaacaggtgaggagggagctttctgcttgcagaagtagaaaggagccggcagagcaaggcctctcaaaaacttgttcactaaacaccacatgcatagccagcattgtatgtgttacacacgtgtgttctgtgtgtgtgcagtgtgaacaggctcacatgagacagtatggtatcgttaagacaaatcattatggtctgtatatggtaattagaaatgagttctgggtgcaagagtatggccttgggtaaatcatctctgttcagagcctcggtttccccatctatagaatgaagggcttggatgtagggtttgtcaagtcccttctagctccgcttttctgtggttcttgcatggagtactcaggaacatcctcttgctgtgtcccttgcccacaccccctcagggtcctacagaaagtctacgctagactggggagctctccttgcccagtgtcaggagagcctgcctgtgcctgcctcctgctccccaagccagcaattcaatggaaccctaggtaggctggcagcttcccacttacacccaacactttctgcagacactgagcagcccaggacacatagcatggggcacagcatgtaacacaccagcaaaacgcacaacgcagaaaccatctccgaacttttctatgtgctggtgtgcatgtgctcacactccaccatccacctgctcccctcacccacagcccatggtactgtgctcacacaccactgtccacctgctcccccacccacagcccacggtactgtgctcacacaccaccgcccacctgctccctcacccacagcccacggtactgtgctcacacaccaccgcccacctgttccctcacccacagcccacggtactgtgctcacacaccactgtccacctgctcccccgaccacagcccacggtactgtgctcacacaccaccgcccacctgctccctcacccacagcccacggtactcacagctagccccggcagccgcatggagccagtgggtgtgtgctgcccccagatcaccagctcagcatacccctagcatatgcctccacccacatacgctgggtggagcccccagcacacccgctcccacacaggggcacactcccatccctgctacacatgcagcccaggccaggcccacagtcacagcacaagacagcattgctgtgcttgcatgcatgcacacacgcacccacacatgcacgtcagtgcagccccacagcgttgaacgctgtagttccactcttaagactccaacagctcccagccactcgcctttctccccgcccgtccttttatcccataagctgtttgtcttcataaaacaaaaatcaaaagtctttttaaggtgccctgagccataaaccaacaaaggaggagctggccgaggcgggcggctcagtgcaccctccctgagtccccgcctgtattacaatgaataacctttatttactttcattagactattaaacaccagcacagtcatttttccccctgaaactcggagcagggcccataaagcaaatccgaagcctaattgagttcattttaatttctctccgatcacagcgaattactctggtgataaatcagggggcagcttcacccccagtagaaggcctaatttgcagctaattacaaaactgatttctacaggaagatcaatacgagaaggaattggaaatgacgaggcaatcccgtccagccatggaggggagggggtactctaggggggccaggaagcggaagggaaaaaaacagacccgaaagagcaggaaatcagttttaatttaacgtaatattaatcagagcaacttttcctgctttgtgcaggctcccggtctgcccagctctggggtctggcttggccgtggctgcaataaaaaggcaattacccgagtgtttcaggcaggacaccctttcagagtcaatgactggccccctcctacccttctgttagccatgtggactctccccctccccaatttcataccccagtgcacaggcagacagcgaggggcccatggggctgtcattgtttgtttttaaaaaaggggcgcccatacccgatcagccagcagtgccaggctgaaggccccactaggcccttctcccagctactggctctgccagtcatgtcatggttccccctcctccccaaggctcctcgacatcccatgcctctcaacaagggtatccccactactacaccctacccgcaggggtgcttaggcaggagatgctacagaaacataaagggtgctggcattaagtgcccaaaatgtgtaaagggtgctgtgcctccggtttcaccaagtcaggtctactacccgcacaaaacttgccatcatccaccaagcccccgcatctcccctctgccccaccatctctttctaccccatctgggcgggctcccctgttcctcctccccatctgcacaccgagccctttctctgtgcgtgcatcaatagagagctgtcacttttctctctcctcccaggggaacgagtactccctcccagccctgacccctgggcttgatgaagtcaagtcgagtctatctgcatccaccaaccctgagctgggcagcaacgtgtcaggcacacagacatacccagttgtgactggtaagggggcttccaggagggtgggggcactgcgttcagtggagggtgcctcagcccatgccatctgaggcccagtgtgaggagcaggtcccccaccgtgatatttacagagagaacgaggcttctaaaaccagggtgcttcctgaacaggggtgtgcagatgtggggagaaaaaaactggggtcagggcatctgtgggcttcaacctggaaaggctgatgctaggaggggctgttgccagttcttcctcctgtccttcgcctctccctttgtctatttctcttccctctcccaagttgcccagaatcatgagcctcttgttaggatgtctgcagaaagcaaataagccaggctggtgagagtggagcatgggtacccagtgtccagcctccacacttgggtctccaaggctcctgggggacccgcttaccgctccctccaggcagcatgggtgatcatggctttgggcttgagggcatggcacccagctctgtggagtttgagatgagtacaattattccagccttcctcctgcttcccagagaggtcagtgacaccaaggcttgatttcaaggccaggtaggatcaggcttggcccacaatcaaatgcagagctaggggcgccatggccaggagcccctacaaatgaagagcagcagggccagttagtttggaaggggaggtggagtccagggaaggccgcagagctccaggctgtggaatgcacgtgccactgcagaagggtttccaggccaggagactgcccaaatgggagagacacgcattgaggtgttattaaaattcacctaattattctggagacactaaagccaatgtgccgtttgttccttgggagacaggatgattgagaagggtctcggtggggattgggagacactgaggcgttacctgcagagcgaggcaagcggaggtggcctgcggacccagcagcagggctgcagagccagcggcaaaggcagggaacaggcaccgcccactctaggactgggccctggttctgcctgtgagctggtctgagtgcggctgcatttgagcctgagctgggctcagtggccacccagcctccacctgggggcttaggagagccctgtcagttttcccagcctctccctaaggggctgtactggtacaactgtttccagcctagatctttggctagggagtcagaggttgaattctagaagtgttggagacctggactgggctttcgggagtgacgaccttagctgggttagctgggccaggacacagcccatgaccaaatggccctcagcatgagccatccttcgcccagctgggaagctctctgacctgctaggtattctgacccaaggcagagagacggcccaggccaggccacctttctcctgacctgctcagaagtacagtggtcacttcccaaagatggccactccaggcactgttcaaagagaacccgggagacttctctaaccccatctgctgcccagcgctcaggccatagtctagaaggcaagggcttcctagggtggagctatggatcttcagggtagggctcctgccacaggagacccaggggctggtacagagaagtgcctccaccttgagcagcccccacccgcctcccccccatggccctggaacagtcccagctcagcctgggaacatctccggctgatccatctggatccaagtgtgagaaaagttcatttcagacccagcttgacattcccaggtggcaagttagcactaacatctcaatctgtatgcgacatttcaatcaagcgaggagtaacaaaagcagaaccattaacattcggagctgttcaccagtggtaatgacggggaaactcgctcagaaactggaaattaccaaaaagagacaagtgtgtggagaggtgggggagggaagatggggataggggtagggaatgatttttccacacttaggccaagatccactgtttggattaatagtgccattacccaagaaagagctgcagattatgctcattcttaaaatgtttttgctggcaattaaactgctgcagttattgatctttgttgattttatgtcctcctaatttgcataatctattaaagatgaatgatttatgatgtgtttattatggggacaaacagaatttgctagaggtactgtcaaggtgagccatggggcattgctcagagactccatatgccatctcagcagtgggtccagcatgttggccttcaggccaggatattgtgggtagtagtgagcagtgatgcaaggagaacagaaacaggagagtggactttgggtgagttcttctagaaagatactggcatctgtgagaactgggctccaggcagagctggagtgcgggagaggcccttagtgtatttgtggacactgacctcaaagagtctttaaaagcttattttcttggcaaatattaagggctttggtgggagaagagaaaaggaggctcttttaggtgggtaggtgattctggggaggtgtgtgctaaaggtaagggagctgttaggtcacccagtgcccatagcctggcttaggagtgccgaggtgttcaaggagccctctttatcctccacgtctcaggcaccctgctcatcttcttccccaggactgacagctgcggctgcaaaccttaggggatgagggaatgccctagcccaacctgaaaagccagaccttattgagattcctgccacctcctggccctggaggctgatttcaaacttcaccagccacttgatgcagctattccacaaggtcaggactgagaggagagaggaacctagactattgtgtggaggggagagtggggcccagtgggccaggacacagctaatcacattgcaagcaagggtggctgccggaggctagggctcagccccatagcctcccctccccaccttccatcagggaaccgaggagagagactgattttgctgggtagtgtttgcaagttctgccgagattttaatttcactgcatcacaactcagcaagctgccaagtcaagctggttatttaaatttatcacccactttcccttccgccgctgggctgctctagctcagcggcatctcttctctccagcccacggctctaggctgctggtctggaacggagcctcgtctctcctaagtgataaagaaagagggaccagctacatgagagaatgggtcacgggcattctggccccaggctttttcaggttggctggctgtggctggtacctctcatcaccttcttgaccctccaaaggagcccagaggggctgccatccacctctcagtagtcccagggccctccgggtcagggcatctgcagtgaggactcgctccaactgcatgcaggaggcttcattccttaaagtctcccatccctggaagaaaagatagtccctgttctccatagcattctcaccttgaccccccctccccatgtctggccggggctccagtgacaaaggagcatgcagagacactggcagtgatgttgatctgggaggagaagatgagaacttactccaggattcccaaagtcactggggatgtttctgagcattagagagtcccttgacacagtgcaagtccaccccgaaggagagagcccagatgcaaggaacagtgctggagaagtcagagactgtgcagttccatgctctctagaaaagggttggccaatcttttggcttccctgggccactttggaaggagaagaaattacttaagtcacacataaaatacactaacactaagatagctgatgagctaaaaacaaaaacaaaaataaaatacctcataatgtttgatgaaagtttacgaatttgcactggaccacattcaaagctgtcctgagcagcacgtggcctgtgggctgtggattggacaggctcgctctagaagctagggaaagcaccagtccctggagccactgcacccacaggcttcactggcctctagtgggcattgctgccgcgcactggcagagccttgagcaagtgcagctctcaccgcccttgttttagtcacagagaggtaaaggaggaatgagattgatgtctgggacccaggcaggctacctcaccaaaacataactgaataaaatataacaacaaaaatgttaatacgcagcaaatctcactctttggtgccagaaatagaggggaactcaaagccagatcagtattggagaggccgctggcatcacactggagggagatgctgactgggagaggatggggttgtaacacaccagtcagggaatgtgactttgggaatcaggaagccagaactgagtatcatcctgcataaagcaaggaacagaacagggaccacactgtccgtgaaaggcaaacacatacactcgtctgagtagcccagggaaacaaggaagggggcagaatggaaggtcaccatgagacatggagacgccaagcctgatgccagatcagagtccaaatttataccatgagtatgttgcaggaaacccaagccaggaacttacataaaaatttgtacaggatagtaacccattctgaaacctcaccaggagcaatgacaaaccttctttgtagagacattctaaaatccagggcacatgggactcccacagggggaagaaaaaaccccaccactaatgatgagcttactgtaaaaaaaagtacacatctcatgtgaatacaaactttcaaaagggaaagttagtagaagcaataaacagaacagttaacatccccccaagacctgggaacaatagaataatccaaaagtgctataaactcagcatgtttaatattctaaaaaagatcaaaggggccgggcgcggtggctcacgcctgtaatcccagcactttgggaggccgaggcaggcggatcacgaggtcaggagatcaagaccatcctggctaacatggtgaaaccccgtctccactaaaaaaatatacaaaaaattagccgggcgtggtggcaggcgcctgtagtcccagctacttcggaggctgaggcaggaatatcacttgaacccagaaggcagagcttgcagtgagctgagatcgtgccactgcactctagcctgggcgacacagcgagactccatctcaaaaaaaaaaaaaaaaaaaaaaagatcaaaggaagtatcagctgtatctttaccacagatccagatcccccagtcccttcccaccactgctcaccaaattgtcagataatggagatcaaaaagggcaaagaatgaggaccatacctatagattattgctttggggtccaggaggcatggaaagagctgagcctcaggcaactctgaaagtagagcctgttccaggcttgtccaggctcccagactgctaagcctcagcagaaaatcttatattttctttgagaaaatgtctgaacattagagagctagagatgggcacagtacctttctccccagtggggtgggggcaggtgggaagcctccgtagcttccccatcctggttgggggaaggtggttttattcaagagcttgggagaaatgtctcttaattgctgaagactgcagttttgaaggaagctgtaattaagatccaggaagagatgtggatgctgcccaagagggaagtgcccaaggcaggaagagggagcagaagaggctggtctcccagaagctggctgatttgagcagaggtaggggaggccagagaggcaaagttcacagctggacagcagcagggaccagtgtgagcagtgtggatgtagcttctgaaaagggttgccaactcagaagctcggcctcctggcccacatctgagatggtcagcaaagtggccttttagcagatagaggtgtggaccctgggaaacctcctcctcctactcagggcatcctgaggacctccaggaactgcctctttcctgtagttaacaacccccttccaatgcaactgcatttccctccataaaacaaacagcttagcccttggccagcccccgggggaggagagggcaataaagactgagaaatgtttctcaaggaggctgggagtctcctagtcttgtctgtcagctcaaagcccctgattagctagaggaatttagggcacagacatcatagttcctctccttgaaaggagagggctaagacaacttcagacgtgtggcaagtcagagatccctttactgtggaggccaaagcaagccagagggctgttcctcagtgctcacatgccctagacccttcctttaggctgtgagggtcccaagaaaagaggctagcctccttcaaacatccctgagtctgctggccacatccccaaggacctccagcccccaacctcagctctgatttaattatgggggcatttccatagcaatgagacattgacagatatgcggctgctctcggcctgcagcctagggagtcattggatcaggcctctttcccttcctcctttatccagtccactgatagaggtaaaggatatggaaaagaagaggccctaatccactgtcgggatcagagtcaggccatatttgaccagaataaaagctgtgccacctcaatctcaggtcccaatcccatgtccttgtctgtgcctaccggccaccctgtgctgctgggctgcccttcccaggagggtgccatggcagaagtaccctggctgagaatggggctgcagagggaggagcatcgtagggagggtgacaaaggtaggaagggtttggggtgtcttagcaaagacgtagttctggtgttttctacgctgagctcaaatttggcccttaaccttgggcctttcttcttacctcctcccttcatctcttccctctgtccgtgaggcccaaaaacctgaacatgccaaatggagtgcttattcctccaaggatggcctcacttgttcatcagagatcagagagagagagaaaggggccagtctgaatttgaatcaaaatattttctaagaaatcaatgatcttgctatcaagtgcataacaatagccaactcaggccaataaaggattgcccagttgagaatactggccactgctttcatgattcgtcaggttacgggacccttttggtttctgtagatgtcatttagatacttgatgtgtcccacaggggaattctccaaaaaagagatctcccagcactaagctttttagtccgttatttggtactttttaagaagaaaatgttggctaagtaaaagtaaggtcagtcaacccaacattttttgaatgaccggaaatcctaaagactgctgtcccaatgaaacaggtatgtattggtaccaagggctcagaaatgtctcagtggcctcaaagccacctaggcaagacctgaaaacctgtttcccccagagggccggccacctccaaggtgacaggaagaccccccacttttttcccagggtagccagaatcccttccacctccacaattagctgtagcctcaggacaaacaagctagtgcttttgcaaccctgagctttgggagacaagctccgccactattgtcacttctgagagggctttgcatgccttcagcctgaatcctcccctcttctccccagtggtggtggcggctgggctggcaggcagggaaggaggaaatcctgcagggctcggagaacagcctaatgctgcagaggcttaagtggccgttttccttgggattagggtttcacttacacagagcgcctgaaaaacactgcgcttttggaaggattagagctgacaattcagtgctctcagagaacaaaataaagccagagaggaactgggaggcctggagtatcagaagactctgcaaacaggcttaacctctgcccacccagcatgagggtctctcatgctctgagcccatctttgagcctgggcccaacctcttgagtgccagtacctgcccaactccaatcttcatttgtgatttgctcatggagccagagaaggcaacacagggacgttgccttctggaaagaggactgggaagttgccaactgggaagaggactggaaatgtcttcccctctctctgagcctcagtttcctcctccgtaaaacaagggagttggactagaagatatccaagttccttctcagccctttgaaaatgtgattctccccaacattccctggtgttatcctaggatgctgaagctgcatttccatccatggtccagctgaattagaaggaaaccacctcctgtgaggccctgagccaacaggctacacagcccagaggagggcggggtgctgggagaagggatggaaacagcatgactggttgtgtccggccggttggctgtcaaggtgtagacctcactaagcccctgcagatctgggtaacatccctgcctaggacacaccagggattcaaggtggcagtgggagctgagatcaactggaagagcagccaccctgagttggaggcacagccccctctgctggaacctggagcaggcaagcctcaggtggggtatggggctgaggccagagcctggggctgtgggctgtcccatagtcccttctgccctagaggacaactcaaatcctgggaggatttggaagcttgggaaataagaaatgaaaggaaatatgtagatagttattttcctctccttttaaaacatcttgtgtggatttaaagtttgttactttagtgtaatagatatacgttgaattggtcataaggtgctcgtaattgttatagtaaataccaattatgcatttatatatttaggcagcaattacaaatttaataactgtgtatttttgtaagtattataaatgcctatgtcaaatgcaggcatagactgccagccttgaagaaatctaatgtcttcattttcgctaccttatgagaagcagacagaacttgaggatagggcagtaaaacaagagttatgttttctggccttagggtcctccgcagtgtcaagtgggtagcaaaagtgctcattttcagagaaagatgctgaggaaaagcatctctgaactcctcgatagaacttttgctatataaatctatgtctaataagtctcatctgagccatcatgagcagcagtttctgcttctttcgtggcttcctttttatttccttgatcttctgaatgctgacattttccttgacttgagatgcaactccctgctacttcacatgttattttgctgtgctttgtatcatcctgtttattgatacaattcaagtagttgcaaacaaatcagtgtcttatgccaaagaacggggctctttcacttttttataaacagtgcttattaatctttaagccatattttttgagaatatgataaaagtcatgtaccatctacacagaaagatacagatatacaatgtccataacattttatgtatagatttatatagaccccttgaagtgatctatgggttcttgagggatcagttaaccccaatttaaaacccccactgtaaaaaagtggaagaaactgaaacacataagaaacaagaagtgacaagatgttctgttataggaaggattcacttagcatgatcccatattactttcctggaccaaacacctatctattttctgggtctgcactatttgagaacaatatcattccaggatcatttcccaagtatacagcctgttctgtaatccagtttctgccatctactagcagtgaaatctcagacgtaatatttggcccctctgagtttatttctcatctatagaatggggattaaaggccgggcgtcgtggctcaccctgttatcccagcactttgggaggccgaggtgggtggatcacctcaggtcaggagttcgagaccagcctggtcaacatggcaaaaccctgtctctactaaaaaatacaaaagttagctgggtgcagtggcaggcgcttgtaatcccagctactcgtgaggctgaggcaggagaatcacttgaacctgggaggcagaggttgcagtgagtggagattgcaccactgcactccagcctgggagacagagcaagactctgtctcaaaaaaaaaaaaggggggggagtttaaaaacatatcaatggctggtcccagtggctcacgcctgtaatcccagcactttgggaggctaagacaggcagagcacctgaggtcaggagttggagaccagcctggccaacatagtgaaaccccgtctctactaaaaaatataaaaattagccaggcatggtgacaggtgcctgtaatccctgctacttgggaggctgaggcaagataatcacttgaacccaggaagcagaggttgcagtgagccgagatcgtgccactgctctccagcctgggtgacgagagcgagactccgtcttaataaaaataaaaataaaaataaaaacatcaacatcatagggttgatatgaagattaaatgagataatacatcatataaaatgttaaggacaccgcccagcatatagaaggtgctcaatgaatgctaggtagtcctggcccaagtagaaacacagctctgaccttgaatcttagacctgatggtgaaagtagcacaaattacctgatgactacaatttttcaactttcttaataaagtctttcactttgcttttctctgtacttgtaaggggagctgcacttagattctccaaagcagttgatttgatctggcccatttggtaaggaatgtctgacgaaagtgcactgtctgatgcagttgtagtgattgctgtagaaattggctttagaatcttcagggacttctgcagttgaactgagaagacatcctcatcaagtacagtgctttgaacacttctggggactttaagattctccactaccactgtttcttgaagaccctctttgtttttcagaaaactctcacaggagattaatactccaccccatggagttttattatagacttttggcatcgggattttattctctgagtcctttttatccacagccatgacgatatgagactttgtttgtcagatgacttcttttccttttctttggctcttttggggagtatctggcttcgtgttattaaaaggcagtgtggtataaacatggcttcaaattttggctgtatcatttactagctgtgtagtcatgggaaaactgtgatgcatctttgtgccttcattgtctcacccttgaaacaaggaagttacctcatcatctggaaggctattcatctttaaaaactttgtaaccttggccaggcgcggtggcttatgcctgtaatcccagcacttttggaggccaaggcaggcagatcacttgaggtcaggagtttgagaccagcctggccaacatggtgaaaccctgtctctactaaaaatacaaaaattagacgggcatggtggcacacaactatagtcccagctacaggctaaggcatgagaatcacttgaacccaggaggcggaggttgcagtgagccgagatcgcaccactgcattccagcctgggcgatagagcgagacttcatctcaaaaaacgaaaaacaaaaaacaactttgtaaccttggaaagcaagtgtccaacatgaaatgcccatcttcttgtaataatatgtggggttttgtccatttgtaatttctgatgctgtttttatgttactggccattgtcattgagcaacaaaaatcctctactgctttctgttgggtggcacatattttataactgatgtattctgccacataactgttttctcctttttctgtgcttttgcttgtttgtataaaggaggtgctgtgctgttgtacagttttagagtctgtctgcactcatgtttttccatccatctatagtacagcaaggcccagtgctctgtcgattcttgcttgcacagattccattacccattcatattctttcactaaaagaggcttgctcaaagaatgctgctgggcaaatggtatgacagtcttagtaatttgaaaacttcctgcagtatgtgttttccattattgacaatggtgttccagaagaatatatggcaagagtttggtcaattttttctgctctttaagtgtcacctgtgtgctaatgaagcaattgagagtgctttgtatgcagtggccagcacctttgctggctcaggggtcctgaacagggtactcctttgtggagatactggtgttatagactccgcagcagcaggtgcacagctgtatgcagaacacgaggaagcttgcgtgctttttccttgtcttgggactcttctttcacgttttaaaaatttctacatggcactgcccaacttcagttttctaaatagaatttggcaatgtgcctttcaatcagctgttcagtgggtgactttcagcatgcaaaagttcctacctgagggaagttgccattttgcaagacagaaaggcagtagaaataaaactttccaataggactgcatccaggttagctggaaacatctttctagttatccagcctgtcttccttcctcctgaagtgaggtaggagattccgtgacaaaaccttagattataaggaattcatggtgacagattgtgggaatcataaaactgaaaaccagaattcagatgcatttaaattcctgtttattaagaaagaggcacaccccttttcctgctgctttgcagactttatgatgacagggaaggaggaattaggtttctatatctgttcagcttcaaaacttctgcgtcttccctaactcgatcctgtcctgggcctttctcttttttttgaccaataaatgccatattattaatctctctaggaattgattttgatattgctgtcattgtctacttcaggtccactccactgagagacagtcaggaggagtgtagctttcaatgacaacagaagtcaataaaagaaaacccacatcaaagcaaacacaaatcctttattctgtctctctaggagtcaaaagtgatctcttgtttggcagttctactctgcttgttctcgagttttaggaaatgaaagatattggctatattagacaggtatagaggaaagtcattctattgcataataaagtcacaatatatgagtccctcactgtaaacctcttatcagcctataaaaaatcataatctattgtttaaattgttttttaaagaaaaagcatattctaatatttacattttatccaagcctttacttctttaatgagaccaatatacatgaaacaataaaaaaaatgataacccatcaggaattggctgttaagtgcaatagattgatggacgattaatcaacaagtgtttattgagcatctaccacgttctcaactatgcaggataaagcagaagacagggtcctgccctcaggttgcttatgatctgtttgaagaagcaagctatgatatgaaacatcagggctcatatattatgaaatataatggcatggtaaaccatgcagcacagatgctgtagaagtttggaagagagaaacttccctgatgggtagaatggtagggattttaaggcttcagtggggaaggagaggaaaaccgtaaggaagaagaaaaggtcatggcaaaagcatagggggttcacatcacacaagccatgaaaacagtcaaactaaaccaggagaggtgataatcttaagttggatggagagagtaccttagcagctttaaaagccacagagtttcatttcaaactatagactacagggaatcagtaatagtttttacaagggaagtggtgtgatgaaagcaaagtttcatgaggactagccaagcagccacatttaggacagacaggaggggaagaatgtggagtcagggaatgcaagcaaaaatattctgtggcaaaaagaaggtgcttagaagctgagctaggaaggtagtggaagaaatggaaattgagcagatgtaacagacattgccaaggagaattgacaatacttggtgactgacttcatctagaatgggaggaagaaggctatgtcaagaaggactccaaagtttttggtcttatgatattcaagatcataagaaccgacagagggaagatgaatctgtttttattccagttaggtttgaggtaacagagggacagccaaggaaaatgttcagcagggtactagaaatgcaaaaacctgagctgtagctctgtatagctagggaaggataaatcactcagacgtgtcaaggtagggatgaggaaactcatacagctctggaatgcagggaggtgaggccatcttcaaagggagagtagcaaagagagagagagatgctttggaatagccattgggagaataatgactatggcccagctgatgaaaagaaagtgaacgggcccaggtatgcatagttctgttactttctccagccatgccttgccttcccaaggatagacagaggcattagagtaatagagtggcattggctagtgaggagaataaggggaatctggaggggttaagggggttccaggaggtccaggagaggataaagagattatggcagaggggagaaagcaaattattattagagatcagagcatgctaaattgcaaagggaggtggtggccccttcatagccatggaggatgcaggcaaggtagggagcccagtcatgtgcagctgtgtcccagaggacatgtcggtggaccaggggtagcaccctcatcttgactcgctttgtctcccaccctccaggctttagctgatagagccctccagggacagaagtccagcagctggtgggggagcagattttgctcattggaactttatctggtccacttgcacttttggctcaaagctcctgattcacttcagggtggttttctatcatgtaaatgccataaacactaacagcaaaatagcccactggctgcccccctgctctccacacctgccaggaccaggacctgcagctccacttggagaggacaaggaatagccatcagtccctgtaggggtgatggtggggtgtcctccaagcctgaaggaaagatggggtgttagggagaggaaagataagcaagatgatagaggtccatttggctgctggagagaccacagctgaatatcttgctgagaaggaggagtaaaaccaggtcatctccctcccatctccatctgggtttggaatgcacagagacacaggcaaaggcagatacacacacacacacacacacacacacacacacacacacacacaaatacacagagacacaaagagctacacaaaacagagatgcgtacacacagctgatcatagacatttagcttagacacatgcaaaggcacactcagatggcgcattcaggtgcacagtggcacacatacccctgcacgtctgcacagagctctttcctctccaagagtttcctctccgtgcagtaccctggtgtgagtagaggcaggcccctttcttccaggcctcaccccttcccctttgtgtttttccaggtcgtgacatggcgagcaccactctgcctggttacccccctcacgtgccccccactggccagggaagctaccccacctccaccctggcaggaatggtgcctggtaggtgacaatgctgcagctgcctaatctaggtggggggaactaaattgtgggtgagctgctgaatggtctgtagtctgaggctggggtggggggagacacaacgtcccctccctgcaaaccactgctattctgtccctctctctccttagaggctgcagttggtccctcatcctccctcatgagcaagccggggaggaagcttgcagaagtgcccccttgtgtgcaacccactgtatgtcatggcccctccacagcgcccacccacccaagtctgtgcccgaggagcactcagcctcagctccaccctcagtgcccagcccaccccagccagctgacactgcttggaagagcctgccctggtttccatggaaacttggagccaagaaccatttccaggggcatgtcagtcactcagacaaagccaccctggtccacaccaagacacaagggaagaccaatgttgagaaccaaccccaaccccaacccagagacagtagggagctagtccctaagaggaatggaggtcaggctgcggcgggaagcagggagagtcgctgcagtgagacaggctagaacacccctatacctcttcagaggcacccagccttccattgcttccctggggctctgacccatccctaatcagaggagttgggtttgggttgtttgaatcagagagacagaggctgtatttaaggtctggtgactgcagctggaggttgtactatacctaacccctaaccccagattgggagcagggtcttgaagccaaagagagttgaagttcctatgtgcacaaacaccaaaacactcttgtcttaaggagggttagactcactcagccagcaactcactccctctggccgccctctatgtggcctttccctgaagttcaactctcattggtatggggaatggggaggatagaagagagtggttggccccatccatccagggacatttaggtataaccctgggtaagcagagcttggggtaggggcagcggcaaagagggagattgctgctgggtcttatggactaggggctgaagggagttagaggtgtgggtaaagggattcctgcccagatttaggggaaggaaagtagaagccttgttgggaggcaaggagattttagggagaaactcccagcagtgagcaggtgggggctggaggaggttttaaagaggtggggtgagggaagagtggggaggtgggggcagggagtctgcagggaggtggggaagaggggagccgcagagagctcgtggtgtcgaggggggagtcgttaaacagaatctagtgctgatgaggaaattacacttgtttcattagcgatggggaaggagatagctcagttcctcttggtcacagttgagctcagaagctcattatcctgctgcacgcatgctttccctcctcgtcaataaacaggctttccagtggctgcatcccccacccccaccccagctccctctcagagaggggccccttctcctctacttaacccgcggttagggatcactgtaaacagtctggggtcatcacacaggagaaagggcgagggggaaacctggaggcctggcctttctcccgcagagggagggaggtagcttccgacgacggctcccaacccacgggccctccgctcaccgctagcggaccagcgggcagtccacctgcgccgcctccatcccctgccgcgtagcccacgcatccaacctcttgagggaaaggcgggagggcggtgtctcccaaaagagctcccacctcttgtgttggcactgcacattgatgccattcttaggactttctgggagaaaaatgtcccgaaggcctttcttcgccaccgccccccactcccatttccacccattaggggccatgcctcctagaaccggagtggcatctataaaggccctggcccccagcgcgacagggtggacgcgccccaatacaaacccttcgtgggtggccgcgagcgcctccgctgggaagccctgggcgggcaccggcccacaggtcccgcccgtgggtgtgcgagcgcgtcggtgcctcccgcctccccgggctctctccacgcggacgcggtgatcgccccacctccgcccggcccgcccgccacggccattaccctgcccgcgacacctgcgcctgagacccggcgggaggagcgggcggagaagccaccggccggactcgtggggtccgccctggcttgcaggcgtctgatccccactccccgaccctcccgcagggagcgagttctccggcaacccgtacagccacccccagtacacggcctacaacgaggcttggagattcagcaaccccgccttactaagtgagtacgccacctggctggccggcggctcagcgcggccgcgcggcttctgggcacggtcccactcccggcgacccgacctctggggacccggccgggccagggggacaggcttgttagtgcagcactgaggcccggggacccctcgaggacgcccgcacctcctgccctcccgtgccctccctggtcgctcgaaggctctgcgccgccctcgccctcggatcccctggagggtgcgcagccgggcgtcaccagatcgggtccctctcatgccccgtgaacgcaactattctccggggcaactggctccactgcccagccaaggtctcccagtccggatcccgctggaccccagccaggggaggtcttttctgtgcttttctttccttttttgttctcctgtttgtcctctcacccagcccattcttctcctgtgttaacttccaggttccccttattattatagtgccgccccccggggctccgcccctgccgctgctgccgctgcctatgaccgccactagttaccgcggggaccacatcaagcttcaggccgacagcttcggcctccacatcgtccccgtctgaccccaccccggagggagggaggaccgacgcgacgcgatgcctcccggccaccgccccagcctcaccccatcccacgacccccgcaacccttcacatcacccccctcgaaggtcggacaggacgggtggagccgtgggcgggaccctcaggcccgggcccgccgcccccagccccgcctgccgcccctccccgcctgcctggactgcgcggcgccgtgagggggattcggcccagctcgtcccggcctccaccaagccagccccgaagcccgccagccaccctgccggactcgggcgcgacctgctggcgcgcgccggatgtttctgtgacacacaatcagcgcggaccgcagcgcggcccagccccgggcacccgcctcggacgctcgggcgccaggaggcttcgctggaggggctgggccaaggagattaagaagaaaacgactttctgcaggaggaagagcccgctgccgaatccctgggaaaaattcttttcccccagtgccagccggactgccctcgccttccgggtgtgccctgtcccagaagatggaatgggggtgtgggggtccggctctaggaacgggctttgggggcgtcaggtctttccaaggttgggacccaaggatcggggggcccagcagcccgcaccgatcgagccggactctcggctcttcactgctcctcctggcctgcctagttccccagggcccggcacctcctgctgcgagacccggctctcagccctgccttgcccctacctcagcgtctcttccacctgctggcctcccagtttcccctcctgccagtccttcgcctgtcccttgacgccctgcatcctcctccctgactcgcagccccatcggacgctctcccgggaccgccgcaggaccagtttccatagactgcggactggggtcttcctccagcagttacttgatgccccctcccccgacacagactctcaatctgccggtggtaagaaccggttctgagctggcgtctgagctgctgcggggtggaagtggggggctgcccactccactcctcccatcccctcccagcctcctcctccggcaggaactgaacagaaccacaaaaagtctacatttatttaatatgatggtctttgcaaaaaggaacaaaacaacacaaaagcccaccaggctgctgctttgtggaaagacggtgtgtgtcgtgtgaaggcgaaacccggtgtacataacccctccccctccgccccgccccgcccggccccgtagagtccctgtcgcccgccggccctgcctgtagatacgccccgctgtctgtgctgtgagagtcgccgctcgctgggggggaagggggggacacagctacacgcccattaaagcacagcacgtcctgggggaggggggcattttttatgttacaaaaaaaaattacgaaagaaaagaaatctctatgcaaaatgacgaacatggtcctgtggactcctctggcctgttttgttggctctttctctgtaattccgtgttttcgctttttcctccctgcccctctctccctctgcccctctctcctctccgcttctctccccctctgtctctgtctctctccgtctctgtcgctcttgtctgtctgtctctgctctttcctcggcctctctccccagacctggcccggccgccctgtctccgcaggctagatccgaggtggcagctccagcccccgggctcgccccctcgcgggcgtgccccgcgcgccccgggcggccgaaggccgggccgccccgtcccgccccgtagttgctctttcggtagtggcgatgcgccctgcatgtctcctcacccgtggatcgtgacgactcgaaataacagaaacaaagtcaataaagtgaaaataaataaaaatccttgaacaaatccgaaaaggcttggagtcctcgcccagatctctctcccctgcgagccctttttatttgagaaggaaaaagagaaaagagaatcgtttaagggaacccggcgcccagccaggctccagtggcccgaacggggcggcgagggcggcgagggcgccgaggtccggcccatcccagtcctgtggggctggccgggcagagaccccggacccaggcccaggcctaacctgctaaatgtccccggacggttctggtctcctcggccactttcagtgcgtcggttcgttttgattctttttcttttgtgcacataagaaataaataataataataaataaagaataaaattttgtatgtcactccccatggctccaagtttgtctctccctgtctctgagatgggcctcccctccattggtcgatccccaaaagccccttcaatgatcctcccaactacactcccgctgccacctccaactcctttgccgagacccccttggcggcagctgaaccacggcgaaggccgagactagcctgccctttagtagccaccctcccccacgcaccccggccctggggacaggaagttcttactctccgaaacttcagaataactcctagttaggcgcctatactaggccaactctgtggtcctaccagtacacccgcacccagatttagggtgctggctctcagaacccgaagtctgaggccttctccacgtgggtggaggggtggtcgtctgtcctatctcctccctccgttccctatccagtgcagttgcgcgtgggcgcagcagcaattttatccccgaagtctgcaatgaaacgcgaagaccgcagacgcttgccgcaagtttcctcgctctgcgtttacttctgggcccgaagaatgccccgcagaggccctaggagctggttcatgggacttcacgcgcctccagtgtcttgcggagccccagccccagcaagcagcggctgaaattggtgcgccttgtgctgtggtctgggtgtgtcccggagagggcgcgcaggcgcctatgtctgtcgcggggcggtcggcgggttcctgcataggtatggctttctgttcatctatgtgttcgtctgtatgtccctggatgggtctgggggtgtggtagtaggagaattgtttttttagccatccttgctgttcttgtgtccaggtgtccagtgaaagatctgtatgtctccacctctctgttctctgtttaggagaggttgcagggggaagggggatgtggtgactgtccaggattgttctgctgcatcagagatacttgggaggatcgcctttccatcccttcagcagcttcccagctctggtcctcccacactcttgtcaacacaaagggcccagcttccacctggaaactttccttctgtgcccctgggacaccttcccagcccagcttctaccacagcttcctcccacttgaaaggctcttgaatctctgagctgccagggatgcaagcaggacattggggcagactaagaagtgaccttcccctttggcttgggacagtgtctcctagacacctccttcccatcagaatcccagagacctttctttcaagtcaatctgcccaggctcacccatatcacggcaccctctaggggatgtacaggaccccaacaaatcagcaaaccttcaataaagtccattcctttccccctccctctgcacctgtgtctcccgattcttcatctcagcaaatggcagttgcacccttcaccctgcctggtgttggctgtcttgaccgccagcctcctagaagagtggccttcaaacttctttgatcatacaccctctcagccaaaagaattctgaatgtgtactcccaatataagtatatttactgatttacaaattccataaatatactactgggctaacatattatgaatcgtgtaaaagataaaatattaaaagaacgagtttggaatatgtgaaaatagaagttctaatgttctcacacccaaatggattatcttgcactccctggaagacgtgcaccccactttggagatcctggtcataacccatgaaaacccagcatggcagaactcctgactattgcctggtgcccagcaagtacgtttctggaagttgccagggcactggcttgggccagggcagcccagtgaacactgccctcatcatatatagtgggtaccagacccccagtgcctggctttgcctccaggtccaccccagacagggagccttgccctgcccactccatcaatttgggagccatggcctcttatgtgggtctcactggaacctcttctgttctatttctggtctctctcagactgaactggatggacagcaaacattccactgtttacagtaagcacctctgcccagaagcttcatatggtgtccctcctagaatactgatttcagcttggaatcagcctgagggcccgaaaacatgatctatcatccttggccagttgcaaccccactcacccaccccagaaacaaagaaggcctgttctcctgcttcagtttgttttctccagaagtcattttgactctgctggctctgtccccatcctacctctacagagttcccagctgaggcacaccaagtatgacagttagaaacagatgaacagaagtgtcctgggttgagggaagagcaggagcaaagacaggaagtcatgaaaatacaccagatacaatcaatgtggctggagtatcaggtgccaggggaggggggggggttgtggagggaggtggcaggagatgaagctacaaatgtaattagaacactgtcatgggcattccaaattgtacctgtcacacacacagctcctttaaggaagctgccctacccacagctacttcctgcccatgtagacaatgtatttgtaccagtgactctgttactggtacagaattggactggaacacaagtccacgctgaaccaatcaatcctcctctttcggaaaacaaaactaggaagtatggaaagaaagaggccattaaccacgaaaagaaaagcccaaaggaggccctgagggcatcccctagtcctcctcacctcagtaaaggatagctccatttgtatcactcaagcccaaaaacccacatcttccctgactcctcctgtcttttgcatcccacgtttgattcatcagcaaaaccagacaattctacctttaaaatctatccagagcatgacctcttccaactacctgtactggactatccaggatcaagccactgtggtccttcacctgagcttgcaaacagaaagttctaattggccttcctgcttccatctttgcctccctccagcagccagaatggtcccccaaaatgtatggcaattcatgtccctcctctgcccagaaaccttcggtggctccccatctctctcagcgtcaaagtcaaaatccctccccatcgccaccaccatcttaacccacctcccatcacctccctaggctcaccgtgctctctgagcctgatggtaggagccctcaatcatgtgaagaggaggatgacccacagagagagtagctgagtcgctaatgaggaggactgagagggcacatgttcctgcctctcctgcagcacagaggattgagactcaaactgcactgaacacctcaaataactcccaccattccttggggtgactctctgttccttacaactcaaagcacctctcacagtccccgtggggggcatcgagagtgcatccctccttccattgggaagctgcccctctaccatcctgtgtagttctcgtgggactgtcaatcacagtgccccatcagctcctaccacatatttggtcttgtgacgctcctctggccaatgaggaccccatgtccctggccacagcacagagataaaaagttagaaacaatgggagttctctcaggagcgttgttatggagtcctggaagagaggaggggtttttggcctgtgagctgcaatgatgagggcttgagactccacgtggagaatgtctgcccaagggtgaagtcatgctcagagtcaaacagagaccagcagagctgagaggtagaggaaaaaaacaaaaaacaaaacaaaacaaaaaaaaacaccaactctggtactatcattcaaacctctggagccagctaggcccgaagcaagccccatttttggatttccaggatcaaaattcaataccttcttctttcttggcttaaacaaatttgttgggtctgtcatttgcaaccaaaaaagttctgatttaagcagttctggaagacacacatgctctgttaagagctttggattttttatttttttcccctagaggcaacgagagctatggaaagtttttgagcagagagaatagcttaataagtcacatttttggaagagtgctctatgcataatgaagaagtggaatacaaggagagacagtgggtgcagggagaactgtaagagaccactaccatggttgaggcaagagatgatgggaagctatgctaatgattagattagctcctgaaggaaactgacaaggaagcatgacacagttttatttttaggtaaaaaagaaagacaagtgcagatcagaagacctgctgcatgagaaagagaaaataagaatctttctcacatttgcttatatacacataaacagaaagataaaatggtgtctctgagctgggaactatgtggacggggacagggcaagtatagtcatttctgtgactataattttttaaaacctaattttgactttaatgaaaaataaaatttcaattaagaaatgtaaagagacaaccaggtccttgacacatataagcataatgaataagccaaatttggcttttcttgatgttctattatgactgagggaaaggccatttgatttggagaatagcagatacctggtgacctccaagctagtgttttctgcagatggaagtggggggtggctaaaatgtaaggatgtagaaaggggcagagtgtaactgattcttttcaaatatttggaaaggaggagaacaggagaggggcctggggattgtatggtctgtgagctcaagagaaggttctttttggccgagggctgtgtggacaagcctgtggttgaggcagagggtggaaggcagggatgtgaagagaagctgctcatgatggacatgaggggcctgaaagaatggggtggaggcatgtggggaggggtggagaggaaccagaaaattctgcttgggagaggaaggtcttgaagggacagggtccactagatttgctcagaaagattgtaggagccacagctgctgtctgctgagagtgaggggagcaggactggatcctgccttgagcgggtagagaattttggaagaatctcttctggggattcagaaggaagttgtgagggcagcaggagcacatggccaacagcagcagggagagctcacactgtggggaggtcctgggctccatccttcaagacacagaagccaggcccccaagattacactgcccccactcccaaactccatccacatctcccttctccaaggggcctccctagctgactggaccccggcagaaccttgagcccatgctcacagtctgatctctgtgactgttcatcctcaagtgcccaggtgtagcctcagctgccttatgtgagaaagccaccacctgcaccccaaagaattcccaccatgcaacctagaggcagaagaaaaaccatgtgtgtacggaggcatctccacactgaaggcaaaagggacccacaagagagtcacaaggctggctcacaaggtcactatgtgaccttcaacagacctcactctctctgtgcctcagtttccttgtgtgtaaaaccagatgaccactagggctccttcccacttggacattctaggcttccatagttctagactgtaggtgctcaggcaatctctgtggccagaaggagttcgagtaagctctgtagaggtgaggtgggtgcactcagatggggaaggggatgggggaaagctctttaatctacagaaggaggaggcatggatttatttattgctgccaccttccccatctgagagttaggactgccttttcctatctctcttcccactctctgcccagaggtctctggggtgggtctctgtaagcattgaggcagatgaatggtgatctaaggggacccctgagggtgcagggtagggcactaggggagggagacaaaggaagctgctctttggggcccagaacatttccagcctccccccacacctctgcatgaccaaaccattccaataccctaattagccagtcccttaggcccctgttagccaggccggctgagcgcccaactccctggggaccagcccctttaccccgcagactaatcagttcttcactctgagtgcatgagcgtcctcatcacacacgcatgcgcacacacacacatactctcccttattctcacccagaaccccaggccccattccagccttatgagtgttaatgtagggtggtgctgcatttccccagtgaccatatccccatttgggttgattgaagagttagagagaccggacaaagtttgggggctcctctccaatttggggttttctcttaaacttgtgaggtcaggatgtgtagccaaggatgaagccacaattggggtgttctatggtaccccaagcccttgcattggtaccatctagggtcaatattcaccccaactcaaaccccctcctccccctcatcccgtcccccctagtccatatccccaccccctacccccaacacccgcactgtcagcccaaacacatgataaattgccctgtcaacagaattcattcagggaccaattaattccacagaaatgaaccaggagccatcagttgctgaaaaactcagagtgcagggggcggaggagggggtacaggcagggggtgggcagcaggggaggggatggggaggttggggaagttagtctgacagaaattggtcatttaatgcttaagtgcacgctagacagccctgtcatcgcccgcggcccccgtgcgggattaattatcggaggaggagagggcagcccagcccaacctagccgtctgtcaccaaccaatgctggagtcacccaagccttgggccaccctgggtccccttccaagcctccaggcctcctgctcctctgactttcaggtccccccagatcccagtcgtaggcccaacctcctatcttggcccctcagccacatttagtcatggccttgccatcagctagtccaaccaggaagacttcttcaaccccttgactgggtgaggcccaaactccccacactcccctgtcattattctcaaacatcctaggtgaacatgtgtgcagaacccaaggcacaattttgtcccatccattgatcctaatctgagagaacagcaccatcatccactccatggctcaagccagaatcccatcattatccttgactcctcccactccctcatctctcccatccaatcaaaatccaaatcctgagagttcagcctcctgtaaatacatcacatctggtccacttgcttctagctctctgccaccagtcaaggctgagccatcatctgctctgcctgctctcctgattcaggctcttgcttgtggctaatgttattttttttttaatgcaaataacatcctgctgcactgcctccctccctgatactaacatccagcttaacactcttctggggatcatcatgggcctgcaagagatcaagttcaaacccttgacttacaagccacgaagcttcagcctgtgccctggccttgcctccagcatgctcctttgctctctgctccagccccactgcccctcccttctgacctttgcacaggctgttctctcagcatgaagtactcctaccctgcaatccccacgttcacttgactaactcctgatgatccttaagatcgcagattaaatgtcacctccaccaggaagccctccctgactgcttgatatgcttttacagctcctcaaattttttcattcatcaacatgtcatctggcaagtacttgtgcattatctgtctttccacaaaaatgttaagtttcacaagagtggagtcaatgtcttttttctcagagcctggcatttaatggataccagaataaatgtactgaatgaagaattgcctagccctgtcttggctctcccccttgtctgaggccaagttccccagtgtcagaactctcttgatagcccaagacaagctgggttggctagaggctgagaaaccctcagagaatatttgtgagcccatcaaactgacccaaatcagctgtgccttgtgggctcagacgagggagaggctgctgagggctgcagagtagaatggcagagagaatggttaggaggacttcccagaagagtagggaagtggggtctgaaagaagcaggctctgtgcaaacatgggctggctgaagcatggggttgttcaagggagaagtaatagttggaaatattgggtaatagttggaaagggaactttccaaaactgatactcatatatttgctggaggttgaactgacaagacttgggtactgactggatgagagagatgagggccagggagaccagtttgtgaagggcaatcaatgccagactgtttgaccattttcctatccttaactggggggagggcactgactacttctaaggtgacctgatgcaaagttttatttacaagttaattctagctgccagacaaggtggttgaagggaaagtttgaggcagggagactattagaaggctagtgcaatgatgagatgggggatgaaatggagtgagagtgagagagagagagagatgcaggttgacctgtggaaggaagatctgtgataaggaagtctccctgagggacagagggggacaggtaagctgggtgggctccatctccaagtgtctggcccaagaaggcctggtggtagcctcactgaggtagcatatctggacttggctgccaattggttatgaaggtgaggaggagagatagggcaaagatgattgcctccaagggtgttccaagagcctggcagctgatgggccaccagcagaggtaagaagagacgctaacttggggctagagatcatgacatgcctttgcatattgagtatttgtgcctgagtttgacatgccagggcatgatggccaatagacagaattacagggaagtagctcaggggagtaaattggcctctggatgtagaatggggagatataccctcctgccccactctcctagtctccagttttgcattgcagtttggatgggccaatttaattctgtaacaaagtaacagtatagtattaacccaaaataatcctataataccatagcacagtaaagatgatgtatcactgccaagatacaagtgatagtgtagtgtagggctgtaacgatgtaatccaaaaacagtataaccatatggcaatttgctactgtcagccaggaaatgatgggtcggtgcactataggttaacagtactgggctataatgaggtaaccatgtaatcagtgatattgtagtgttgaaatgactgtaacaaggcacacaacccagcaacttgatatgacaatctgacagtgtaattgtgttaacttagtaatggttaccgatataatgatgcaatcacatgatggcagagtgtggtaatgatgtcacatgatcataaaacctcaaaggcagtggaagggaagaggatggagctcttaacctaagccccagggctctgagaatagagtaagaaagccctttccaagtttaaaaggaagcttcctcaggatgctgcagaggctggaagaagcttctggaaggatgttgcagcctgggataggaaagagctcagccgagaaagaaaactgggggctgggcacagtggctgacgcctgtaaccccagtactttggaaggctgaggcaggtggatcacttgagatcaggagttcaagatcagcctggccaaacatggtgaaatcctgtctctactaaaaaatacaaaaattagccaggtgtggtggtgcacgcctgtaatcccagctactcaggaggctgaggcactagaatcacttaactcaggaggcggaggttacagtaagccgagttcgtgccattgcactctagcctaggtgacagagtgagtgagactctaaaaacaaaaaaaaaggaaggaaggaaggaaggaaggaaggaaggaagggagggagggagggagggagggagggaggaagggaaggaaggaaggagaaaggaaaggaaagggaagggaaggggaaaagaaaagaaggaaggcaagaagtggtggtggctttgcagaacaggacatagctctgttaggctggccaggatcaaagcaagccagcccccaactgtggatactatctgagcagccctgacccctttcagtgctcttgactgttcacttagcctgagaggtgtctgctccttcaggagctgaaatagggcaaatcatattcagtacttgtaagattcttggaatcatcacattgacaagaatataaaagaaaacccagagtaacacaattgaaaacaactcacatatctgatctttactatgtgctgggcactgttcttctgcagattattcaccataacccaaggaagaaggttttatcttattcgttttacagatgaagacaatgagacccagagagattaaacatatttgtctaaagtcacatagcaagtaaagggcagagctggaattcagactcagatccacatctgcctttaaagcacattcttgctcttgtcattgggtatctgcttttagaagtgtgtgacaaaccagtgagaaaaaaaccagggagcaggttgagccaaaggataaacaagtgacatattcctagacatacattttttaaaaggtcaatattaaggtggattaaaatgtgtgtaatgggcaagtgtttaagaaagaaaggatggatatgaatatatattcttatttgcttacatttcttgaaatgaaaagataaacaaaatattttaaaaataattattggagaaaggaggaaacaaagtgaagaggatggggtagaaggtagacatcactgagtataaattttcaatagatttttaaaaatagattaaaaccatatagatactttatataataacacaataaaatcaagtatgtaaataagtaatccataaaaaatcaaaagcaaaatgaaacaaatgaacttatctactaagttggtattataatcacatagataaactatttcaagtaatttaaaatccagtaattgactctacatacatccctagtgggatatacactaataaagccaataagtaatgagattgatgttcttagagttttttggtaagggagaaataaacaaacaaaaacagatggaagatcagtggtgattagtaaaatccccatagtcttgcatttgatttggaagtatcagtaataactgttgatgtattttatctttaaaaaatgtatttcatggctttatgcattgaaaaagacaagaaaccaaccaactcagtagcaataagcacctctagtctccagactgtggtctttaaataccattttgcattaaaaagaaccagggctctttgggggaaatgaaaaatttcagatctgaaacaggacatgtacaagatcattctggaaatcttataccagaaagcgaggaagctatgaaagactactagggtcatttcaaaaggacttgtgcactaattacaggctcccatttgccaaagatgatacaattgagcatcagtgtttataataactgcaattgattgaaactcatctaataaatttaaatccatgaataatcattatacttaaaagaaaaaccttactaatcttctttgaaggatggtagagagccaactcataatttggtaaactgatcgaaaaaaaaaaccaagcatttctactgcctttcttatatgagctatatataccttgggttgaatccaggaggccgaggttgcagtgagccaagatcacgccactgtactccagcctgggcaacagggagagactctatcttaaataaataaataaataaataaataaataaataaataaataaagtgatatttcaaaaaaaatctaatctaaatctaatcaagcctatagatgtaactactatcttgcagaaaatactgtgagcagaggaacctcaaggatgcaatccaaaaactccaggttatgggtaaatatcctggcttcctcaattaaaaaattgaaagagagaaaaaaatggatagactaaaacagacttgagagatatatcaactaattgcattatatttgaatcttgcaagtaattaaaaggaggagaaggagcaggaagaggaggaagagaaagaagagtagaagatgttatgaggcaatcagggacatgtaagcactgcattaactggacactattaagtttttagatgtgctagtgatattatggttattttaaagtcatttactttaaaaatataaactgaaatatttataaattaaatgatgtgatatcttggatttgctatcaaataatctagggggtagagttggctgaggaatatatagaataagactggccataaattgataaccgttggagctgggttcattatactcctctctacttttatatatgtttgaagttttcaatgtttaacccatgttatattgaaatgagctggttaaatttggggagtagctatctcccccatcttgaacttcagaaagctggcagctgtcttccattgttcagccctccaagctggaaactgaacaaactgaccagccccccaaaaaagacctctaaatactgacaatcagagtccccccacaaaacatccgggtctccaactgatcattcttcagtgatgtccactaatcaacaggtcctaaaattagcacagagctttcaagcggtcatttagtgccctacctttgtgtattgatggacaggaaaagatgctaatgatttaggacaagtttctaacataaaagataaagaccaggccgggcacagtggctcacgcccctaatcccagcactttgggaggccaaggtgggtggatgacctgaggtcaggagttcgagaccagcctggccatcttggtgaaactccgtctctactaaaaatacaaaaattagccaggcgtggtggcaggtgactgtaattccagctactcaggaggctgaggcagaagaattgcttgaacccaggaggcggagcttgcattgagctgagattgagctactgcactccagcctgggtaacagagcaagactccatctcaaaaaaaaatttacacacttatatacataaatgtgatatattgattgatttttaccccaaattgtgatataaatatattgggccaaagacaaaatgattataggtggtgacataagagatcccaatcctcatcttctataataattagttaatagctgggcatggtgatacatgcctgtaatcccagctactcaggaggctgaggcatgagaatcacttgaactcaggaggtggaggttgccgtgagccgagattgcaccactgcactacagcctggatgacagaaactccatctcaagaaaaaaaaagaacttgaaagtatcaaagaatattcagagaagagaagaaagcttaaaaaaacaaacaaacctgcaattaataacctcagagaggtataagaaacacatccatgaaaaaaagacagggtgtggtttgttttgttttgtttttttctgagacagagtctcgctctgttgcccgggctggagtgcagtagtgtgatctcaactcactgcagcctctgcctcccgggtttaagcaattctcctgcctcagcctcccgagtagctgggactacaggcgcgtgccaccatgcccggctaattttttgtgtttttagtagagacggggtttcaccgtgttggccaggctggtctcaatctccttacctcgtgatccacctgcctcggcctcccagagtgctgggattacaggtgtgagcaacctcacctggccagggtgtgtttttaaggtatattcagagaataataattgttaaaattcctgaatatttatagatatatgtacacataatacatatgatatctataatattagagataaagtgaaaagtcaaaaatagcaatataagcatgatatggccacagaagtagggaagtacatatcagaagatgtaactaatcattttcaaaaaggttgcctatagggacttaatagaagacaactataaccttgtatttggttgctttttgagctatgtaaatacagttgacccttgaacaacataggtttgaactgcatggatccatttatatgcagaatttttccaaaaaagttacactgaatgtgcttgcctttcctgcctcctgttctgcgtcctccacatctttgacctctgccaccccgagacagcaagaccaacccctttcctccctccttctcctcagcctactcagtgtgaaggcaacgaggatgaagacttttatgacggtccacttccacttattgaatagtaagtatattttctcttcctcatgattttcttaatagcattttcttttttctagcttactttattgtaagaatacagtatataatacatataacacacagaatatgtgttaatcgacagtttgttattggtaagccttctgggcaacagtaggctattcgtagttaagttttgggagagtcaaaagttatacatagatttttttttttaattatttatgtccatagattttgggggaacaggtgctatttggttacatgagtaagtttctttagtggtgatttgtgagattttggtgcacccatcactcgagcagtgtacactgaacccaatgtgtagtcttttacccctcaccccttctcaccctttgcccctgagtccccaaagtccactgtataattcttatgcgtttgcatcctcatagcttagctcccacctatgagtgagaacatacaacgtttggttttccattcctgagttactcacttagaataatagtctccaatcccatccaggttgctgcaaatgctgttaattcatttctttttatggctgagcagtattccgtcatatatgtaccacagtttctttatccattcgttgattggtgggcatttgagttggttccacatttttgcaattgtgaattgtgctgctataaacatgtgtgtgcaagtacctttttcaacaatgacttcttttcctctgggtagatacccagttgtgggatttctgagtcaaatggtagttctacttttagttctttaaggaatctccacactgttttccatagtggttgtactagtttacgttcccaccaacagtgtagaagtgttcccttttcaccttatccatgccaacatctattttttaaattttttttattatggccattcttgtggaagtaaggtggtatcatatagtggttttgatttgcatttccttgatcattagtgatgttgagcatttttttcatgttttttggccatttgaaaagttacacatggattttcaactacatcatgggtccgcactccagcccctgcagtgttcaatggtcaactgtatataacttttttttttttgaggcagggtcacaatcatggctcactgaagccttaacctcatgggttcaagtgttcttcttgcctcatcctcccaagtagctgggactacagcgacacaccaccacgcctggctaagtttttgattttttgtagagatgaggtcttgctatattgcccaggctggtctcaaactcttgggctcaacccatcctcccgcctcagcctcccaaagtactgggattacaggtgtgagctaccactcgcagccaactatatttaacttttatttatttatttttattttatttttattttttatatattttttttggagacagagtttcactctgttatccaggctggagtgcagtgctgccatcttggctcactgcaacccaccttccaggttcaagagattctcctgcctcagcctcctgagtagctgggtacaggagcccgccacaatgcctggctaattttttttgtatttttagtagagacagggtttcgccatgttagccaggctggtctcaaactcctgacctcaggtgatctgacctcggcctcccaaagtgctgggattacaggcatgagccaccacgcctggcctatatttaacttttaatgaaaaattcaaacatacacaaaagtgagaaaatagtacaatgaactctcatattctaatccctcagaattagcaatttatcaaaattttgccacacttgcttcatgtaagtacattactttaaattttttagaaaattttttaaaattttagaaatatacacaataaattaataatatggctacctctgaaacatatgactgatatagagatgggagaggtgaggaaaagagcttttttcctttttaaacagttttatttttatttttatcttacaaacttatgccatgcgctgctctaaacactttacactcatttaatcctcatagcaaatcgatgaagtgtgtgctagttttattcttatttgatagaagagagctgtttatcatttgaatttttttcagtgagcagatattcctttttaaatatttatttatgtgtttgttttagagacagggtctccgtctgttgcccaagattcactgtaacctcaaactcctgtgtttaagggattctcccactttagtctcccaagtagctgggactacaggcaggggccaccatgcctggccaattttaatttttttttttttttagagatgggggtctcactatgttgcccaggttggtattgaactcctctcttcaagtgatcctccagtcttgacctgtaaataataattttttaaaagataatggactataaaaacaagtttcctgactcatatataatacataataactctttggttatttcttctccagtatataaagtcccagtcccaaagatgcctccaaggtagaatgatgcattctcgttattaataacactttcactcccaatctgtcccagtttaggtaataacttgaatgaccaccctactttaaggcttgtgtttagggctggacgcagtggtgcacgtctgtaatcccagcactttgggaggccaaggtgagtggatcacttgaggtcaggagtttgagaccagcctggccaacatggcaaaaccccatctctactaaaaatacaaaaattagccaggtttgatggccaaggtgggcggatcacgaggtcaagagttcagaccagcctgaccaatatggtgaaaccctcctctactaaaaatacaaaaattagctggacgttgtggcacacacctgtagtcccagctactcaggaggctgaggcaggagaatcacttgaacctggaaggcagaggttgcagtgagccaagatcgtgccactgctctccagcctgggcaacagagtgagactccgtctcaaaaacaaaacaaaacaaaacaaaacaaaacaaaacaaaaaacaagactttgtgtttagatccttcaccatagggattgtcctcctctggactttgttcttaggggtccccaggcctgaacctagcaaactatggggcccggtgggaacactgacctttcttcttccaggcttcctgcatctaccgaggcagcctgggagtcaacaggctcctggtagtgccacacaattgactcacaatgaattcgctgtcagataaactttgtctttttcacgtgattcatttctaagccgagactcctgggcccacatttgcacttctgatctttttaacctgcctgcaggactctacatccatgctctccaaatgtcatttgctcatgttgggtcatcattccagcctgccaagatcattttgaacctcaattctgtcacccaatctattagtaagcctgttcctctttgtgtcatctgaaggtgtgatgagctggacacctacatcttcatttgagtcactgatagaaacatcgcgtggccagggctgagtcacaggctcagagacgtcatgctggcaagacagaaaacctgtcatcacgtctctttgggtagagtgagtctccagctatgaatcttccaagcagggccatcatgcagcccacattttcccatcacatacacaagaatacaatgataagctgctttatgccctgttgtaagtataaaaacagtgccttctgcattcccctaacctcttcattctgtatccttatcaacaaaagaagcatgatatgctgtcctttggtatgtgtttgtagagacctcatgctggcttctgccaaacatcattctccttgctaagcattgccagacctcatatataataatcatttctagaattttgccaggaatcagcattaatttggacactctttaatttccatatccaaagcctactccttgctggctatgatggcagtattcgtccaactccaccccgtagcacccctcctaatttccaggatcccctgaagtcactgacagcagattcctgattacatatcatcttgacacctatctgaacctttttacagtagactactctgctgccattaacaatattggtatggattgtagagctatattcactgacatgaaaaagtgtccaccataccttgttaagtgaaaaataaagtttacaaagcaatatgattttataattccatttttgtaaaaaaacaaaaacaaaaacaaaaaaccttcattatgtacacataaaaataaagtccagaagtctacataccaaaatattaacagcggtaatatgggtggaagaattacaggtgatgtttttttcgcacatctgaattttccagttcttcttcaattagcattcataactcatgtaatgaaggaaaacagcttttttttaaaaaagtcaaggttgacttcccagactctggtaaatcagagctatcttagagcacaaataacattcctccacatgcttctctcttctccctgagaatttcattctcccgtaatataaggaggagggaggggagagaaaaagaggatggggctgccatttgtaggcacaatgccaagccatgggcaggggttttatctccatcactgcatttaatcctcacaactgagaggagtaaattttaccaataatatcgactcttccagaaagttgggtgatgaagggaaaggagaccatgagatcctggactggggagagacaaggtcaaaggaaggtgaggtgaagctaacccattttacagatgaaaacactgagtttctaaaatgacaatcaatcacgcagctagtaaataaagctaaattcaaacccaggtctgcctgaccctaaagccttcctccttttatgacaccacagcagccatcacacctgcagtccccatagcatccaattttaaagatttttggtttttccttccctgacataccattatcaacttgcagtttaaagctcttttaatcaggcagcagatctcttcttaaaacttctctgatcacccctgcacagaacttaaagcaaatcctcatttttaatcttcacaaccatcttcttgttttgttttctcttttttttcttttttgagacagggtctcgctctgtcacttaggctggagcgcagtggtgcagtcacagcttactgcagcttcgatctcttgggctcaagtgattctccagccccagccccccaagtagctgggactacaggcgcaaccacagctgacaaattttttagattttgtgtagagatgggatttcgccatgttgcccagctggtcccaaactcctaggctcaagcgatcctcctggtgtggccacccaaagtgctgggattacaggtgtgagccaccacttgaggccttcagaaccatctttaagctcacagctcaaacgccttcttcacctttccctccggaagcatgaactccaaaaccagaaaaaatgaaacatcatttccgacacatcctattgtacccaaatttcttccgtgtctttacctagtgcctcaaagctctgcagacagcatatagaaggatgaatgggtgtggacagagttcagccagacctcagagacaaaccatagaaggtcctgggagtcattgctgagaagcagcctagaactccctcagttcccagtattacattcttttctgcttaatatagaatgggtgtctgtttcctgtgactgaactcttaatgagaagtaataatagtaataacttctccctttttaattctataaacctgatgctatataacaggttaaatatctatcatcccatctaatttgcatggcaatcacataaattcggtattattttcccaatttacgtgtgaagaaaccaaggattggagaggttgcccaagagttcatcgtcggtaaatggctgagccttgactcaaatgagggtttgcaaactccagagcttgtgctcctaaccactgtgcatcccgccgctcatgtggttccttgtggaagggaggaacctacgtaatggataacatcctcagcagactttgtggaagatatagagatttttttcttttctttacttttctttctttctttctttcttttttttttttttttttttgagacggagtttcactcttgttgtccaggctggagtgcaatggtgcgatctcggctcaccacaacctctgcctcctggattcaagagattctcctgcctcagtctcccaagtagctgggattacaggcatgtgccactacgcccggctaattttgtatttttagtagagacagggtttctccatgttggtcaggctgtcccgacctcaggtgatccacccgccttggcctcccaaagtgctgggattacagacttgagccaccgcgcccagcctcagaggtgttttataaaccattaagtcatactttataatgactctgcttcaactattctcttctctctctccactgtcccttccccacctctacacctccaagtgtgcacatgtgctcaccttaccatcccttgacccccacagtccaggaccccataggaccctttcccttcctcaccacactttctggaagagtagcccacacttgttactttccttcccacctctagccccattcccgttgtcacctggcttctgcctccaccaccccagggaagctgctttagctaagatctttatgtcctcctgctgcacatctcatggctctctggggcctcatcctgtgtgacatccctgcagcatgtcacgcagctgcccactccactgtcttgaaactctctctccacttggcttcctgacaacactctcccctgactttcttccatcctctctgctggtgattctctgtcttgatcattgactcctctaactccacctgaccctcaaatgctggtgctttccagggttctgccctcagccttcagcccaaccctctccttcaggccccagactccttcctacagctgcaacagcccacttacatgcaagcagacaactgcccaggctgttgtctttagctcagatcactctcccacagtttagactcacatttccatctgcctagctgacacctccacctggaagttctcctgaaaactttaattcagtgtgtctaaaaactaaacagtacaacatgccccctgtagacagagatccacacacgtgtgggcagtagggttacaggcgatgctgtgttttgcatgtctcaatctagcttttcctcaattaacattgataacccatataataaggggagacaacttttcattttaatttatttatgcatgtattttagagacaagatcttgctatgttgcccaggctggtctcaaactcctagactcgtgtgatccttccacctaaacctcatgagtggctgggacaacaggcattcacaaccacacccagctaaggaaacagcttttaataaaaagtcaaggttggctttacagtatcttcgtaattgtacagagatactttggagcacaaataacattcctcatgctccctctctttctccctgagagtttcagtccacataaggaagagggagggggcaaagagggtgagactatcattcctaggcacaatgccaagccacgtgctaggggcttcctccatcatttattttattttatttttaaatttttattttattgtttttttttttttttttttttagaaatggggtctcgtcatgttgcccaggctggtcctgaactcctggcctcaagtcttcctcctgccttggccttccaaagtgctgggattacaggcgtaagccaccacatccagtcgccgtccatctagttatatttcatccttataactgaggggggttagatattatttgccccattttacagatgaaaacccgaagctctgaaatgataagcaatcacctccaatcatgcagctaataaataactaaagcaaaatgcaaatccaggtcttcctgaccccaaagttcacacacacacacacacacacacacaccacatttctctcttgaagtacctcagtacttgcttaaaaatttccaccaaatctccctctcctcttcatcacttcctgtcaaagcctgatgtgagagaacagaaggcaagcactggggctgtcacacgcacagacattcctagtcactccatgagaacacaactgccatcctcatttctctagaggagccaattattctctcaatgaccctgtactctgtaccttcttttttttttttttttttttgagaaggagtctcactctgttgcccaggctggggtgcagtggtgcaatcttggctcaccacaacctccacctaccagattcaagcaattctcctccctcagcctcctgagtagctgggattacaggcgcccaccaccacatctggctaatttttgtatttttagtagagacgaggtttcgccatgttgaccaggctggtctcgaactcctgacctctggtgatccacccgcctcggcgtcccaaagtgctgggactacaggtgtgagccaccgtgccagcctgtactctaccttctatgtctatatctcagacagagatcgccaggcactggagatcctgtggtgaaccaggcaaatgtggttcttgccctcatagagtctacattctggaaaatgcatcattaacaatgcaagggcactaaatagagaacatttatgcacagcagtaaccaatgtaggttcaccaagaaccactagttaaaatggagaaaggtattgaaaaagtagatgagtgtaagctcaaaaggaaatttctaggattctgatgcatgactccaccctcagctgttcctagttcctatttttgttaatgacctccaggctcgccagatcatcagaagatgtaaaacttgttaaatggcagaggacaaaattagggcctcacaggcagcttggaataatgggtcaaaactaacataatgaaatttaagggataaatgtcaagtcctgaatttgttttacaaatcaattgccctagtgcacagtgagggaggcctggctgctgtggctcgtatgagaaaaagcaggtaattctgatgcccaggagcttcatgtgggtccacaaagccaactggctaccagaacgctaggatgtaggtgtgggcagttctgaaggaatccaacacagcatggaacacatggtccttgggcctgctctgagaaggccctccatccacccagagccaccaggcaggctgcaggtgtcgagaaagacgggcagcatctctgcatcatcacatatcagggctgaccacctggtccctctctttcatttacagagcagccaactgaggcccagagaggggaaggggtgtaccttgtggggtcaaaaagtttgcagtagaactagggcagctctccactatctcgaatgaatgaatgatgtacataggtaaggataaagtacatagaggggcagcagatgagattagggacatcaatttcatcttctttgaggcatcaaacagaaattaatggaagtggtaagtcttcctattgacatgcataggttctttgggctcagtacatgggtacatatatgtgtgcccacaccatgccccacaaggctctgccttgacccccacatgctctcctccctgtcccaggcaggtgctgaaggcataggagaagcattgctcagctcgtgcccacccgctgggttttctttcctctttccaagattcttctccaggaagccctcctgaattggggagtctgtggtgctgccctcctgcccagacagagagccctgccagctgctgcagcccctacccaaagctcagtggtgggtggttatcctgaattatcctaaggggacaggagcctagagcaagccccccatcttgtactgttgcaccctgtcccatcatatgcttctgtgccccgggcccctcaacccctcaccctcaccatggccctatcctcagatccatgtctccctcagacctcagacccccacttctgtttccctcccccaagattctctgtcattatctctggaaagtgaagcttgtgcatcatcattaatgggctaaacagcagggtcagcgaggcaggtagcagtaaacgcagcaattacggccgcgcctccatcccagcgccttcgctcccaatccatctcccctcatcaccaggcggtgctgagccggccctgccttcattacattaatcaggttaattccaagttagagtccacattctaatcaaaaggcagtcaacagggtggggtgctgggggaagagggaagagctgtccacccaagaaatggggggttgacggaggtcccaggcctagacacctgagagcctagcctccagagccccatctttccaggggctgctcccactttgtctgggccttgctcctgagacctcttttgcatcctggattcaagccagggctaagactctagatacagagttagaggcaagggagagtccaattccaattccctgtctctctaaacacaccaaccaggccgtcatgtactgttcacaaggtagtgcactgacaatgctaggagggcaccacgtttatattgtagtctatgtgaatgatgcccttagagctgtgcagtgtacaacctgcacaacagagcagagcagccctgtaggttacctcctaagaaaccaaggtcctggggaaggtcagaggatactggagaagacagagtggaggccatggagccaacactggaactcaacaagctcattaagatgaaacagagatcaagagaatgagcctccagcagcagcagcttctccattggccccaacactctggcatctctgcaaggttctgtcctcatcctctgccaggaaatgtcatctgcttccccagcttcaaatatcaccatgttgatgaggccctccccttcccccaaaatctttcctacaccctgacttcatattccatttggatagctccacatggaaatccctccagttgcacaaagaacatggatgaaatagctcggaagctgctctcccaaatttacttctcttccctttctccatgaattcctcctccctctctggaccaagctagaaatattgaaagttattagagaatccttcttggaccctttattagtttcctatagcttctgtaacaaattattacaaacttagtggcttaaaacaacatgggtttattatttttcagttctggaagctagaagtctaacatgggtctcactctaagctcagatcaaggtattgactgggctggttccttctggaggctctagaggagaatctactaccttgctttttccagctgctagaggctgcctgcattctttggcttgtggccccttccttcatcttcaaagccagcaggatagcatcttcaagtctctctctgattctgacccgtctgccttctttaacttgtaagggccaatccttgtgagtatattggatctcctcagataatccaggataaatctcctggagttgactggcaaccttaattcccccttgctctgtaatataacatatccacaggttcttggaattaggatatagaccttgatgatatagttaggatgttccctccaaatctcatattaaaatgtggaagattcctccaacaatccccaatgttggaggtggggcctagtgggaggtgtttgggatggatccctcatgaatggcttggtgccctccccacagtaatgagtgagttctccctgtattagttcacgtgagggctggttgtttaaaagactgtgacatttctcttgctccctctgtcaccatgtgacatgcccattctgtttgccttctaccatgagtaagagcttcctgagacctcaccagaagctgagcagatgctggtgccatgttgcgcagcctgcagaactatgagccgaataaacttttttctttataaattatccagcctctaaacaggtattcctttatagtaacagaagacagaataatacacttgggaagccattattctgcctgccataaaccccaaatatcagattgatcttcaagtcctgttaattctatgcctccaagacagcccttctatcagttcctgcgttctttatcttggattgtctagacattacaataatctatcttcaacctctccctctccaattacaatcatcaacttccaacctttccctctctaatccactttccaagaggctgccagaatgaggcagatgcttttattgttcctagcatctcttcctcttggcccacctcggatttcagtgcagctagcccaggaaagggaatgtaatgaccctggcagcaactgtcaaccagtggggacctccttcgagtacccagtaatagataagtacccagcttcctgtcctttaaagggacaattctgaagtgcattctacgtgattcttcagaggatctccaaggatcgctttttggttgcccatagagacaacaagctttcttttttttttttttttgagacagagtctcactctgtcgcccaggctggagtgcagtggcgtgatctcggctcactgcaacctccgcctcccgggttcacgccattctcctgcctcagcctccctagtagctgggactgcaggcacccaccaccacgcccggctaattttttttttttttttttgtatttttagtagagacggggtttcactgtgttagccaggatggcctcgatctcctgacctcatgatccacccatctcggcctcccaaagtgctgggattacaagcgtgagccactgcgcccggccacaaccagctttcttctctgtttccctctccccactccctcacgactgctccctgtgatcaccttccaaataaactgccttcacctaagtccttgtctcaagctctgatctaggggaaaatcaaactaagacagagtcatatctctaagatgaaaatctgatcaagtcattttccttattaaagacagcaaacaactcctgccctcaggttaaagtactaacttggaggttggtattcaaagccctacataaccctacccacttctccaatctcatcattttctgcatccatccacttatcctattctccagccatgcgagatttcccccataaactctcacatccccaagcattcactcacattaagagctctgagttctagatcctgcccatctctgcatggatgtctcatagcaaacctcaagctcaacgtgtctaaaaatggaactcaacttctcagcaatgttctcttttctctaactttctctcagttttcctttgttttgtctgactcttcaccatctttcccatttctttttctttctccagtctcatatacatgactgatctccaggctttcgtccttgaccctcctcttttcttgatctcaacattttccctgagtcgcctcatcccttcctaaggcattgtttacagcctacacatgcggacaattccatctccaggctggacctctcacctctctgctaagctccaaacccatattcagctgtctactggatacctcaacctggatgtcccatagcaacttgaactctatatgttccagactgaatcatccctcaacttcctcatcctctaatattcccctttatggaatcatctacaacctagctgttcagaaatattcacctccttttgccttgtcccctccccagatcattccattgccttctccagtctagcctccacacaacagtcagtgaatcagtgcaatcttttgttgttgttgttgttgttgttgttgagatgaagtctcactctgtcacccaggctgcagtgcagtggcatgatcttggctcactgcaacctccacctcccgggttcaagcgattctcctgcctcagcctcccgagtagctgggattacaggtgcacaccaccacacccagctaatttttgtatttttaatagagacagggtttcaccatgttggtcaggctggttacgaactcctgacctcaagtgatctgcccgccttggcctcccaaagtgctggattacaggcgtgagccaccacgcccggccaacaatctttctatcacatatatctgagagatacctccaactcagtacccactgaaggaaatcctacgtttcttagcatgttctagagtccttcttctcggggtctgcccacctgagcagccccagcttccctttatgtgacccatactgtctgatctggttgcaatgcgcttcctataccacgaccccatcaatgccttctctacttagagactttcttatctttaaagccacctcttcttggaggccttccagacagtgtttccagggcaacccatgcagcacagtactctaactatgatgcatatttaccagtctttctccttgttagactgggaatccttgaggtcagggactccatctcagtgtcctttgccccatagcactgtgcctgcttcttagcacaagtttattcagtgcttgctgaacaaatggatgaataggtatgcagtttcacacagagcaaaattcttatttatgtaatgacacacacacacagtcactgtgttcatggttacgcagacagagacagccatcctccctcacactgtcgtttcaatgtatgaagagtcttcaacagtcaatcacatgcctccaccatcacttacctacggccacataccaacattcacccacacacccacctccatgtcaaccaaggcactcgttgtcacgtccccacacacatgcacgtcacaaactcccacgcggccgcacacacaaactcacacagagccatggatacacggccacacgtacagctccaaacacctcgagggcacacttcatctccaattgtgagcaaatgctgttggttttcattaatctgcaggctctgtgtttgccagtctctctggctccccctctccctcttccccactctctctctttctgctccgaggcaggtgagcgcatcaattttctcctcgtctgtggcagttaaattaaatggaatcggcctggttgctgaaaatcaaagggaaggctgataaagcaattaaatccctctaattcctcgtcctgaaaggtgcagcggctctgaagctaattaacttcataatgaaaatccttcttcacccttttaggctcttctcctcgggtctcctctcctctcctctccttctggggagaagctggttactgaggaagagctggatcagcagcattaaaagtcagaaccctggagaggtctcgggggactcctgtgctcctgcgttcagctccctccccttccctcctctgctcacccctttctcctacacctagttacctgcctagctctcaacaccacatttctaacgtccaccacccccgcaaacaccccacactacgccaacaccagatccacccctactacattcagcccacctcccaccacctaccccagcacccagctgttaccccaaatgccaaggcttcctccaccccacatcagccccctaaaaccaactctgtctctaaaatcggccctgcccaacacataggccacctgcccctcgagctcgatctcaacagcagcctgccttcagtgcacagtttataatcctgaacacctaatacgtacccagaactatgctacgcactggggtgtaaagatgaacaaaaacaacacaagccctgtcctaaaggatctccttatctggaggtagagaaaataaggccttccaaaagcgaagctgtcttagtccatcaggctgctataagagaataccagaaactgggtggcatataaacaacagaaatttatttctcccagctctggaagctgggaagtccaagatcaaagcaccagcagattccatgtctggtgaggtcccacttctcatagatagtgccttcttgctgtgtcctcacatggtgaaagggactagctagctttctggtgtctctttttatttactgacttgtttgtttatttttatagcaataccagcttgagaatggggtctccacctctacaacctaatcacctcccaaaaaccccacctcctagtgccaccaccttgggattagaatttcaacacaaattttggggagacatgaacatttgtgccataacagaaacctatgagaggggcctgcagtgcactctggcagactagggaaggctccagatgggaagcacttggactaggtcattaagtgttagctggggcaggttgggcatggtggctcacacctgtaatcccaacactttgggaggccaaggtgggacgattgcttgagttcaggagttggagaccagcctgggcaacatagcaagacctcgcctgtacaaaaaaattaaaaattagccgagtgtagtggtgcatgcctgtagtcccagatacttgggtggttgaggcaggaggatcgcttgaacccaggaagtcggggctgcagtgagctgtgatcatactactgcactccatctcgggtgacagagcgagacccgtctcaaaaaaaaagtcagctgggttgactggctgggagaaggagatggagtcaggagaaagagcatttgcaaagcttggaggtgggagagagcaagagctgatcagggattgggagtttgtttgcaaaggtagcccctgggccatgtgggaggcttggctgcagatgaggctgggtaattgggcagaggccagaccatgaagggctttaaagaccatagcaaggagtcttggtttatttttctttttttaagacagtgtctcattctgttgcccaggctggagtgcagtggctcaatctcagctcactgcaacctctgccaacagggttcaagcaattcttctgcctcagcctcccgagtagttgagattacaggcatgcgccaccacacccggttaatttttttatttcttaagtagagagagggtttcaccatgttggccaggctagtctggaactcctggcctcaaatgatctgcccacctcggctttccaaagtgctgggattacaggcaatagccatgatgcccggacagtttctttcaaacaatgtcaggtgctaaataggatttacttgtcacatagaaccagagtttgttgaaattcttttccactaccccacatgtgggagcagggcagacacagggaggatcgcagacatatgcgagtgtccatgagcacactagcaggagcaggcctggggaacagggaccccaggagacatccagtcaaagcgagtctaagaaggtagcagagcaagtgcatgggatggccttctgtgatttgagagagggaagaggcccttgctctgtgctgtcccgctgccagcccggagatgctcacattttggcacctacctctcccctccctctggaaagtccatccatttccatggcttcagatcttacctctccatggggagctgtgagccccacaagggaaaggtgcagtctgtctcattcgctgttgaatcctcagcccaatctattgtagatgctcagtagatattttttaactgatacaaagaaatgaacaaatctacaccctcgagctccagacctgtgtattccactgtcaactaaacttttccacttgcacgtttccatctcacacttaacatgtcccaaaccaaactcattcctccccgcttgcccacctgaatcctgctcctctgcttggtttcctgttttagtgaatggcaccaccagccacacaactgacaagcccaaggcctgggcttcattctcagcccttccttctctaccacccctacccccacatcgcagcagtctccactgccattcattctgccttcctactgcttctcctctttcctctcccactacactctccccgccaccacctctcatgctctctgtgatttcctggctggtctctctgcttcgggtctccaccacttccaatccatcctccagaacaattgttctgaagtggaaaataggaacacatcactcatctacttactattctcataggctcatcattccttataaagcaaaggtcagctcctcagctagcctacaggaccccagacttcagccacagctgacttcttacagcaaccaaatgtcccagattcatgttggggtgccttgttccttgcccgtctggaatgcccttctccaaactccactggaccccggcttcctcccacccctgaccaccccatcatgtttccagactccctgaaattttctttagaggttctattttatgtttgttttcctttgagcttttctgtgccttctatgtattctgcatggagcaaatattatttttgtaactagagaaagaaaatgttttaatatagctgagaacccccttctctctaaagcttctcctcaggcttccatatccctacccacagaattccccttccgttgggcctcattgggacctctcttccacctgctggaacaccagcagcctgatgtgtttgcatatttgtctcccttacagggtgaggccctggagggcagggcaaatgggtgtcctcctgatcttggctggcacagtgtcaggcacatcagatttgccccatgattgttgaacaagtgaatggccaagcggcctgagagagctgagagtttagtcaaaccacagcattgggccaggtgcggtggctcatacctacaatcccaacaatttgggaggccgaggtgggcagatcacctgaggtcaggagtttgagaccagcctggcctacacggtgaaaccccatctctaccaaaaattcaaaaacttagctgggcatggtggtgggcacctgtaatcccagctacttgggaggtggaggcaggagaatcgcttgaacccaggaggtggaggttgcagtgagccgagatggcaccattgcactccagcctgggtgacagagcaagactccatctcaaaaacaaacaaacaaaaaaaacaccacaacatcccatgggagtcagagtgttgagggcacaatctgcaggaggtagagagcagccagcagggtcagccctgccacaaggcccggtaacattcctgaaggatcccactggattggggaagatggtaatagaacttcccacgtggagagggctggcataggtccccagccccagcccaatcctggtctccaccttcagagatcctcagaggtgcaaggagagaaaagcagtgggagggagaagcagagatgtgggagaaaggcagagacaggacgagtgacagagggaaggaggctcttatgaagacacagggagacagtggcagagactccagaagggcagatgggtgacaaggcccccagcacagcccaggagcctccatgcacacaaagcccacgctggggttgggggacagggtcctggggattggggagaggacagcaggttcccaaccctctgcaggtgccagcccccatcctgggccagctccccaccctttctggagccagcgggtggcaccctgccgggggcagatgagactccgacatgagtgatgggtgccgatttaggcccagatttgccacaattgtgggggctggcgcagttctgagaccaggaggaggggtgggcagggtgtaagcaggctggactggcgatggggaagcagggagatctctgtggggaagagccagacttttctctgagtgcccagcagaggccaggtgaatggcgattggggaccacagccagagaactaagagggggcactctgcacagggcttgacttgtttgcagagagtgcagggtgagtccgctgatgggcctggacacacacacacacacacacacacacacacacacacacacacacgcgtcattccccagtccagcattcacacccagaagaaacctctgtgaggcacgtactgagcacactgctggaatgcctactgcgcgccccggtgcatcaggaccacccattcactcagtcacaccgcaacaatctcagcccaacaacactgattcacctcatcccagttgctcagagtgaaagtcaggcaatttgcacagacagaactcatcacacaaggcatctcttggtctcccagacgtcctcgcacatacgcacaagcaggcaggcatacacgcatgcacgtatgtgtgcacacacaaattgttaagtttggcaggagtgatggggatagccctgggggtctgggtcttcgttttgaagagagaaaaagacagtgtcaggtcactgggctcatggaggcagatctgggccacagccctagcagagtccagtgaggtcagccatagggttcaggtcccttggggacagtcctgtccatcctggatgattcggccccacccacactgtctccagatgccctcctccaccctgccagggtccagtccccttcagtccctgccgtcaccccctccctgggccccctcctgtcagctcattctctttccatctgcgtcgcttcttctcccccgactgaccccccccatccccgccccccagcctcggtgataaaagagccagattggagcgggtgccacgcagcttcattccccaccatatgggcccaaaagccaaatcgtcagctaagcgattaaatcaagtatgtcgaacaaaatgttatgaactgacattatgggtatataattttatgccatttgttgccatctgtttatctaaacagcccccgttccacacagacatacagactcacaccttccctcctaccctccacccgtcaggagcccccacccccaaccagggccagaggtcagggacaagaagacgtgtgccaggtagttgaagaaccaggggctccagggttcttgggaactgcaaggaactagagggccagtagtcccagagagctgaggaataggagagtgggggtcaaaactgctcattggcccgaaagggggcaagacccttggggaacaggaagttagggaaccaggagtcccaggcataaagactgtagctagggccatagcacagggccatggaccagagccaggagagcctcactggcaagcctccagcctggcacgtggcacgtggcacgtgtgtgtaagtgtgtgtgcagggcaggcacaagagctgcagctgtgcacatcacagaaagctgtaggagctttctctccctctgcccctgtttgtcctgggggcccaaggctctcagagcctgataggagggctggctcctctcaggaccacaggcacaggtcagggggccagaggcttaggccattgtcactcatgtctcctcctcaaagtatggtcacagggcaggtgccccatcaagcccagaggatagggagcccccgtccctatacccctccaaccccaaacagctttggagtctgaaatagcccccttaacaccaggcctgggcctctgtgagcttaagtgtgagcccccagccacagatccgcggccatcccaccctcttgggcctctctgctgcctggccctgacctgtgtctgtctccacgcctgtggtctctctgtctgacctcccctgtctaccccctcttccatggtgagggtctctgtgtgtctctctcacctcactctctttctgcctgtctctggctctgttttgacctctgactctcctggaggtacaggcttgggcctcagagatatctagccagagggatagtgactccacagaggagtacagaggtgggaggtggggtggaggaagtgggccaggaagacagcggagcaaaacatgacacacagggactcagatggtggacagtcaggtgaccctggggcactgcaagccttggggctgctccaggagctggaaggagtgtggcctgtgggtgaagaagtgtgaggaaggtgagggaagcttcggcgtaagggaaggacgccccagccaaagggtgcatggggaagacggcaggcaacctcttgcaagatttattaaaacactaccacacacacacacacgagacagagagagagagacaggtcccaggagcccatccatgcccatgcacagggctcgatgacacttgccatagaaagacctcaaggtcactgagtgtgctccctcaccatcagggacagtgttgccagcaagtcaggcattccagtgcccagcctctcgcagttctcccccaggagtgtgtacacaagcgtgtcctccaggcttgggcttaccctccacttccccacacacagcatcacacagccacccggcacccacagagacacatgtctctatctctgttgcaggaagagatgaagcactgcagaggaaagcccaaagtgagcgctggaaatccaaacaggaggaggaaaaaagcagccagatagcctcaagagatgaggctgagacaagacggacaggaagaaacaaggaaccagacagagacagagacagcggccaagggacagaaaaagaaggagaaagacaaagagaagacggagacttgaaggccgatgaggaggaagcaagagtgaggggacgctgcgggcgggagggggtgcccaagacgctgaaagccaggaaggcacgggtggtggcagcggctgaggctggaaaagctcattttgctggtaatttactctcctgcttttgggctgctccgcctgccgctgccgcccgcccgggctgcctgttccaatattagatataaacaagtaaactgtgtaatggatcacattaagcaggctttgcgtcttgaggcaggatttaatttgcatggcagattagcttgtcttcccagcaaggcaccccggggcaccccgagctgtaataggatcccgcctcttagagcccattaaggcaattgagagcgcctcctaatctccctccccgccctgcaccagaatcccctcctgccggaccaaggagggacttgtgatagcggacgcccatcttgtaaccctgtgtggtgcccccatctcaggccccaccttgcccttaaagcagcaaccccaagccccatgggttgccccctttctacctccttcctcagcacccaacctcagagaacttgccctttgagcacccccaactctgcttcagagcaccccgactgccctgaatccactttcccccattcctccaagtgtccccaaactccaggcctgtgctctgacccctagctttctccattccctgcctggctcccccagatcctccagcaatcagtgggcttcctagctgaggtcaggggttagaatgtcttccatccctttcttcaatttttcatttaacagccgttcattgagcttcctgtgcccctaacaatatcattgtctggttgggaatcagagcaagactcagaacctgcgtggagatcaaagttcaacttacaatctggtttcaaagtggggctgaagtgagtgattataacaaccctcatttgtggggcgccttaaagtttatgtgttacatctattaggtcattaatcctaaccttcagagaggaactcttttaaatcagccccactgggccaggcatggtggctcacacctataatcctagcactttgggaggccgagacaggaggatcacttgagcccatgagttcaagaccagcctgggcaacatagggagaccccatctctacaaaaaatactaaattagctgggcatagtcctacctactcgggaggcttaggtgggaggatcacttcggtccaggaggtcaaagctgcagtgagccgtgatcactccactgcactccaggctgggcaacagtgcaagaccctgtctaaaaatcccaagaaattaaaaataagcaaataaataaataaaccagctccattgaaaagatgaggaaacgggctcagtgaggagaaatgatttgtccaaggtcaaacgattggtaaggggcagctccaggactccacccagctctgccggacccgaagtgcagaagtctttctgatataccacagtaccggggtcagcattggtctctggagaggaaaggggccgtcttagggttaaggcccataccagggtccatatcaggaccaggccgatcttcgctatcagtcccctgccccacaactggaccagggtgagtggatcccacagcagggatcagtttcccacttatttaaccaaaggtaatcctgcagtggagttactgaacacttgtgaagggcactaaacaaccaaatgccagtggcactggaaaccagggagactggggtaggtgtagagaaagacctgcaggctgtggagcatcccccagcccgatcccctcagcattggcaagcccctgagctggactgggttgggctggggatggggactgtggagcctgcagggagacggggcctgggtgggtgggtatggggccaggctggtggagaagggtcagttcagtcctgcttagctcacaaagggtccttgttgtgggtaatgggactcccctggcagctttatttgctgtcagtggcttttattaaagtctccagtttcagaccctccaacctccagccattgtgtgtgctcgccctgggccctgcccccatcccctggctagatgactctgaagggcctccctgctctgtctcctgggccccagccaccccccccaacccaggcaccagtctcccaccttcacctcccagagagagggcagaaaggctatgcactcgggggaacatctcagccctggccctccaacacctcaaaatggacccaaatctcccagacgttgtgactggtgctgggggtgaggcagtgaggcagcctgggcagaatgcacactgagtggcacacacgcatgcacatatgtgtacccttgtgtgtccttgagggctgcatacccatctgttccctcagcccgtgtcttcacacagacacacacagaaatgagtactgtttagggattgagaggagggtggggtgggggcttcagtttgattccatgagcatttagggacaccctccacctccaccaggcaccaggtcagaactagagggcaggaggatggagaagcgtcttccagcttcgtctgtcacttgggatactgactctccctgctgccttctctctgcccacagaaagaagcaggcagaggagctaggctgggccttgacgctgggtgaagaagagacacgcaaatgcaccaaatatcagcaggtgtttaaccttacttcacccagattctaacctctcgtttgtagcccagagccccagccctggattcacagcccagaacccaagcagctgaggcctggttcttacacacttccttcccagagaatatacttggggttgggcactggagagacccagccttcaggatgacctccctggggcagaagtttgaagtaaaaatgggcacatgatcccaggaaatccttgctgagcaggggaaaacagaagagggacatagagggaagcccaagggccacaggtggggactgaaggggactcacatcctgcacttgggcttctcgtccatgccccaccccacccctgtggagctagagggaagagaccgcactgcccttctctccattacccacttatgtgagaactgaggttggcataagtgcacagccagtgactgcgtctgtgtgcaattgggtgtgggccactaggaatgtgagtgtgtgtgcatgcatgtgtgtaggggggtgataatggggtccacatgagcatgaacactggggtgtcaatcgtatacttatatgtgtcttctggaggtgtctgctctggggagagcagctctatagtttatgtgaggcgaggatgtctatggtcgaaggtgactgcatgtatttgttgtgggctgtctgtcctgcatacttttgggtatataagagagagggggccgggcacggtggtggctcacgcctgtaatctcagcactttgggaggccgaggcaggtggatcacctgaggtcaggagttcatgaccagcctggccaatatggtgaaaccccgtctctactaaaaatacaaaaattagctgcgcatgatggcactcacacgtagtcccagctgctcaggaggctgaggcaggagaatcgcttgaacccagaaggcagaggttgcagcaagccgagatcgtgccactgcactccagcctgggcgacagagcgagactccatctcaatgaaaaagagagagagagaaagagagagagagagagagagagatccagggggtccacagccctccccagggtcttctgagcccctggctcggcctgtgccaggccatttggggagcgcctgtgctttatggtgcgcggttgaaaaatggaaatgctaataagtagtcgttaaattgtcttgcaaaaatgttaaatgataaattgggtaatgttattgttgaaatgaaatatgtaaaataaatgagttatttatttctaataaatattttgtttacgatatatttgtaggggtgttaattattttccccctcaatcggggcaacgtataaattctaataaagtgcgggctatggtgaaggcagcggggccggtggcggctcctccaggccgggctgctgcaggacctcagcctgtgatggatgcggcagtcacaagcgattgttctactcgctgatattctaggctcccaaatgtggcctgttttgtttcaaaaaaaaaaaaaaagaaagaaagaaagaagaaaagagagagtcagggaagaaaacaaataggccagggtctccatgatgagatggttaaatataccaaggctgggtctcgctccttagctagctgcacaggccctgggcactcctgtcactgttgcagccagctttgcggaaggagcaataaacacataagcaaaccaagcggtgaagaaacttcgtgtcccctaggcgcatcagcagccctgagcactcacgccaggcgaggtgccctccatgattcctgctctcccctgtgccagctggggggttctccaaggaggcagatgcccccatatcctgctgtttctagctcctcctcccttcaagggaggaaccacacttccccttaactctgcctcttctccccctgccaggccccttccaaaccctctgatgcaggaacctccaggactatccatggcctgcccagggggaccctagtttagccccctcaggatccatctgaccagaaattgaactaggcccttgcctggcccctgaggctggaacgcgtatggcgtgcagggaacattccctttcagaacaagctgcctccccccagggccttatctccctgtgagtaataaaactgctgaggcaggacggcctggtgggcaggcacaggcagcattgggtgcaggatgcagggctgttctgtccctgccccaggcatcagctcatccaccctccctccggccctcatccaactcctggagctgaactaggctccaagttctcacgacaagggcaacaagactctaggctgacctccaccttgggatcgcaatcacttagcacacctctcttcaagatggggggtcctgctgcagggcctcagcctgtgatggagtgaccctgggggcaggcagcttgttctgaaagggaatgtaccctgcacccccaatacgtgttctggtgtcaggggccaggccagggcctagttcaatttctggtcagaaacattctgaggggcctaactagggtcccccaggacaggccatgcatagtcctggaggttcctgcattggagggtttggatgcatgatggggagctacaaccccaaggcaggtgggattaggcagattcagggggttcccatgggtccttcagaggttgggtagggtaacaattcttcccaggctggggttccccaaagcttgttcaaaggggcccttacctcttccactcatctatcactgcccaccatccaagctaagccactgggaactgcctctcaaaaagcatctctctgagcaggtgcgacctgtgcatgtgaatgtgtaataggaacaacaggccagggttattgtaggatggagagaccttcagcctgggactaagaggaaggtaaatcacagaggcggacaagagagacacaccacatgcactgcccggttcacgggcaccacactgaccccatacacagatgccagacttggacacacagccgcacatggtgcttgcatcatgcacattcacttgcaaagccccagtcccacacaatcatggtctctaaatcgccaatcccgcacagctacacttttgggcagtttgaatcaggtccaggagctataagggaggatgaccagacaaaaagggacatgaaatcattgcccatctgtggggctctcatcgggtgttgggagggggtgtcaacaccggggagaggtcgccccctgctggaaagacgactgtaaccacttccccatccaagcctgcccagctaatcttacccctaaccctcccctagtaagacatccacacacaccacacatttatccaccacactctgcctaagccccagccaggctgcataactctgggttcttttaaaaacatgtaaaatctttgatcatcatttgtttaaactgtataaataatctactgggttttaataggatttttctatgaatcggcaacaaagcatgaaatgtgatattttcaccatgagtagttgggaaattagtcacctctgtccatggctccctgctggctggagacccccaggctgtctggttcctgtctcacctccacctcaggcctttcaaatgctaccccgacagctcctgcctttttggggtagtagggggaattctgtggtgtcactatgaggaggcctgctggttgtctcctcgtctcaaagcaaagaccaggctgccctgggttcccgtttctctgatttatcagaagtcagggtctttggttctctacgtctcattgcgggctacagtgcaggttgggatggggaacagggatgggcagtgggtttaaggatagttatttggggcagaagaagttcgagggcagagagttggagtcattcacaattttcccatcttccccaaagttctgcacacttgttcactccccaggctgttccacactcacagcagcaggacccacacaccccgtcaaggaggctgggcctgtctcctgaggtttacaaactgcccgcccactctgggagcaaaaggtgctaagtctgggagaggaacaactgttgggggcaaggaagggtgagagatggagaacagatctagggaagcaggaaatgagggcttcagggatggcagccaggcagggatcagagatggaggaatcagagataagaccaggacttcggagttagatggatgaggcagagatggtggaaactgcccaaatatgcaagcgaggctttcagtccagctcccaaatgactcctgaccccagtccccaccaccaagtacagcagtcccaaagaatgcctcttacgcctcactgccctgttgggaaaagccagtggcaatgccagtgaccaagagcctatgcagcagggctggccctgagctacccagatgggtcttgggccacccaggtctcaggccaaagcctggtaagcctcagcctcagagctgggcatgggccatgggggagggggttgtggggccccctccttgccctgaaccacagtccacatgctccgagctgagcagggccccttcctttctgccccctgcccctggccctagatgaataaaactcagggggcggggggagctattcatggaaccagagaatgtgtgagctgcccagcagccccctctcattaggggacccccgtcaggtggcgctcattaacttcaagttgtctcttgttttaaaactcgggtgaggggggcagggtggaggggcacattgtctggctgctgccccagagagattaggcgcccagggggagggggcaggcaaaggccctttaattagttactttcaaaggttccctgtcccctttctctcgggtccccttcctaacccccggctgggcccagcttcgaggggggcggtcttttctgcttggcagagccgcctggtcactcggcttaaatccgcagtctttgtttctgcctggacaatgggcccagcacatcagccatggaggccacggaggaaacagggccttctcctgtgcggccaggagccggctgagtggggtgcatcctggcaccagcctgcaacctggggcccccaacagggggctggtaccatgaatgcttcctaggctgaaaggaagaggataggaacacacacacacacacacacacacacacacacctcaagacctagctattacagaggaaaaaggagaaacaaacctcatgtcagggtctccttcacataggaagtttctaggtcttagggcctggctcaaggatgggggtgctcttcctttctatacagcagaaaaaatggtttatgagtcaggcagatctgggtcccaatcttagctctactactcatgagcaaataattaatctctcaaacttcaatttccctcatctataaaatggagaaaataatgactgcctcttgggttgtgaggattaaataatctaactgggtaaaagggtctggcacagtgcttggcacacagtaagggctcagtacctgttagtttcctccttatatggttcctatggccagagccttaccctacaccctctactactaaggagcaggtgcgtgggaccctttcagcttcagggtgccggtggccgacacggactaagctcctgctgggacacacatgcaggaaaagactcagaaagcgctgagtgtgcagacatgaatgaggaggaaggagaatcccagattgggagtgatggggttgggggtgggtaccaaacagaaaagggtgagtgggaacatgaggaggtagaggagagtgagccagctctggagatcctgggggggtggtctctgggggagggattgagaggctgtgttgcaggaagagttggtgatttgcttgggtcagcagattaatggcactaacgaagtttccgagagcatggtgaattggggggtcgggggcgtccatgtggaaaggcacatgactggggattgatcaggctgaagatgaaacagagaaagcttcccgggcagcggaggtaggaaacgccaaaaccaattactccccggcccctctggcctccagatctctcccctagagaggagggaaggggctgtgacctctctctgtgggtgaggtcacacacataggccactcacgtgggtaggtgacgccgcaggtgcacaggggaaggtccacacatgggaacgcatgtgcacaagggaaggtccacgcgtgggaatgtggagacctggggtgtgatgacgttgcaagttctggtctgtatgcccttgtgggtcatttgactccccacaggtgtccccacattccacctaagtgtccctatccagtcaccacacttgtcaccaggaggagcaaggaacccatggtgatggtggaagtggaagtggagggcgtgctgagaatcttcttcattcagttttggccttgagtctcatctccacaaattagctagtttgagccttagtttctggtcagagcaaccctggattaccatttaggtggctaattccttttgcagataactgacaatgtatcagcctctggttaacgggagtgcaccccacttcatgaaaacccatccctttggaaataaccaatcacacactggttgtttttaacagcccctgatgtttgttgaatgaaaaagtgtggcagattgggcagccctctccaggctgaagaattcacaaaggatatcaaagtaccagatcaaagggcaagcaaacatcccttacaggacctacagaagcccttggttaaaaatcaacaagaggtgattggatgtaagataagggcccttcaaactcacaacacgaacccactagacgtctacacttggggtccttaagggagctgggggtggggaatgtggacagcagggggcccagtgaggcctgaatttagctcttccatgtggagggccagctcccttcttggcagtgtgtatgctgtgcggtgtttgcaccttcaggttcaggacagaatttgtgtttcatgccagatgttgaatggtgttattatagttattagcaattatgttttatcataaaaccacttttcctttaagtatgtgggtaaaaaaattcagctcttcttggagttctatccagtctattcctcttggagatgacttcaagttttataatacaagtccataggcaaatgggattcaagccctggacattcgcaggagtccctcttggaaacttaaccatttcaagcagagagaagccgctacactgctggggtccagacggctgtcctatgcagggaggttgcgctccaaaggtactgcacagtgtcagtgctccctccctatacccctcacctgtcccctcccccaaccttcaacctcaccaatgcagtcactggggatcctgacccaaggatgcctcccccttctccatgcccccacccccatcccacccgtgcccccaccacaatgtctacgagggagaccggctcctcttggggccttcaagcttttgttagggttatgtgagccactagtgacaagggccctgaaacccaactcgaccaaactcataaaaggggtcactgtctctttaattaaagttccctgtttggaggttaaagacaaacccgtttgatggtgcaggtgtgtagagtgggggtgggggagaagggtggaagcggctagaggaaaacagaattctatccttagagggaagtagggaggggcctcaccaggggcaggctggccgagcgatggaaagtctgatgggggtccctgagggtccccagtgtggcaagggtcacaagggggagaaatcaggcaagaaccgggaatcccagggccagtgcagcgagctctgactcccctgcgggcatgcacatgctcctggcccatgcacacactacctgccctccatgatgcccgactgaccactccccttgcccactcttccatccctcccttttccatcccaaaagttctccaataaaagaggacccagggcctaataccatctccccacagaagcaacttcatcacagtttaacataaaaagatcagctggtatcgacccgtaatttggacccatgccacgctattggcaggaagacagaataagttagggtggccatgtttcaaaaattctctgtgtgcactcaatcacggcccagggaaggcgggtgggtgcgtaataacccagccgcgctctccatttcccctgtagatcaatgctaataccaggaggccccggaagatggatggaaccgacaggaaccttgaaatcccgacacgggggctggtgcctcaaccgataaaggatttcttcactgctactggggcagggacactgaaaccttaggggccatgggaagacagtctgattggggacaaagagatgaggagagggagcagcctcttctttatgctcactgacacccttagtcactcacgtggccactgaccgatgctcgctccagagtcactgacaggcacgccaaccgcggcacacaccatcgctcacactgtacccagccaaaagcaccaacgcctccccaaagacacctcgactccctgcagtcccacaaatgggtccctgtacacacgtgtacacatgcatgtacacaaactcaaacctcaacaccagaatgaatcaaggtatctgacacaggcacacttacctagggagatacagacacatccaaccattgacattacaccccgtccccgtgaagcaaaaagagatgtgcatctacatgcatatgtacttctctgtctctccctccttcctttccatgccttccttcttcccatttccttgtgattctgtttggaaacttgcaggctgatggtcagtcagggaactttccaggacccattggatgtaaatcactaacacaaaagtacaccaggcacacagtcctggtcaaccagactcccagatgggtgcacacacatgctgcaaagtgggagtcctgggttccaggaacagctcaacatggacttgctgtgtggccttggacaagccatttcctctctctctctgggcctctgtttcctcatctataaaacaacaggttgaactgggagatttcgaagggccctttcaggtctgaatttctctgtctattgtggcagacacaaattcctgccaagagttgcacacaaacgcaggcagccctgagcactcacactggctgtggtggcctgaagccacacccacaaggacacacaggggaacacaggcacacagggctcttcccagcaagggtgcctgcaataggggcagcagctcccatccttcccagagctggaagtcaaggagcctcagaacccactcttctgggagcaaagaactggggacaaagtagagagatggagcattgttgtgagtttgagtgggggacagagggggcctttcaggctgctgtctgatttccttccttttgagctcagtcccaggactggagccatttccacagcctcgagctgacatcttgtggccatctccaatgattgcaggcttcacaaggagacactcagtcccctgcagagaagcatagccctgcccaacccagaaagtcgttggcagaacactgcttcccatccctgatgccctgtcctatgcccagctgccaggaaaggcacaggggctgacttgttcctccagcgcggacaggtagaatacagggggctaccttgggaaaagcttcagggttactgggtgacaaaagggactggaaaaaaaatggatgcttaagggagctgcagcctgtggtagaaatgtagtcccacattcccacagcctcagtctaaggtaaggaaacatggcccaggcccaggggactgcagtctagggaggcgacacagcctttccccagggatctccaggtgaaggaagagactcagccctggcctcctggaagcccagtctgatgggaggcatttggccctcctcacagacagccttagctttaggggaagaggggaaggggagagacatggctctgccctaatggatcttctcatcttaaggagagaaaaacctcagcccacagcagtgacctcagtcctatccgaggagtatggaatttgggggcttggaagcccccagctatctcagcttcccatgccaagccctaatctggtagtctgaaaggaacatgatttccatgcctgcatcagcagcctggggctgggcagagggttggagcagaagttttggggaagtgggccatccagagccagccccattgattctggagagacctactgggcaggggtggggggtgcatggcaggggaggaccacactttgcagatcctcccagaggaagccatgatggaagtccctggacaaccctgggccagttcctcctactagccagagcctcctgccacctctggagccaggtcttaggaccctggagatgacaagtcacacacaaggcagaggccaggggttcccaacctggaaccagggaaccctggaggtgctgggttgatgagtttgttataaattagagactcgttaagagaaggtgagaagggctcagtaacagctttcggggtccatcttttcgatttcttgttcggtttgtttattgctattgttcctgtctcataagcttattgcaaaaccagtaaaaatgatctattccgaaagggaagttgctcttttgactggaagctgcctcttggtcctggaccccacccctccccctcctggtggctgcagcctagcctggttgaccagctgtctcctgccgcggggtcagcagagggtgccagattcctgctcactagaaactgtgtccacctgccatgtagccaccctgggctggcctcaggcctccaacctggtcccatcaccccgatgaccgctgcaccccagccgtccagctcacctctgatagacacaccagggctgttatgggggaacaggaggccaggataggatccaaggacagtcactggagtcttaagttttgggcgtgattttggctcagtttcccctctgcgcctcagtgagtgtttgcctttagcatgggcttccctgccatgaggtagccctaagggctaatgattgaacaaagaggcctccaaggttcccaagaatcagaagtcctggttttgaccttgaaggcagaacagagacccctggccctttgcacatccaggaacctagttacagttgggggccaggggttcaggaatcccaatcccgaatgagttggctctcaccccatccctgttctgcaaataacattagttccgtttagtgactgtaatattcctgagacactgcagatttctctgggctactaacttggtttcagagtctttcagatgattattgtggggagtacagggttgagggggatcaagaaaaagccaacagactccttcactgattcatacagaatttcagagcgtcagagcctgaagagacttcttttttttcccccctgagatggagtttagctcttgtcgcccaggctggagtgcaatgtgcaatctcgacccactgcaacctctgccccccagaatagctgggattacagatgcccaccaccatgcctggctaattttttttttttttttttagatcgtgcctcgttctgtcgcccaggccacgtctggctaatttttatatttttagtagagacggggtttcaccatcttgcccaggcttatcttaaactcctgacctcgtgatccaccctcctcagcctcccaaagtgctgggattacaggtgtgagccaccatgcctggccgcgaagggacttctgagatcactctgtgaaaccccttcctgcctcaatacagaatcagggtcagagacctgaagtgacttggccaaagtcccacagccagtgagtggcagagccaggatgggaatccaaggtgacagacccttgcaccactgccctttatggcgccctgcccagcatcttcctgtgtcctgctcatgtcagcaagctctgcctccttcctcacaagccagtccctgcagccagcacaggtaacagaccttcctttccctccctgctgtctaacatcaggcctattttctctaaagcaaaatcggtctgtttccccaaggctgacacactggctctgccagagggcccagataaggggaaaaccttgcacggcggcctttggagtttccctgtcacttcaaagagctaacatcaacacactcttcctttatctatttattttggacaaggaggacaagaggtgaagacgggtaggaaacagtcaaagttgtcaggaagaccatctcaaggacttggcacatcttcagagagaagcacatcaatgttttcccttgatctctgtttgtttatgttaacaaacactcaatatagtgcttgctgcatgtcaggcactattctaagcactttgtatattcatttattagtttaattttatattaacttattatatatcatataattaatttactaaatcttcttaataaccctgaggtaggtactgttattagttccactttacagatgaggaaagtgaatcacagaaaggcaagaagcttgcctgaggccacgtagctaatggcagagtcaccattcaaagccaggcagtctggctcttacccacggggctaggatccttctctttatagaagcatcagcacaagcgttggtagggccccgtgaccaggagaggaaggaagattctgaacattcagaaaaaatcagacattgttggggccctgtacagtgttccctggagcttatctcttgttaattactgtcatggcctcttctgtccttagcttgtttgaaagccaatgttttatggttggggtgaccaagggaagcataggcagcctggaccttgggcccctcccacactagccccattctggggaggcttctgggttctggaagccagggcaggagtgtggtgctagcacccactgccttgttgctcacagagccctgctccctcccacgcagctgcctgcactgacatctctgagagggcctttgattaaagagacaagtgactttgcccattctattgatcagaataaattactaggaactaatttatgggcctccccacagccgatgacatggtggattgtgcgctattggtcagtaaattggattgtcaggctagattattggttcgtatacagttatctctcatagcaatatcaggcagcccaggtacaagagtgaaatcctttctctgctgccagatgccaggatgtgacgaggccttctcggggggctggtggggaggggcagtgagggaagaggaggagaggggaggagaggagaggcgaggcctctgtgcaggatgcttattaattagtgcagcatcacagcattaaaagaacattagtgtggaatcgtctgcagagtgatggggaaatgacattgcaggcctcctcctgattctccagctatggctctgctggggagagcagggagggggttgatgagcagacggggggatgggaaagataaaggttgttggggggataagaggccaagaagaggggaagagaaaggagaggccacatttgctgtgaattgcaagcagagaaggtctgctaagcgccagcgtcgctgagccccacgcgggggaaatggagctgccgttctgctccgtacatcacagccaacgatgaaaagttctagagctgggatttctcaggcaatttggccagtgatgcatggggcagtagatcctcgcgcactcttccgtgcttctgccaagccagcaataacaaaaacttattttttgccagggaaacggatatgagtcaggcagcccatcgggaattaggggggctttaccacgccgctgcgatttgtaccactcggctgtttccccgagctctaaagacctgccaggaggtgacaaaggcgagacaatttcgagttcacagtcctgtgtcctcgaagcataacagcatgctatcgaaggggactttcaggggctgtgggttgcaaagtcagcggtcttttcccccaagctcactgggcagtggggagatggggtgaggagaagagccacagagagctgaggcactgctgtgaatttctagaagagatgggcccacagctctgccctcactgggcatggccagaaggggtgagaaggggggtgttggagtgccaacctggccccagggatgagagcatcagcatcccaagtgaatgccctctgggggctcctgccatgggctgccggggttgttgccacccgtccaaactctgggtcatccaatccctggagaggtggacgcggaaaccccgcttggtcctcttttctcactctcacggttagagcatgagcccggaggaggcctgcactttctttgaggcgtgatcaggaacacagataacctgttctttgggctacaggccccaggggaaatgttcaaatggagcactgagcccttctgactttagctatcattcatctgacactgccagtaacccggcaagtaaacacccgctggcagggaccctgggcctccagcttgcttgaattgccactgagaacagctgcaaggtctcatcagtgtctacagtgacaccaggatcgccccccacccaccctacctcccttagcaggcgtggggcacgccgatttggatcctgagaaaaggcccagcaccacaaactaaaaatagtctgcacattccaaaagacgaagttcaagggtgtagaagatgcaaccccttccctcagcctctgcatgctttttgtgcccactccctggcctctgtgctctccaaaatttaaacttacagccctcggccatttcagcatgagtttttatcctggtcactctccttttctgccctccattgataaacaaaatcaaaggggacagaccctcaagtccccttaaggagacaaggttgggctcaggccccaaaccccaaggcagtgccaccccaccacttctggcatgacaaccacttccattacaaccactatgtggaaatgagcacagaagcccccagagtacctgggcctccaagatggaaaagtttgcaaagcttggcaaaagaaaagtgggcctgcaagccggtctataaattagagactcattaacaagaggcgggaagggctttgggggcctgcgcctttcgatttcttgttgagctggtttattgctattgtttctatttcatacgtttattgcaaaaccaataaaaattatctattaagagcaggaaactcatcttttgacttgttggttgagatttctacagaataacctttaactggcccaacatgtctgcaggagaggagaaggctcacgtagttaccttgagaggccaaccaagaagacagtaggaaggcccagcccttggggtggggaagggggtggccacaaaaacaagaacactgtatccagagcctgccgagggcaaagccttcccactgccatcctaaccagtgggaagccatactgtgttttacctatccaatattttacattttttaattaattgaaaacatgtaaaatttgagacttttcatcatacatgctggtatctggcttctcttttaaaatggcaagatcagccgggcgtactggctcacacctgtaatcccagcactttgggagcccaaggcgggtggatcacgaggtcaagagattgagaccatcctggctaacatggtgaaaacccatctctactaaaaatacaaaaattagctgggcatggtggcatgtgcctatagttccagctactcaggaggctgaggcaggagaatcgcttgaacccgggaggcagaggttgcagtgagccaagatcgtgccactgcactccagcctgtcgacagagtgagactctgtctcaaaaaaaaaaaaaaaaaaaaaaaaaaaaaaaaaaaaaaaaaggcaagatcattctggctttcattcgcacctggaaacaactgtttctaggagagagacactgtcttacatttttttttcttttgagacaagatctcgcttggtcacctaggctggagtgtggtgatgccatcatggctcactgcagcctcaagatccctggctcaggtgattctcccacctcagcctcccgagtagctagggttataggcgcgtgccatcatgtcttgctaacttttttgtagtttttggtagagatggagttttgccacattgcccaggttggtctcaaactcctgggctcaagcaatccacctgcctcaggctcccagtgtcgggattacaggcaagaaccactgcacctggtctgcagcccctatttagaagaggactaggttggaagggggagagagttaaacatttatgaactattcttgaaataaagttctgtaagaatgcttctaaatcagactaataaaatttctcttccaagatcctcaaaggaaggcccaggtctagtaccagctggaagggaagggagctaacatttcgttgcatgctgatgtgccaggctcagcactgactttttttttttttgagacagagtctcgctctatcacctaggctggagtgcagtggcgcgatctcggctcactacaagctccacctccagggttcacgctattctcctgcttcagcctcccaagtagctgggactacaggggcccgccaccacgcccagctattttttgtgtgtgtgtgtatttttagtagagacagggtttcactgcgttagccaggatggtctcgctttcctgacttcatgatccacctgcctcggtctcccaaagtgctgggataataggcatgagccaccgcgcccagtcagcaccgatcttttatgggcattatccctcttttaccaaaagggaaattgaagctgggagatgtcagtaatgcgctcaggggcaaaggataatataacccctagcctgaaaacaccagccctagaagacaccagtaaccatctcgccagctttaaagaagaaatggcaggtacacagtgtaattctcccaggcctccaggtgccctgagggaagattcacaaccaattgagggaaaatccacccaactgtgacccaagttagaacttgcctccagagttaccaacacccctaaatctagtgaaagggaaccacagggtctttaataatcactctgtcaggtcacgggatggtgactaatgggcctagaggaggagatggtgaaaaacactctaggaaataaatttgggtgattaaatttcaaggcagttcatggaacagcaatctgaggcctaaactaagccatcaagttaccaagagaatcaagatttcaatttaaccgctgctgcccaggaaccaagcctgcgtctgcaaagtatttgtgggttagaagtaggtaccctccagaactttctgagtaactctggcaccttcctaacctcagccattcctcccaaagggccaactagcaataagtcaaagaatgcgtgtgtttctccggttgtttcataattccaggtctttaagtaaaaagaaaaatcatggctcaccgagtaagggaggtacgggttgtgggagggccttctatcaggcgcaggccagagccatacacaaatctttgagagactctcagtttactaaactaacaggagagcccaaattcctccaattccctgctatttcaattgaatgctatgttctctgattggaccttatccccaaacagtcatggtctaatgtctggggcataatcccccctccaactgaatcacaccccaggtgctgttaagctttgcaggtgaacacaacccaggctctaaggtaagaaccctaggtctgattccccatcagatactctccatgctcactgtttatagtccctggggcatcactactttaacttgtttatgtctttttgagtaaagtcagtgtggggagagctggagacggtggcaggcctctgtaatggaagaacccaggctggaagagcttagcaactgcagctgctcccatctctctctgtttctcaatctcttcctctctcgagatttcacctctctctgccctggctccaccagctgtttcctgcaaatccagctgagacagctgctggccccaccatgctaaatttccaggggccctggaaccccttggctgtctcggcccaaatgtgggcaaatctcaggcgtccagacaaggctgagattgttcaaaaagcacttcgctaggaaactggggggaacgccaaaaaagtaaattacaaaggcagagaaacagacaacttacggaacacagattccttccccagcataattcaagtctagacccagaatagtttgttgcaagaacaagaggctaagaagggtaggaagaaaaggtacaggtttttgaccccttgctcctcattcttcctcaattcattagggcttggagtttagcctgagatagaggttgttctgggaaagggccatatgtgcaaagtggcccccaaatgctgaaggagctgagaaacaaagaacgaggcaaacaaatccaatttgtcagtaaagggtgttttattggggggaacttacagagagaagcatggtcttgcatggatgcaagataggtagatttctgcactgttactccccagacccatggcttatataccatagagaaagggtgcacacactccagcaggacaatgcaaggcaaccctccggaagaggcaagaatgctacatgcgtcatagcctataatttgtgcgataacatcagggttgctttgttcttacactagagacaaacaaggtaggaatcaggaggcactcaggactggggctactcataagttaacatggcgggttagcatccgcgatggagtcgctcttgtctccacagcggttaacaccattgccatgtctcattgagttctcggctttcagaacaatgccacccaggctcctgtctgaatctggctcccaaatctaggctgtgctatgtctgctctgccccctagttggggctcctgacctggcccctgaacgaggaatgcactcctctgccgaccttcttatgccggttccggggtgccccttccagagagctcagtgactctgctccacccacaaacatgcgaccttctccccaaggctgcttctacctttccttaaagctaaaattggccaggcatggtgattcacacttgtaatcccagcactttggaaggctaaggtgggagaattgtttgaggccaggggttcaagaccaacctggacaacatagtgagagcctatgtctacaaagaaaattttttagaaagctagctgggcgtggtggtacccacctacagtcctagttacttgggaggctgaggcaggaggatagcttgagcccagaagtttgaagtcatagtgaacaccactgtactctagcctgggtgacagagtgagaccttgtctctttaaaaaacaacaacaaaaaaagctaagatcttggtctcttggtagctttaggtgctgggactcttgggttgatgtctgtctggcaggatggtggtgaagctattactccagaagcctttccttctgagctcccagccctagcaatccctcttaggtcccctgttccccaccatttagatgccagcccacatgaccttcctatattccactgctacactggagctaacaagcacaaatacgtatcaactatcaccaagaattgagaaactgttctctcagagcacctccagaagaagtgagctaaatgctagatgatgcctccaattcccatctctagatgtaggttcaacagagttccacttccacatgttccatcatttattggaaatttccatcaggctcattcatcagcgccttagcatccattacccaacttgcccccaagctaacgtgtcagcctactattgccaggtagctggaatccattggtccaaccatgggctttggggttcaaattctggtcctgtcatctattagctggaagacctgagttaagtcgtttaactggaactgctttttctgtgacattggaaggagtgttttgtagctccctctcatggttgataggaggaactaataaaattgcatctgtaaaccatctagcattttgcctgacatatagtaagaatgttaaaattaatatagatatacagatatactccctttcctatgcaaactggtgctctataccagctctccaatatccttcggtgacaccatcatttctagaaaagtagattatcttggatccatgtgacagacttcattcacatcataaattaataaattcactttctggttttaggcattagtctctcaagcctgatcaatatgcttttgccactaggacaaggatctgtttctggttgggcagaaaatgagttttctgcacccaaaaggctgagggtcagagaaaattatcccagtctatggctgttcccggagaaaactcccaggagacagcatgctcatcacccccacaactggtcacctctatatcagatacccctggatttgccatctctctttccatttggaactgttctacgctgggctcagagtttcacatctagtaggtgtttaggacctatttgttttgtcagtgtgtgagtgggtgggtggatggttgagtgggtcaccggaaattcgtacctctttttgaggcagggaaggagcagtggtggcctagcaaccagggaatctgcctagcaacgagggtgggaggcagaggctgctggaatagtttagaatggctaacaaataggcagatgtaaaagagacctttctggatcttgtcaagttggggtctcaggccaaaaggagaaaggagacccacagggatcaggaaagaagtgtgggaggaagggctgtatttgaaaatgttacaaactcaaactggaaaaagcctcacgccttttctacatgtgctcaagcagaaggcacccctccccattctcaccccgaggaaggtgatacctcagagtagacacatttgaagagcataccaccttttctgcactccaatttgcaagggtacaacattttaacatgttctatcaagtctggaatttttatcaactcagaaagctacaaccccctggaaaggatgaagacctatattcgcttaaaatgaacccagaggcagattaagcgactttccaatacggtctgtctagggcaaaggaaccattaggaactcgggactggtctgacttgaattgtttccctctctccttcctttccaccccgtcacaggacagggcttggacatcccctcctgtgaactctcaagaccctcccctgaagagaggaaaaattgtcatcagcctttgacctgattaataattaaaactgctgagtttgaactgcccctaacagtgaggtgctccaaaaccccagcaaactttaacaaataaccagcttgctcaggggagagaggaagctttattcactagacaaactgacaattagctgctattcaaatccccctctagtcctagcatattggttctcctttgaaagtggctcggcatggggtagaatttttggccttgagtttagaactactgtgcataaaatcaaagcaaggaagccagcagttgagagaatagaggctatttggggattagtgatttcggagttagatttctaataacttggtgagtggtgggttaggaatgtcctccaggagcatcaggcagtcaacactgtgggacatgtcctcacattgaactggaaagcagtgagtcactaccctagagagcggaaatacaaaatggcatgaaataactgcaaccgcagcaccacatggtaatctgccttttgtaacctctgcaggctacatcgcatgcttacaacttggggttatgtgtgaagccccaagtttggctcaaagttttctccccaaatagccacaaatatgggcacccccacattagagaacacattaatggagaacaaagggaggagagtggataagatgggagaggagagaaggagggggcaggcattcaaactgctcattttcccctaggaagcataaggcccagccactacggtggatgagcaaagcaaattggtaatgggtgatccagattgcatcgcagagtcttgcctgctttccaggcacttactaaactttataactcttttgggggtaaggcacataaacccagggtttctcattgaccagtcggggagagggagtctgagctcgctggtccaggtctgttgcttttccacaatactgtagtccatcaagattttttttaatgcgttttttaaaggagggctggaaaatgatgatatgagcagcagctgctgtagattccagattgcaatagcccagcctagaaagcactagaaaactcagtgtttcagagatggagaaggcataagacagaggtccacagatggatggctgcttatcctaggcaccctgatgtggaggggggaattctgtgtggaaaagtttacctttatcctttttggttttaattgaagtacaacttgcagacagtaaaatggatggttcacagtgtctggcttgatgaaggtatactgtatgtgtattcatgtaaccaccagccagatcgaatgtgaagcatgacccccattccagaagattccctcgtgtctcctcacagtcaatatgcatccacctcccaaaagtagccacattctaccctctctctaaataagttttgcctgttttttaagtttcatagaaatggaatcacttggctgggtgcagtggctcacgcctgtaatcccagcactttgggaggccgaggtgggcggatcacgaggtcaggagatcgagaccatcctgactaacacggtgaaaccccatctctactaaaaatacaaaaaaaaaaaaaattagccgggcatggtgacaggcacctgtagtcccagctactcaagagactgaggcaggagaatggtgtgaatccgggaggcagagcttgcagtgagcccagatcgtaccactgtactccagcctgggcagcaaagtgagactccatctcaaaaaaaaaaaaaaaaaaaagaaatggaatcacttagtatatactcttttgtgtttaccttctcatgctcaatatatctgtgagattcatctatggtgttgtgggaatcaatagttcattctttttcactcttgtgtggtaatccgttgtagaaatataccacaatttatgcattctactgttggaacatttgtgttacttccagtttttgtctattatgcataaaactgctatgaatactcttgtgtctgtttcatggtggatgttagcactcattttttttcttttagagatgggggtctcactgtgttgcccaggctggagtgcagtggctattctcccacatgatcatgatgcactgcagcctcaaactcctggcctcaagtgatcctcctgcctctacctctgagtagctgggactacagatgtgcaccactgcacctggttttgttgttattagcactcattgctgttgggtatacacccaagagtggaattactggaccacttatttataaacaaaacaacctggactcaaagacagtagggaccatgtctgtcttcttcactgctgtatctccagagcttgttgcaaagtaggtactcagtaaatatatttggaatggataaaagaatattgatgaaaatgtcaacttttccaaaattaatggacacatttgatacaattctaattagataacaaaaaagttttgatttggaggaaaaattaaataaaatcatcctaaaattatatagaaggataaatgctttagaatggcaaaaaatatgttaaaaaaagaaacataaagggtgagacttgtcttcctagacaacagaatgtactataaaaccaccgtaattaaatcaatttggtattggcatgggaatagataaatggatcactggaataaaatagagaacccagaaatagaccaagtatatacatgaaaatttactatatgacatacttcgtgtttcaattccatgaaagaatggattatttaataaatggcaccaagacaacttccatctggaagaaaataaaatgggactcctattttataccacatacaaatataaactccatatagattaaaaacaaatgtaaaaaataagacaataacaacttggaaatttaggaggctacatgttcaatatggaggcaggaagggaggtgctttgtaaaccaagactggaaatccagaagctataaaagaaaatatagacacattttattttaccttataacaattaaaaaacacttttgtatggcaaaagataaaacaaagtcagtagacaaacaacagatttgggagaaaatatttgtaatgtataggacagatgattttttaaaaataaaaagattttataaacggacaaaagggatacaaataatagaaaaataggcaaagggcatcaacagacacctcacaaaagagcatatttaaatggtcaacacacatagggaaagaagctcaaaattattagtattcagagagatgcaaattaaaatacaatgagatattattttataccttttagactagcaaaaattaaaatgagggtaatttccattgctgacagggatagaaggaaaacagtttttatactgctggtagaaatgcaaatttccacaaccctctataatctggaaacatctttagaaattgaaaatatatattccctttgacccatcaatcacactcttatatcccatagaagagcaaatgccaagagattatacatacatacgtacacacacacacacacacacacacacacacacacacacacacacacacacacatacatattaggattgtttgtactggccattcttctccccatccctgaggaaaaaagacagaaacaaattaaaacccagtaataggcaccgagtggtatgctagttaaaaccaggaaaaagccctggtttgcagtgtttgcagatttctatgatgtgaatattcccgtcatgcctcatttcaagctaccagcctgatgtcactgagtgccaggttggaaagaaatgtgaacaatcagctccagaaatccaggagctccagctgagccacaccttgaataagttatatatagcacagccacacctctggctattaaaaagaatgacgggccagacatggtggctcacacctgtaatccaagcaccttgggaggctgacgcaggctgattgcttgagtacaggagttcaagaccagcctgggcaacatgacaaaaccccatctctataaaaaaaaatacaaagaattagccaggcatggtggcttgtgcttgtagtcccagctactcaggaggctgaggtaggaggatcacctgaacctgggaggtcaaggccacagtgagccaagatcttgtccctccactccagcctgggcgacagagtgagactccatctcaaaaaaaaaaaagaatgagattgtattgcagaagtttgcttggtagatttccaaggtattgttgagggaaaaaaaaaagcaagtggcagaaaagtgtataatatcatataatcatattttttgaaatatatatagacaaaaaaatctatatatgtatgtgtgcattctatttgcatatgattgtatgactttgagaagatggggaggaggaagccaagcaaaaagaggaagtaaaaagggcacatttatgcattatacatatgtatatagaagtaagattctttttaaccaaaaaaagaaagaaaaatatattgagcccttgaaacatgccctgttctgtatcagctgcttgggaatataggaacacgtgagacatggtttcattcttacatctagctgaaaatataaaagcaaatgatcacaggattatttacatatttatttatttgagacagaatctcactctgtcacccagcctggagtgcagtggctcagtctcagctcactgcaacctctgcctcctgggcttgattgagcaatcctctcacttcagcctccaaagtagctgggactactggcgtgtgccactatgcccggctagtttttgtagctttagtagagacggggtttctccatgttggtcaggctggtctcaaactcctggactcaagtgatccacccgcctcagcttcccaaaatgctgggattacaggcgtgagccaccgcacccagaccacagggtaatttattatctccaagtaggtgtgaaataaatgccacaatggaaggacaagcaaaataatagaagggctggggttttcgttgttgtagttgttttttaaataagccccaaggatcctcctccacccaagcttgctgccaagtctagatctccttcaccttcttgcagtgggtcctggaaccagcctgctttcctctccttggggaggtacctttgccagcctccccagctcctcctttcttgctgctccccaaagacaaatacattttattttaaagcttttattgctttgctgctactgatttactgctaatcaccatggaaacagacgtggaaaatataaacaacacgattgaggaagccacacataatcaagaatcttacaggtgtaacaaggtttggttcccccgcctgcctcttgactcctttatttttggtttgtctttttttctttctttttaaattttttttgcagttctcccatctgtgccatcgactcctttctgaaatggttactggaagccctcactgggtgctaccctccctttcaactctctctcctttctctctccctctctccctccctccctctctctctccttgggtagccaactatccatcaagcaagacccactcagagtggccatcagctttacattggggagggggcctctcacctcacaggagttctgttctcccaggcctctcttttattgggttttcatctctgtataacacattaacaaataggccagacaggtaatctgtgtgtctccaaaccaaggattagctaaagcccagtaaatcccagttggccccagcagcctttgtcttcaggaagcaccagcccctgatgaattctccactcagagaagtcccctcagcccatcaaagtcccccatcaccacctgatacccctcctctccaaacattgtagtctccttgctgccaactggccactttttgtccggctctgtgttccagtgagcatcctccgcccgggaaaggctagcttttttttttttttaagacagaatctcactctgttgcccaggctggagtgcactggagtgcagtggcatgatctcagctcactacaatctccatctcccgggttcaagtgattctcctccctcagccccccgagtagctgggattacaggtggccaccaccacgtatgactaatttttgtattttttagtagagacagggtttcaccatgttggccaggctagtctcgaactcctgtccttaagtgatccgcccgcctcagccttcccaagtgctgggattacaggagtgagccaccgcacctggccaaagctggcttttatgctggtaccattgctacctcccatttaaacacagcttatgaaaactcactgtgctcaatatctttaaatgattgtatctacatttcatttacttatgtatgtatttatttatttattttagaaacagaatctctgtcacccaggctggagtgtagtggtacaatcatagctcactgcagcctcaaactcctgagttcaagcaatcctcctacctcagccttccaagtaactagggctataggagcatgccgtcatgcccagctaattttttttttttttttggtagagaaggaagtcttgatatgttgcccaggctgatctcgaactcctggcctcaagtaatcttcccatttctgcctcccaaagtgctgggattacaggcacgagccaccatgcccggccccacgtccacattttatattgacccagcttgccagaatatttacataaagctctgaatcacacaagaagacagcccagagggtctgtttacataggaaaaagagctgatgatttattagagggtctgaggtaatgtcaattccagggggtcagctggaaaagagaaaaataggggttggaatcttaatagtcagatgaatgtcaagcaagccccatctgacaaggggaacacaggtcagaggtggcagcagcaggacagaggaatcaaaggaaactgcagtgaatcaagggtgaagcttcagactgggcagcaatatctcagtagcctacaccgaggtgagaccacacacaaccatacaactgacgagtgacattcttggacaaggcctaactgtccactgcctgcactttatattttatgttgtttttaaccttcattgttttcctgattacaaaaataactcatactcattgtgaaaatgtcaaaagttacagaaacatataaggtagatgttaaaatcctgtctttcagagatataaccacttttaagttgaggtgtatttatccagattgctttccctgcatatatgaatatttaatagatataaatatatatgtaaagtttacaaaatttatttttataataaaattaaaaatgtaaatataatataaaaatataatataaattttgaaatttatataaaatatttttataaaatcatagccagacttagaacttaagcaaccctaagcctaaaaatggttactctgtcccctggccctacacatgtataattcaaaattaaaatactaaacaaaaaaaaaataagcaaaaagtcaaagttttaattttttctttaatatttatttcagtattttttaaatgtattctttcaaaaagttgtggggttttttaggtttttgtgtctggtttttttttttttttttgtcttttgctttcttggtgccccaagcatatacctgatttgcaaattagataatctaacaattcatacagtacatattacacattgtcttgcaactttttttttctttcacataagatatatttggggatctgtctatgtctgtatctaagcatgactgtgcctggcaggcgtgtgagctcctctccagagaaaaacagagtctttcaaatgctggtgcctgtagccaagggttaggatcttggaggaatttttcatggctttaataaattagtgttacaaccactaactggcaaggaaggtttctccagattcagaattgagttcacaagcaactgaactgccttcaaatctttatgggaggaggtgagatataaatgaactcattcatttatttacatgtagttcaactcaggagcaatgaatgttctcttcataattaggagagtgtgatgtgaatccattggtgagaaaaaataataatatttaggagtgaaggtaaaaatcatcaaagtttcattagtacaagtttttcctttgtcttaactctgttagagagagaatgtagaattggactgtgtcgtaaattggttatttaactattacttaaatatagtacttttgtctctgatttctaattgtattgcattgtagacagagagtattatttgtgtgctatccatttattgacatctcattgaatccttccatggcttagaacagtcattctttctaaatattctgcatgtgcatgaaaagagcgtatattaatactgcaattttgtccaccatcctgagtaaaagaaaaaagcagaagactaaagcccatattcttatttgaaattagcattgagagatatgctttcatatattgtaaatcctgaaattcacttggctgaaacgctcaaagccttttgcagaaaagaaaaatttttaattataaatggtttttaaaactttccaacagaataaaagattataaagttgaaagtagtaattcctgccaggcacagtggctcacgcctgtaatcccagcactttaggaggccgaggtgggtggatcacctgaggtcaggagttcgagaccagcctggccaacatggtgaaaccctgtctctattaaaaatacaaaaattagccggccctggtggcacatgcctgtgatcccagctactcaggaggctgaggcgggagagtcgcttgaacttgggaggtggaggttgcagtgagccgagatcgcgccattgcactccagcctgggcaatacaagtgaaactccatctcaaaaaaaaaaaagaaagtagtaattccttggtgcctccctcagtatttctcaatcttagagagctgagtggggtgaggcactaacagtcttatgttatttctttccagacattttctatgtatatacaagaatatgtaagaaaacattgcatggctatccttaaaaagaaaacccacatacaaatggaatttcacaatatgcatgttattgtagactttgcttttttcactttcataattcactaaaatatctcagttatcttttcatgtcagcacctttagatcctctccaggcttttttttttttttttgagacagagtatcgctcttttgaccaggctagagtagtgaagtggcaagatctcagctcactgcatcctctgcccccagggttcaagcgattctcctgccttggcctcctgagtagctaggtttataggtgcccgccaccatgcctggctaatttttgtatttttagtagagacgggatttttgccctgtaggccaggctggtctcgaactcctgacctcaagtggtccacccaccttggccttccagagtgttgggattacaggcataaaccaccgtgcccagccctctccagtctttttaatggttgtctgctattccatggtaaagctgttctgtaatttatttaataattcctttttggtggacacctgactcgttcccagtttggctattgcagacaatgctgcttcgaaacctttgttcacacatgaattttgctgctgcttggccctttctcaagaccaactgctacctcccaagtgtacctcacccaaagctctcttcttccttctttgctgcagacctaggtactgaaactgcttcctctcctttggaggttgccacccatcctctggggtcctttcccctaagcctggcttagaaacagcatgtagcttcctaaactccctgctgtgttaatgcatctgatgaccagcacacagactctattagttgtaagtgttttctgccatcactcctagaagcaaacgaggaatagcaataacaagtgtggggtgggaaaaagcttacaaaatttttacttttgttagttcttggctctggtttctgtctgccttacaaaatagtaaatgaaatgcccactttgtaatgttcaccaaccacatttctgattccaacattaggaaaaatcatattgattttttttttttccataatataccttcttccccagcctgaaaatgtcttctttttttttttgagacggagtcttgtcacccaggctggagtacggtggctcgatctcggctcactgcaacctctgcctcccaggttcaagtgattctcctgcctcagcctccagagtagctgggattacaggcgcccgccaccactcccagctaatttttgtatttttagtagagacagggtttcaccatgttggccaggctggtcttgaactcctgacctcaggtgatctgcccgcctcagcctcccaaagtgctgggattacaggagacagccacctcacccagccaaatgtcttctattttaagagagcactctatgactctgagggtcctagactgggttcccaattcaacaggtctcaatctcgtcagtcgtggctgcccctgtgcatttacttaaaccgacatatacattttaatcattatgcaacatctataggtaggctgcaacattctatgactaacgaacagtctgaaaatgtcagaacttttgagtcctaaagccagtcctgagtaagtcatgcataacctcctggtacctataacataaggtctgcagaatgcataatttcccaagccctgtagagattgggtggtgggtactgcagaaagaaggggaaggtttcatgagtaaatgtaataccaaagcaagttttgaatatgagtgcctcatgggtcggtacatctgtggacatctgttgttttgccatttgttctgccgagttggagacacccagaatcccctaggctgatcccttgactttccacacctgtccacatctgaatttttcgtttgtgatctaagccagcagcactctaagggcctctagaaactcagacgcgacatttctaggcacgctccacaaaacaaaaacaaaggacattttcctgctcctgactactcaggaaaggtttgtttctgctctggtcataagaacacaaagtgagaattttgtgctaggaagagttcagaaagagaacactatgagaaagagcacatgagactccaacatgggaaactagagattctgggaaaatcttggaacggatggtttgggtttatcacatgttgggacctcagactaaagcctgcttcaagagcaaacagaagaggaaaaagacagatttggtgagtgacctggagaggactggggtggaagtcccacagagtggctcacctagttccttaaaatgcaaagaatgttctcaggttcatctaatgcaatgcatttctctaatgtctccagttgtttctggctgggaagtaagtgcctgggacggaggggctggggaaagaaagaagaaggagggcactattgactaaggcccaaaccaggaataagtgacaactgggattactcctggaacttcagttgggaatgttcaagtgccacataggctagctctgtccctgcaccaactgcatcctcttgccctaggaatcaccttttcaggaaggggccttgtgtcaaaaaatcagaggaagttggggctaggcaagcagacaggctgggggaactaactcggttgtaagagctagcctccatggagaatgtaccaccccaatttcagtggacaggtgtttcaacatcctcagtcctaattctaaaaaaggcattaagacatccaggacaagtcaacaaggtcttcatgcaagcatgccaagtgcctactatgaataaataaaatagttcttaataatgggtttaataaatagggataatcggaattaacctttattgagctactagatatcagacattattataagcactttaagagacagagtattgctctgtcatccaggctggagtgcagcagtgcgatcatagctcactgcagcctccaactcctgggctcaagtgattcccctacctcagctgggactataggcgcacaccacctcacctggctaatttttaaattattttgtaaagatgggagtctcgttttgttgcccacgctggtctcaaattccggtcttcaagcgatcctcccatcttggtctcccaatataagcactttatatatgctaactgacttaatacaagccattgagatgggtactattactatctccattttgcaaatgaagaatctgaagcacagagaggctaagtacctttctgaactgtagcaaaaactaagattcaaacctaggcagtctggcttcagagtccaccactcctaaccactctgctatattgcttttttttttttttttttttttttttttgagacagcgtctcactgtcacccaggctggagtgcggtagcgcaatcactcactatagccttgacctgcagggcttaagcaatcctcccaccttagctacccgagtagctaggactacgggcacgcaccaccatgcctggcttttgttattttttgtagagacaaagtctcattatgttgcccaggctggtctcaaactcttgagctcaagtgaccctcctgcctcagcctcccaaagtgctgagattacaggcatgtaattacatggattacgcacccagcctgtacagcctcttgagatgaacagacagagccctgtctagttgaagctttcaatctagagagaagacatatatacaataaattattttaattcaaggtcataaatattagagtcacagtgaatatgagagttcagccaggagcaaccaggccccttcagggatgtcaaggagatttttactaggaggacaagtaacactacaaggggcttgcacaaaagcccgaagtatgaatgaggctgaggtgttcaaagaatggccagtagcattgtcctgaatggctcaacgtaagatgcacggggaggatcagtatgatttcacagcaaaggtacagagggaccggatcacagattatgtagcatggcaaacgttaaaatgtgttagggggttttgtttgattttgttgttgttgttgattatgtttttgttttatttgcttgttggtaatgagtttgggagtagcatgctcagatttgcttattagaaagatagttcatgctgcaatgtgtaagatggattgaagaagggaaaaactgaaggacaggagaccaatttggaagctgtttcaaaagactctgcaaggaccgatcaggacctgtacaggggtgcagcagatgagatagaaaagagtactcaaaatatgtattttttaaaaactgtacaaaccaataagaaagatataaacaaggccaggcatggtggctcacgcctgtaatcctagcactttgggaggccgaggcgggacgatcacgaggtcaggagatcaagaccatcctggctaacacggtgaaaccccgtctctactaaaaatacaaaaaaattagctgggtgtggtggcacgcacctgtagtcccagctactcaggaggccgaggcaagagaatcatttgaacccaggaggcgaaggttgcagtgagccaaaatcgtgccactgcactccagcctgggcgacggagcaagactctgtctcaaaaaaaagaaaaatataagcaatatagtagaaaatgagtgaaatttacaaataggcaattaacaaaagaagaatctaaatgggctccccaaagatgtcgaaagagatattcaagctaataattaagggaatgcaaaataaaacaatgagaaaccactttcacccttcaggttagcaaaaacaaaaaaggatgatgatttcaaatattggagcgaacataaggaaaacagtgctctcatacattgctagtgggattgtacattaattcagccatttatggaaagcaattgtgcagtatacaataaacttgataatacaaataccctatgacccagtaatttcccttctgattatataacccatagaaattcttgcacatggacacaaagaaacatgtacagagatgtccatgacagcattgtttgtaacagacaaataaaatgtgacatattaactggcatacataaataaaatgtacatgtatgcatattttttaaacatatacaaaataatcctatatattctgtatgattaaatatatatgtatattaaaatgtttagtggactttaaaatcacaatagtggtggagaggagaattaacctgggggtgatagtggaaaaaggacctgtaatgttttactataaaaacaaaaagaccagcaaagaagaaactggataaaatgttaacagttgtgagtccagagtggtgcatatgggtttgtaatactattattggtgtttgtctataccttttacatttctaaaaagaatcatataggagtgtgtgtgtgtaggagagaagaaaggaaacaagtgctatttagtgtgaaaatcaatgagacttggtgatgataacaggtagggtctgaagctgacagagggaggaattagtaggactcccacatttctggcttgggtgacaggtcaggggagaggataaaatcattcactgagatgagaataatggaggggacagcatcaaattcggggtttggggagggaagatagagttatgtttcaaacacattgagtttgagaacccagcaacagatgtttctgctaccaaatcccctatcaggctggctcccacactgcccacaaggagaaagtaagagtggggatttctcagtggtgaggtcctgagaaagggagacagagacgtgagcagaggctagcagagataccagaggccatctggcaaggccttctctgaaagcatttaacatagcactttgcataacttttcatctaaaaccactggtccttttttttttttaaaatgagatacatagacattaaaaagcatggatatatattcacatatttccttggaaaaattatatatgcagttgataaaatgtaaattttacaaataagggaaaacctctctctctagaggcaaccactgtcatgagcttctttacctatgagcaagctggacatttaaaagagccaatggtctatatctatcaaaaatataaaatgcacatgtcctttgacctgacaatttcccttttaatgtatcttagatacatacttccatgttcacaaagatggatgtataaaggtattcactgcagcattatcagtaacaaaagactgaaagggaactagtccagcaatcaggaactagttaaataaatgctcattcacagtagaatactaggctgcagttagaaaatcacttaagggccgggcatggaggctcacacctgtaatcctagcactttgggaggccatggcaggcaaatcacttgaggtctggagttcgagaccaacctggccaacatggcaaaactctgtcgctacaaaaaatacaaaaataagccagctgtggtggcacgcacccatagtcccagctactcaggagactaagagatgagaattgcttgaactcaagaggcggaggttgcagtgagccgagatcgtgccactgcactccagcctgggcaacagagggagaccctatctcaagaaaaaaaaagaaaagaaaatcacttagcgtcaggcatggtgcctcatgcctgtaatcccagcactttgggaggccgaggtggcccaacggcttgagcccgcgagtttgagaccagcctgggcaacatggtgaaaccttgtctctacaaaaaataccaaaaatttgctgggcatagtggcgcatgcctgtagtcccagctactgaggaggctaaggtgggagcctgggaggctgcagtgaccacaccactgcacaccagcctgggcaacaaagtgtgaccctgtctcaaaaaaaaaaagaaataaagaaaaagaaaagaaaatcacttaggaagcacagcatccttccagagatagtcttggcacatacatgcaaataactgcttttatttatatgaaaaataacttatgtataatagtaacatacactgttctgcaacttaatttttttgttttgttttttgttttgttttgttttgagatggaatctcactctcacccaggctggagtgcagtggcacgatcttggctcactgcaacctctgcctcctgggttcaagtgattctcatgcctcagcctctggagcagctgggattacaggggtgtgtcaccacgcctggctaatttttgtatttttaatagagacagggttttaccatgttggccaggctggtctcgaactcctggcctcaagtgatccacctacctcagcctcccaaagtgctggattataggtgtgagccaccacgcccggcctgcaacttaattttttcacttaatatatcttagagattattccacaccagcttatattacaagtaacaattgcttaaccttatatttattacatgctaggcactgttctacttgtatactaactcattttttaaaaaaaaatttttttaggccaggcgcagtggctcactcctgtaatcccagcactttgagaggctgaggcaggtgggtcacttgaggtcaggagtttgagacctgccaggccaacacagcgaaaccccatctctactaaaaattaaaaaattagccaggtgtgctggcacgtgcctgtaatcccagctacttgggaggctgaggcaggagaattgcttgaacctgggagacggaggctgcagtgagctgagatggcaccactacactccagcatgggcgacggggcaagactccgtctcaaaaaaaaaaaaaaaaaaatttaaggttactcaagtgaagtagtgggagtggagaaggaacaaagaaatctgtaactggttgtgatcaattagctgtgtattagctcacttaaaattcacaaaaacttatgaggcagatactacctgtagcatcattctccattacatatgagcacagtagcacagagaggttgggtaacttgctcaaggtcatagatctactgagtggcagggctggaatttgaacccaggaagtaaagccccaggccttgcacatttaaccacaaaacgtcctgtgtatctaacttagactttctaactcagacttcctaactgcagcctaatattctactgtgtgcatgagcatatattcaaccagtcccctgttgctggactatttagttccctttcagtcttttgctactgataatgctgcaatcagtacttttacacatccatctttgtgaacatagaagtacatatctaaaatatattagaaggggaattgctgggtcaaaggacatgttcatttgatatttttgatagatatcggccattggtccttttaaattcccataggtattattcataggtaaagtacagcaatttctttaagtatgaagccctgagtgacattcttacctgctctctgtaatactgcactgggaaccaaaagcattcactattttctcctctttggccccaagagacatttgctttaagagaacatgatctcatagtgctatagaaataaacaaatgttagggtatatgtcaagacactagaggctgcatgctttgactgcaggtctgtcatgtctcacccactactccccaggggctgacactgagaggagaggaggcaacccggggcttgcattcccatatggaagctatagcctggagaggctgcccccatttagtggggaatgtgttctctagttctacagtaccgcccctctcctcactgaggctcagtagtaggtgcctcttattatcatgcccatgcagacactagacaatgatcatcattttctaatttgtaggaatgtggtgaagattaaatgagtcagtactcatgaagtgcttagaacagtctctggcccataataaggttcagtaagcgttggccattgtcattgctgttgttaagaaatatttctttaatcccaaggctttataaaagttaggaaaatcgacctgattcactcacttcagttacctacctagcccctgtaagcataagtgcgagaccactctttgtaccacttgaagccagaaatctagaattttgtgtgaaatcttttggtttttaaatgttgctccgtgtctttaaacaactcttggccgggtgcagcagctcatgcctgtaatcccagcactttgggaaggcgaggatggaggatggcttgagcccaggaattcaagatcagcctgggcaatatagcaagaccccgtctctacaaaatttttaaaattagccagacatggcggcatgtgcctgtagtcccagctactcgagaggctaaggtgggagaatcaccagagcccgggaggttgagactataatgagccatgattgcaccactgcactccagccttggctgttcagtgccaccaatacacacaagtatgaaatatgaacacagattacagcaatgacttttaaatatttcgaccatggcccaaagcaggggccacaggaataccttttacatcactaccatataaaatatatatacaattgaagaagtaaaaagttgcaaaacaacacatgcccatatgttgtgtgcagtgaacagacattctctattccattgtctttttcttttttaaaaacatggtctgtaacccattacatcaatttcaaaatcctctaaggagctgctaaccgggtgtgaaaaacacctaaatatgggatagaatccctaaaatcaatatttccccaagagtttcttatatttcagatgtacgagtaatatctacgcctatcaatgcctaccaccaccactggtaaacaagataactctagaagaaacttggatatatttatatttttaaactagttatatatttttactagtattagtttttagttatcttccattttaggaaattgatactgattttccacttacgggaatgatttaaagttttctcctaaaataaatgtacttaaatttaaaaagcaatttaaggaaaaacattaataaacagcataggaaatattcagacatgttgaaaatcacaaatacgtgtctcatgtatctgaagtgtgggaaactatctggcaccattctatcatgatagaacaagaaatggacgttccttcacattagatctgcttttgcgcagctctactaattactcccagaacgttaggttacatgacatgatattagtttacatttggcttttccccagcagccgcttaaacctgggaggtcctttttccaagcacttgggcagtttcgagtttggcatccttttgcacagtgatttgtgtggatcttgagatgctgtgagcttgccatcccttcttgagatcatcacgtggtctgtctttctctgtcaggctttcaagttaattatttcctgtttttctgagtctgttccttatcccccttcccaggccaccctctaccctcaccttcacctccccccagcagttctacagaaaatcagtctttgtctcttggcctgccctagaacaccttccaacaagagccttggagttaattaaatgtgtggcaatttcagagcaaaaatttattactgggtacaatcagaaattacttttagagttctttgctttttggtaacattctctgtcacttactgaccttttgttctcagtccctgcctgcttaaggtactgtgtgaaccaatctgcccaagctgttttctctctgtgtgactgcttaagatctctggcatgagttatactgtcactcctctcaggaactcccacgttgggcttgattttcccagcaaacttgatctgttgttcatgtaacattgtttctgctgctgtcccattccttctcatcaaggccagagccccctcctcctgttgtctttaacaaggcagggtgctaaactgagctgagctgcacccccacagaagctttgtgcaaagaagccactccatttcttcaatctttgcatcctcatcccatccccatgcccagaaatcttcccaaactagccttttatggtcatccagccttaatttctcttttcttccaaatcccagctaagttttgtcttaagtctctaactgggtttggttacattgttcaatgtcctttccccccagtaacccccctgccatcctagttttctctcccctattagctcctcctaagcacgcatctgaactccttaaatcttttacctagtgtagtttcctggtcatctccttttagcccactacaaattgaagtgtaaaaaacccttacaataaacatgtgtgcgtgcacacgcatgcatggtatatacgtacacatttaaactaggagaaaggatataaacacaaaatagactgtccagtactatttgggggtgggaggtggagaagagccctaggccctagaagttcccctggggttcttattaatatgttgaacatatttcaccctgcaacccaaatctgtaccactttcgtacacagcttaaacaaagaagagtcttgatgcttattgaggatttagataactacttcccgttaagaagatatttttaaaattgtgttttcattatgactccatctccatttattgatcgagggatttcttgcctcacttaactccataatctgttactcagattaagaaaatgagaaaactattgtttggtagtttgagtacaggctttaaagtgatactttggaggctggatgattcaagtactataatccaagaaaagcaactaaatgatcatgcagaacgtgtttttatgcattactctttatcgattaggcatgcaaggaaatgaatcggattaaatgtttcgtagatgtgctctgttatagtacagaaacttcctagtgtaaaaacatccaacagaaagcactaagagataggaaataatacatgtaaaatgcaaatgtgtaagtcattcaacacattttgagtatcatgtttttttatgtaaaaaacaatgttacgtatagtaaattctccgctattaggagcagaaaagtaccctctattttggcacttcccttcttccgccaccattagctagtatacagctgtacatatgtgcttttggggtgaatgtgaaacctgtatattcactgtttaccttcgaccctctactttgccagctttttgtccactttattccttattaattcttcctcccggggactaaaggggaagggaaaaggaggtgaacttggagtcagtcaggcatgcttagtgaccagaacagttcaatttcgttttttctaaattttaattaattaatttatttttgagacagggtcttgctatgttgcccaggctagtctccaactcccgggctcaagctatccacctgccttggcctcccaaactgctgggattatagatgtgagcaactgtatcaggccaatagttcaatttctatacaataaacttgaaagacccgtccaaattattttatatcatttaagatttttttccatccaactgattaaataactctgtcaattaaagcttggacatcttgaaattgatattttggttgttaacagttattgcaacagtatttgacctgtctctggaagattttgtaaagaagtaaaattcgctgtaggaatctatctggggaagaaagggaactataatttgctctgtacctgttacatgagagaatctgaactgtgcagtgtacactgttttatccttttatggtttacaattacccagaaaagtgagtaaaatgcccgttttacagatgtggaggctgaggttcagagatactgaccagtctctcggtttataaggaaaaccatggctaacagcctccagagcacaagccctttacaaaggagggttggagattgcaggcagcttttacttatctatgctgcccacgcttaacatggaaaactgaaagctgaccttgtgttcctttaaaaaatctccaaggaagtcggctgcagagacttcatggtaactcatgagaaacaaaatgcttttgtggattaacaactgtctttattccaatggagttttttgggggttttttcttcttcttaaagacaaaaaaataatctaccgctgacactcaacaagaaccgtcgtagaatggacaagtcttcggatcgcgctgtgcagatccctcagcaaattgtgacagtattatggcactttggcctaagctgttaaagagacgatgtaatgaacagctgcggatttctgaggcacaattgtgtgacacaggaagcccaagtgttggccatcctcaacgaaggcagctgccgggctccggtttgcttcagcaaaccctcacccctcgccttcaaccaggcgggtgtcgtcagctgtccgccagctgctgcccgcgcctttccgcccccgcgcgccggccaaggccgaggcggccgggaccagaggcgcgcgccctcagtgcatgtgacggggtgggagggggaggtttcttcctcccccgtccccaagccccgccttctccagagaggctgcggcttcctattgcgccaccaccgaaatgaccaccgtgccagccaatcaagacgtgattcatgaagtaagacccgccccttactggtccccaggttccttcccgctcacgccggagtcacttccgaagagagaaccgccatgaagagagaagggggtgccgcccacctctgctccgacagcctcccggagtcccagcagcaagacggcaaccacgcacccaacttctccagccacggctcatgccgccgtcgccagcggcgccgacatgacaaggcgctgcatgcccgctaggccaggtttcccctcatccccagccccggggtcgtcgcccccgcgctgccatctgagacccggtagtaccgcccatgctgcagcgggaaagagaacagagagtcctggggacaggtaccgtgcagagggcttgagaaggggccgggtcgcgggggcaagggtatgaggggagggctgcagaccgccgctcttccagttcccgccatcctccgcgagctcaggcgttggcatttcggggcctggcaaatccccgccccgcctccgcgcaggggctactgggagttggagtttgcttctctgtagttgggcagctgctcttggtctagtgaccaccagcctggacagctacggagaacccgccttaggtagaaagaaagtgatttttttcctttgcaagagtttgacccgggaccctaactgcttaatgcatatttagatcgttttctgtacgttgtcagttctactgatcctagtggtttagtaatataaaccttttctatgttgtgggtgaaattatgtaacctgtgatgagggaatcccttccacgaattactttgtagtccagcgtgcacgctagttcatacttaaaagaacttgcagatttggaatgtgacgtgttttctctttcagtaacttcacgcctctccaagaggctaatttttttgtaaagattttgtgggagctatgtaatgagatggggagtttcatctaatgacatcctctgacaataaaacatgtttaaattccctacgaacttggtactgtcttttattttaagttaaattgtattaagttttaacaatattcatgttactaatactgtggtacaggcccacaatcccttatcttaactctgaaagccagaaagctatgaaaaccaaaacgttttcagtaagtttggcaccacatcttactgggcagccagatctgactaaaactaatgtaaggctgtttgtggtctttatcccattaagtgtgaatattcatgttttgctggagaaatgtcagtggatttgattacaggttgcagcaccagaccccactggggactttccataatacatccaagttatccccttcctaaaatctgataaattcagaattctaaaacacatttggccccagaaggttcagataagggtttgtgaaactgttataattgtgtgtgtgtgtgtgtttttttttaagccagttgttaaataagcagtggacattttgtgtgcatatgaacttagagaacctacctcttgaaagttacattcatggttattttacaggtttcttgtatgttttacccaaaatcattttttctctttctggtgtattaatcaaaaaggagtctgaggtccaatattttagggaagagatacagtgttacatttagtaaaatgcatttagaattatcttgtgtgcaacaaatgagctgcttctgggtcccttcccatctctcctcaatcaataacaagatcaataacaaggtatcatccttcttccctttgcagaacctccaacatttactctggtggagttaatttgcctagtataatttatgtaaacaaatgcatatattcttccatagcccgtcactcatattcatctcataagcacttagcttttataccagcatctcaaacaagcgtgatggacttggtaaaccagtaaagatgtgcattgctcttctaatgtgaccagtaaagtgtacaagaagcttaaccttcaagaaacttggattgttggaattttcactgagcattccaacctcatagtggatgaatgtttagggaaatcaatagtctatagcttattctctttcagtaaaatgatacattttagcaaaatttaccagaaagttaattttttgttcagcatatcataacatccccttttttgcagctgacaactctacagtgaacaaatcagaatacgaattctggtaatggattcctatttcactttagcattattgccaatgtcagaacttgattagttaagccagataatgaaatccagtctttacggtacagaaattcttaaaaattaatttggtttttgttattcttgttaactttcttccttttctccttgtgtttttcccaagcaatgtgttatttttgtaactatcttaaggattctttgataaaaaattaagaatttgaaactagttgtgacaactcattctaatttctgctgttacttagattaacatcttaatgtataaagagggtagcataagtttggtatttttcttttctgcccttgtccagcaaactcctcttcaactgattccctagatcagccaaatcacctgtattgccattctaccatctactgttctactcttgttatgagagtctgttcaagttttactccatttttataatccccattattcatttggcatacatctattgagtttttttttagcttgttattctaaattttaaaacgcagctgtgcttagataccaagtaattattttgtatcaatgtctgcagagaacaagtaggttcatatgctgatacccaagatgttgcattctaccatgtagccgtgaacatttcagtcttaagaagcactctgtactaattccttgggtctacacaccagtctgacctatttaagtactataaataatataaacctcagttgtatttttataaatgaactcctataggaagtgatacgttatattttctgtttttttaatgaacagtttagcaaagcattgttaccattgtcagaactttattaaaccaaatagtgaaatccagcctttattttataaatctttctccatttaatctgagttatgaaggttttaatatttgcttatatgatgccatattatgcttttattttcaggaagcagtcaattatagatttcttcaaaccagcttcaaaacaaggtatgtacactgttgatgcattttttgtgggctattttgggggtgaggagagagacagattcaactttaaaacctactctaaactgttttagtaaacgtagtgttcaaaattgaaaataaaatgaagatgcagtattttgttttacaaggataaactgaagttctaaatatgaaagtctttttgctgttatgttttcttacatttaaaatattattctagtaaaaaatttaatgttcataatacatactattttgattctctaatacagtaatttatagagccatagggaggttatatgatgtaccaaaagagagctttatgaaactaaggcttttaacaaataaatcatctcttaatttctcctataccccccaataaagtgtgtatcattatccaagttgttggtttgaaaatttttgtggtaacattagtatagtttaatttatattttaaacattaataatttagataaatattaaatattttactaacatgcaatttgtatgtgttttaattggctatttagacagacacatgttggattcaccacaaaaatcaaacatcaaatatggaggaagtagattgtctatcactgggacagagcagtttgaaaggaaactatcctcaccaaaagaatctaaacccaaaagggtgccaccagaaaagagccctattatagaagctttcatgaaaggtgttaaagagcaccatgaagatcatggtatacatgagtcacgtcggccttgtctgtcactagcctccaaatatttagccaaaggaacaaatatctatgttccttcttcatatcacttgccaaaggagatgaagtcactaaagaaaaaacatcgatccccagagagaaggaagtcactattcattcatgaaaataatgagaagaatgatagagatcgaggcaaaaccaatgcagactccaaaaagcagaccacagtggcagaagctgacatcttcaataacagctccagaagccttagcagcaggagcagcctgtccaggcaccacccggaagaaagcccactgggagctaaattccagttgtcactagcttcttactgcagagaacgagaactaaagaggttgagaaaggagcaaatggagcagagaatcaactccgagaattctttctcagaagcaagcagtctttccttaaaatctagtatagaaagaaaatataaaccaaggcaggaacaaaggaaacagaatgacatcatacctggaaaaaataatctgtcaaatgtggtatgtgtaagaattattgaattagcattgctactgctatgtcatatttagaatactaaatttaaaaatatttaagagttgttacatcacattgacgtctttcctgaaggaaatacttatgcacagtttgtgtagaagctggtttcattacatttcctccagttgcccttcatcgaactcagtaaagcagtgtttcttatccttagttttttcagactgggaacaaagatcttttttagtcagaaaagtaagcattctttttttttaaggcaagtatagtcttacttatttatgtgtagacagtcttgctctgttgctcatgctggagtgctatggcgtgatcatgtctcattgcagtctcaaactcctgggctcaaatgatgctctcacctcagcttcccaagtagtcgagactccaggtacctgccaccatatttgactaatttttgtatttttttgtagagacaggtctccctatactgcccaggctggccttgaacccctggcctcaagcgatcctcctgcttcctgtactttgggaggcctaggtggaaggattgcttgagctcaggagtttgagaccagccagagccacatatcgagaccttggctctactacaaataaataaataaataaataaccagtcatggtggcatgtgcctgttctcctagctacttaggaggctaaggtgggaggctcgcttgagcccaggagatcaaggttgcagtgagtttgatcacaccattgcactccagcctgggtgacagagcgagaccttgtctcaaaaatacagtgttctaatataatattcttgaattattgatataaacgtaaatcagcattttgaaaactgacttcatttttatgatatttttacatgtttatgatacaaatgcccttaatttttatgacaaaaaccttaagatctttaaatattttattatagacattaggatttacctccaaatatgggtgcttgccttattcaatctagaaatctgtgtttaaatgttaggaagaatgccttcacattctttactgtccccaacacttaattaattttatctcattgtgctcataggaaaatggacatctctcaagaaaaagatcctcttctgattcatgggaacctacttcaggtagaatcaaaattaaatttatggatttctaaataaatttccattttaatggcactgctttttaaaataaatttgtttaaatatgcagttcccttcttggggatgaattaagtgtctcatattaattaagagtttggtaagatcatattaaaaaagactagtccctgaatctagtacttataatttgggtttgtttttgagacagggtcttactctgtcacccaggctgggatgcagtggcatgatcacgactcaactgcaagccttgacctcctggcctcgaatgattctcccacctcagcttcctgagtagctgggactacagatgtgggcaactatgcctggttaatttcttgtatttttgtagagacgaggtttcgccacgttgcccaggctggtctcaaactcctgagctcatgagccaccacacctgacctagtgcatataatttgtaatctgtcttgaatctctgccctcttcaggagttcctaacagtatgtttctcatactggtattcagtgtttccttctgaatccttggctacatcaggaaacataatctttttttttttttttttttttttttttttgagacagagtctcgctctgtcgcccaggctggagtgcagtggtgtaatttggctcattgcaagctccgcctcccgggttcacaccattctcctgcctcagcctcccaaatatctgggactacaggcgcccaccaccatgcccgactaattttttgtatttttagtggagacggggtttcaccacgttagccaggatggtctcgatctcctgacctcgtgatctgcccacctcggcctcccaaagtgctgggattacaggcatgagccactgcaccgggcccccaggaaacataatcttattatcttggaattgtagactgagttgttggtattatgttgaagatgctttgtatagggttgagactgttaccatgataaaaagcagtgttctctaatatttcaaatccaaggatccctttttaatattaaatttcaaggatatctacatgacattagtttgtacttttagcatttattgattgaaaaaaatataaaataacaaatctgttaattcagtacattttatctttttttaaaactagaaaatagaagattaaaaaggcaaacactgcagaagtttgcaacaagaaatgaaaggtctccacaactaacaacagttaatagtctagtgtatccgatttttttcctgatgtgactatacattttgaaaaacaaattcccacattcagtaagatacattggacacgataataatagctggctttcattgagtacttactgtgtgctatgccattttatgtgcttctaattcgtttgaacctcataactttatatgatagtggtttacttttagagatggaaaagccaaagtacagagagtcagttctaattcctccttcaggtttcatctacttcattttatttatattttagaggtgcattgcattttgaccaagaactctcaactggtaaaatcaatcttcagccaaggctgaaaccatattttaccattatagaaggaacttctaggatacaggaataaatctaaagttttgtgtgttttttgtttatttaatttttataatgttgctgattttatgaccaaattttagtgaattttgacattattgtagaagaacaggaatttctcagccaggagattgcttctgcactcactgtattgcacatttttaatactaaatacatgatcaccttgcaccaaagttaatggaagaacaaaatattattttatataaggggctgctgctggtggtgtggctaccacattattccttttcttttttctctgacttaagatttgaaaaaatcttttcatttcctggatttgcaaatttcattcatggtggctaaagtagtttcatttatataatcccacctagcaaagtttttgagtactgcttggaaaagatgctttctacatattttcagaggctgacttatgatggttgccgtcacttatatttttattaccaatatttttgcatgtgtttcataatcactaataattatagcattatactcttaataaatatacatttatacttcaattgactaacatcaacagaatttcaacatgtaaaggacaaggggatatttcaatctagatagcatgaagaatgcttattgtgtctgatagcaaaattattaaaaatctaagccaggcgcagtggttcatgcctgtaatcccagcactttgggaggccaaggcagatggatcacctgaggtcaggagttcgagaccagcctggccaacatggtgagacctcgtctctactaaaattacaaaaattagctgggcatggtgcccaagcctgtaatcccagctactcaggaggccaaggcaggaaaattgcttgaacctggaaggtggaggttgcagtgagctgagatggtgccactgcactccagcctgggtgtcagagcaggactcaatctcgaaaaaaataaataaataaaaataaaaatccaaatgatatgtcttgttcatcttgttaatacacttaatcaattgtcatggtaatgtacataatcacgcaatcattaatcacatacaagttcagggatttcagaagtaatgttagactaggcatttagccctttggtcttctagagccctgtcttttggctgaattgtgaggggaaatttaatccattgctagtacatttcgtaactgattaataaccaatcacctattaatggcctttggatttttcctttttcttgagatggagtctcactgtctcctaggctggagtgcagtggtgagattgtagctcacttgcagcactgaactcctgggctgaagcaatcctcctgcctcagcctcccaaagtgctgggattacgggcgtgagccaccatgcccagcctcctttttttctttttacaaactcaatctctctcttatatgaatattttatgtattagtatatttgaaatatttgaaaaactgtaaaacaaatattctctacaggctgacaaaggatacaaaaagaattatgaacattttgcaattaatcacctgacctgaagagcttgctaaaggggatcctacctgcagtaccaattcacttttctctaattctagatgatgaaaccccttaataagctgacttatcctaaacatcttccacaaacagtgtttgtctcctcctggatcaaccctgaataatgcctgagcaaagcaggaatttctcctcatttctagctatatttaaattatctgacttctctagaaaaatggaacaaaactcaaactggcagctctgtagctcattttttgtaatcccatacttaaaagtaagataatgagccaaatcttctcttttgtttagtcatttaatttctcatcctgttacccctgtcctttttgtaagacatttaaccccagaaaactgaataggatggaatgatttcctcaggtaatgggagatatctgtaaaagagcagagataagggcatttgttaattagttaatttaatttttataaattgaatttttcagattatatattgatcaagctatccaaataataattgcctctcaagtttggttttggcgggtttattttattttatttactcattttgattcaaggtcttactctggtgcccaggctggagtgcaatggcacaattacagctcactgtagcctcacggggctcaagcagtcctcccacctgagcctccaagtaggtgggactacaggcacatgccactgcacccggctaatttttgtattttttgtagagactatttcaccatgttgcctaggctggtctcaaactcctgagcccaagtgatcctcccaaagtgctgggattacaggcatgagccactagacatggccaaaagataagaaattttctaactagagaagggattgacggggttgtacttttcgcagaggcagggtttcacctgagctcacgaactcccaccttggcctcccaaagttgtggtattacaggcatgagccactgtgcccagccattttaggtttttaaagcaactcttggggaatggagacatctgtccatgtgcagaaaatttgatttagggaaatctggtttggggaatactgattgcacaaatagtgaattttttgtgtttttttttgttgttgttttgtttttttgagttgaagtcttgctttggtacctaggctggtcttgaactcctgggctcaagttatcttcccacctcagcctcctgagtagctgggactatataggcacacaccactgcaccaggttaaagtgaatttttttttttttttttgaaacggagtcttgctctgttgcccagactggcgtgcagtggtgccgtcttggctcagtgcaaccaccacctcccaggttcaagcgattctcctgtcttggcctcccaagtagctgggagtacaggcacgcaccaccatgcctggctaatttttgtattttcagtagagacagggtttcaccatgttggccaggctggtctcaaactcctgacctcaagtgatctgcccactccggcctcccaaaatgctgggattacaggtgtgacccaccgcactcagcccacaatatgaatttttaaaaactggttcattcaaatgtatgtggttattaaagtacttctggatggggctataataaatatagcttatattagtttcctagggctgccataacaaagtgccaaaaccagggtggcttaaaacaacaggaattattgtttcacagttctggaagctagaagtttgaaatcaggatatcaatagggccgtaatgtctctggcaactctaggggagaatacttccttacctcgtctagcttctggtgtttgcctgcaatctttggcatttcttgacttacagctgcatcactccagtcacatagcatcttttccttgtgtattttcaccttgtattccctctgtgcatgtctgtctttgtctccaaagacaaagacaccttttgtaagtacaccagtcatactgcattgggacacagcgtgatttttttttttttaatgagaaattaacatttatctgccttcaagtgtttatcctatacgtgttttaaggtactatacatttaaatgtagaagtgttacatttctgcaaccaggtagtcctaggtctaaaagaatttccagaagtacctatggcatccttaacttggtacaaatatgcagttgtttgttttagggagtggcatctttaattctgttaaggtggtaaacttttcatagctttggaatgaaaatgagcatttgtcattagctttaaatttcttggacaccagtatttatccagttgataagtaactctttttctgcattccatatatggtgactaatctcagccttaatacttagaattttaaacctttcattagggtgttctagacactgaataaactttactaaagttggaaagtatatttttcactaatctaacaaaaattaaattttagcaggctctaagcagaataaattccctgaaaaaagaaaaaggaactctgtggactcagatctgaaaagcacaagagaatctatgataccaaaagcaagagagtccttccttgagaagcgtcctgatggaccacatcagaaagaaaaatttataaaacatattgcactgaagacacctggtgatgtgttgcgcttagaagatatatccaaggaaccgagtgatgaaactgatggctcttctgcaggcttggcaccttcaaattctggcaattctggccaccattctaccaggaatagtgaccaaatccaagtggcaggtaccaaggagactaagatgcagaaaccccacttacctttatctcaggaaaagtctgcaattaaaaaagctagcaaccttcagaaaaataaaaccgctagctccacgacaaaggagaaggagacaaaactacctttactttcccgtgttccaagtgctggttcctctctagtaccattaaatgctaaaaattgtgctcttccagtttctaaaaaagataaagagcgttcctcatctaaagaatgttctgggcattctacagaatccaccaaacacaaggaacacaaagcaaagactaataaggccgattctaatgtatcttcagggaaaatttctgggggacctttgcgctcagaatatggcactcctacaaagtctccccctgctgctttggaagttgtgccatgtatcccaagccctgcagcaccttcagataaagccccttcagaaggagagagttcaggaaattccaatgcaggtagcagtgcactgaaaagaaaactaaggggtgattttgatagtgatgaagaaagtttaggttacaacctagacagtgatgaggaagaggaaacattaaagtcactggaagaaataatggctttgaacttcaatcagactcctgcagctacaggaaagcctcctgctctttccaaggggcttagatctcagtcatcagactatacagtaagtagttctgtgacgtttatctttacttgaagagggaaagatgattaattagtgaaaggggtggattatcggaacttactttaaaatttagtatttattataactcatatttgtactgaaaatggaataattcttgtttggtaaatgagtttccatatctttagttttattactgtaagtcagtggtctccaaactcttttgatcacacacacttaacaatttttgagcatgtaccccaacatatatgtatacctttagattatatatatgtaccactgtaatactgtgtactttctaaagcatatgcaaaaacagaatttaaaaggaagaagaagagaaaaataagtattttcctgtagaagtgacgtagaagttactatagactaagttctactggagtctctatagaagttccatataaatagaagttctattattttcttcctgcaccccaatggatcaccttgcacaccccctgctttggagaccacatctgtaaatgaaggtagagtgtagaaatgttgttgattgtggtgtgcaattttatttataaagtgcttcattctatcttgggaataagctgaattaaattctaagatgtctgtaaaatttggtggggaaggtgttaatattccatggtaacacctaaaaattagtagtttgattctactaaaatagaatttaaaagtaaagacagggtagccacagagtccttgagtgtttgcagtcacatctcaaagttagcagggttttataagtactgcctttcctaataggtagtaaaatcaaattgtctgcagtgcaaaatactagatttaaagcatgatggtgaaaattatcctttaagaaaggtgttatcctggcccagattattgaaatagaaaatagtctttcgtacccttaattacttaaaacatcccagttcttctactaagacatgtggtaaagtatttctaaatgttcttgttttagggacatgttcatcctggaacttacacaaataccttagaacgtctagtgaaggaaatggaagacacacaaaggtttgttagcataaagattaatttgctaaatttaacattttgcttgtttgtgtggcttacttttaatttaccttttttaaaaaatcatgagaaattagcgtgcattttggactctgttgtcaactgtgttagaataagatatgttggccggacgcagtggctcatgcctgtaatcacaacactttgggagacccaggcaagattacttgagcccaggagttcaaggctgcggtgagtcgtgatggcgccacttcactgcagcctgggtggcagagtgagacccagtctcaaatgaaaaaaagaggccaggtgtgatggctcatgcctgtaatccagtactttaggaggccaaagcaggcaaatctcttgagcccaggagtttgagactagcctgggcaacatggtgaaaccccatctctacaaaaaatacaaaaattagccagtcatggtgccacatacctatggtcccagctactcaacaggctgaggttgggaggatcacctgagcccaaggaggtcaaggctgtagtgagctgtgattgagccactgcactccaatctgggtgacagaataagaccccgtctcaaaaaaaaaaaaagtggggggccaggcgcagtggctcacgcctgtaatcccagcactttgggaggccgaggcaggtggatcatgaggtcaggagatcgagaccatgctggctaacatggtgaaaccccatctctactaaaaaataaaaaaaaaaattagctgggtgtcgtggcgggcgcttgtagtcccagctcctggggaggctgaggcaggagaatggcgtgaacccggaagtcggaggtggcagtgagccgagattgcgccactgcactctagcctgggcaacagagcaagactccatctcaaaaaaaaaaaaaagggaataagatgggttctcttgttcatagactggatcaaaagatccaggtttttatagtatactgcactaactaataatataaattcctttctgtttattacaactagtatctgatagctgaaattctagatcgaaagcatgggtagaattttttgtgtttttttaatggaaaatacatataaaatttaccattttaaccatttttacatgtacagttcagtggcattaagtaaatttatatgttgtgcaaccattatcaccatctagctacagaactttttcatctttccaaactgaaactccataccctttaaacaataactccccattttcctcttcctcccaccctcagcaactacccttctactttgtctctatgaaattgactgtgttttagttatctcatgtaagtggtattatatttgtccttttacgactgtttatttcattcagggcagtgtcttcagagttcattcatatagtagcatgtgtcagaatttccgttctttataaagctgattattccattgtattatgtatataacacattttctttagtcatctgtcagtggacctttggattgcttccactttttggctactgtgaataatgctgctatgaacatgggtatacaaatatctcttcaagtctctcctttagattctgttgggcatatacacgtaagtggacttactggattatatggtaattccgtttaattttttgaggaaccgccacactgttttccacaatggctgcaccattgcacatttgcaccaacaattaataagggttccagtttctccacatctttgccaacacattattttatctttgttttttgtttgttttgataatagccatcctaacagtaaagtggtatctccttattgtttggtttgccttccctaatgactaatgatgttaacatattttcatgtgcttattggccatttgttatacaaatggagaaatgtcttttcagattctttgcctgtttttaattggcttgtttggtgggtggggcggttcacacaggtagaattttctgaaatatttctatcaagttactcttttgaggaaaaagtttagaattatgatgaacacccccccccccccccacacacacacacacacacacacgagagagagacagagagagagagagagagagagagaaaagttgaggatcataatgatcttaatgaaatttatgtgactaattatggacaggttttgctaataagaggggaaaaatatattccttgttaattcaaggagtgtccttgaacctagcctggagaacttcactaacagctcagctgacttgattacatggaagttggtatgtgctacatatctcaaacttgataaccaagtagctaactttaggaatttttcagatgattagtagttcaaaagcttccccctttctgaatttaattagagaacttgtctgtatttaaaattctttaaatatttcatgaattcttgtgatctgtgatatgaaatctgaagttcctcctttaaaattgagcacttcacaaatgaaagacagtagtactagtttaattgaatgattgacccttttctataatgatagaacagtacatttactagttatttactcctcagctgtacttatccactgtttgtggctggggtaaggaccttgtttaaaataacttaatcttggagaggcagtataagcaaggactctagagctagactctctcgctatgaatcccacatccttgcattacaagctcttgcaagttactttgcttttctaatgttggttttcttatctataaaatgcgttataaactactacatggagttgttgtaagggttaaaagagttaatatataaagcccttagtgcagtgcctgtcacatattaagtgctcggtaaatgttaggtgttgtgatgatgatgacagtgacaactactgctgctagaaagcctagttaacttatcaggttgttgggcatctagaacccagtgaactttaaagagtagagaggataatcaaattagtgatgtttattctttgccatttttcctttcccattctgtgagtggtttggacagatcattcttgaagttctagctttatggaaatcctcaagtcttttatgcagtggaacactattctaatgccacactggtaactgggtaaaagcctagcacctgaaatatatctgttttcatgaaaattgtacgtcgtgatgtatttgggagacataatttgaccgatagtataacaaaatttgttatataccagggtacttaataagggttttctttgtgctgcttttagatataaactaaagactttttaaaaatatttttagagtaaactgttataacattctttccaattctcaggctagatgaactgcagaagcaactacaagaagacataaggcaaggccgaggcattaaatccccaatcagaattggagaagaagacagtacagatgatgaggatggcctcttagaagagcacaagtatagcatttttcataatgtattttaccttattaaagtttttacattttttagttttgtttttgtaaaataaatgggccattgatggctgttagtgaataatttatgataggtttctgtctgtaatgggtttgaaaggcaaatgttagggccaggtttcatcttttatcttttctcctggttattgtttcttttcacatagacacatttagtggcttttgactaacaactacaaaaagtggaagaagcaaagcatacttttctcatgctagtcttctaatttgggattaacattggcttaaaaaatggttttctttgcacccagcttttaaatacaaaactatatgtagtgtaacaatttggtattgattgactttttttatgtttcagggaatttctaaagaaattttcagttacaattgatgctattcctgatcatcatccaggtgaagaaatatttaatttcctcaattctggaaaaattttcaatcagtataccttggatttaagagactctggttttattggacaaagtgctgtagaaaaacttattcttaagtaagtagaaaaatagacattttacttttatatgtataaaaaattactctaaaacacttctgactcacgtaatcttctaaaaggttaatttctattatgacctattaagtttcctaatcctcttattactattgatctttatgttttcttctttaattataggaagcagtgtaggatagttgtttgacacatctcatgcctttattaattatgattaagatcagtgtataataacagtgattgtcaaaataatagtggtttaaacaagaagtatatttgaaagaagtataaaagcaggaagtccagggctggagtgccagttttaccatataatctttcttctccaccattcttagcacctagcttcgggtgctgttctagctccagcctttagttcaaattcccagaaattccacacagcattcccacacactaagttagttgaatagaaaacttagtcaatatgaccacacttggccacaagggaagccagagagtgatgtttatttcaggcagccagtgtttgcagctacagatcagggttcagttaccaagaagaaaggcaaaaatagatgctgggatgtgcaactagtaatctccaccacagtgcccaaactgatctaatttctctcagtgcatgatatctcagctctagagagatcacatcagttctgctgccaattttttaaagtacttccccagtctgagacttgataggctctttctcaacactaccagcaaatgtagctttgtctgccagttaaatgtggagcctagccaacagattggatcagctttaggccatcaattaaatttattttatgagtaactcatccatattggtatagagtccacctctatggactgaagacagtttgcttgctcatttctctgattatgtcagatgtgttggtggtgatagtagaagtattttgccatgaagttaatagccatgttgattttactttattttttcagatcgggaaaaacagatcagatttttttgacaacacaaggtttccttacgtctgcttatcactatgtccagtgtcctgtccctgtgttaaagtggctgtttcgggtaagaggaatgtttagagggttatagttgcctcctactatatttctaagtcaaaagcttttaaacataattttatttgcacattactgcagaaaaaattaatgtagcacatccatgatgtcagtggcttagaatgtagcaaaaagagtcaatataaagagattatgaagaaagggataatgtagatagttgtacaggacagtcagtgttagttgtgcctgaacccttcaccacagtgataaatcactattatagttagttttagaagggatcttctaatgcttacatacctaaatttctttttaaccttttttcatgtttatggtggtacctatatacattttcagaattttaattgtatgctaatatttccccattcgtatatatggttttttttttggatgcaaatccaaccaagtgtttcttttccccattcatatttaacgcttaaatccacttaaataattatcttaaatttaagatatgataattccagaaagttaactcaattggtaactttttaaatatcagtggtatcattgatgcttatgtatggagttctggtgttactctagatacttcggaccttcatgcagataaatgtagaagtttcttactcttgacatttgtatcagccaggagtggtggctcatgcctgcaatcccagcactttgggaggccgaggcaggtggatcatgaggtcaggagctggagatcagcctagccaacatggtgaaaccctgtctctactaaaaatacaaaaattagccaggtgtggtggtgggcacttgtaatcccagctactcaggaggctgaggctggagaattgcttgaacccaggaggtggagtttacagtgagccaagattgctccattgtactgcagcctgggggacagagtgagactctgtctcaaaaaaaaaaaagacatttatatgggagggcatggatggggctttttccagtataaaagcttctgtatcaacaagtactatagtaactactcagttagattggaattatgcttctttcaaagacgagaacgattatgaatgacaagttattcttcgcagtggctcatgcctgtaattctagcactttgggataccaaggcaggaggattacttgagaccaggagtttgagatcagcctgggcaacatagcaagaccacatctgtttaaaaaaaaaaaaattattctcaggttactgagtgttccactttaataaaatcctaaatgtgtgaaaaatatacattcaggaaaaaggaatcgtagtataaaagagtcctttataatatgtgagtattggccccagaaatcctataacaaaaaggaaaaaagtatcaatggtgtcagagaactacagctattatatataaagtgaaaagtgggaaaaacatggagtttctactctgggttttatgatagcatttcaagaaatctcgtatttggtgagaactggagagatattccagtacagactttcgttcattgttttatatagttggcattttgagtgccagctgtgccaggcactggagagaacagcaatgaaaaaatcagtgtctctgatctcatgaagcccacatgctaatgtagaggagacaaacaataagtgtgtgtgtgtgtgtgtgtgtgtgtgtgcgcgcgcgcgcgcgcgcacatttgtaaatgtattgtgtcagatgataagtgctatgaagaaaacgtagggtaaggtagatacagagagtaccggggtgagagagaaagtttgcttttttaaagtgtaaagtagttgaaggtcttgcggttaaggtaagatccaagtaaaggagtagcttgtcaatgtcactcctaaagtgttccctcactgcctccactaaagatacgtggacacatgctccagataaggtctgtcttaccagcagttttcagtgagactcttgcccatctgaagaaacctacaaatttctacttattatagttcaaaactaatcatgccactgtactccagcctggggaacagagaaagaccccatatcaaaaaaacaaacaaaaaatttcctttactgttatgccagggcttcattattctctaattgtgtatatcatttcttaaacctccaagtaagactttgcatttatctatgttaatttgcctcttgttgatgtgggcccattgttatagccattcaaaccctaattatgacatacaagcataccttcatttaagcagttttttaatacatttcatatttattttctgaaaaccagactaatcattcattaaacactttccctgtgtaagacactgtctcatttctccttttttgattccaagtccgttttcatcgtgggaggctttaccaacttgtaagtagtttttagaaattatgtcaattcattttaatgctatactcctaaccagtattttgtaagtttaatgttaaaatgtaattaaaatccttgcatttttgtgattttatcatgagtgtctaaatgtagtagaccagaaaaaggttagtactttttttttttaacaattttcaaaaggaattcaggtttgattatgaaaagttcaagtaaaatggaaaggagattaaaatttatttatttatttgtttgtttgtttatttttgagagagagtctcacttggtcacccaggctggagtgcagtggcgtgatctctgctcactacaacctccgcctcctaggttcaagcaattctcctgctcagcctctcaagtagctgggattacaggcctgtgccaccacacctggctaatttttctatttttagtagagatggggttttaccatgttggtcaggctggcctcgaactcctggccttaagtgatccacccacctcggcctcccaaagttctgggactacaggcgtgagccactgcacccagcctaaaatatttttaaaaagaagtttctgtcagaatctgtttgagtgaacagtttaaatttttttaattaaaataagaaggctgaactcccaagtcctaatttctggagctgttacattttggtcagtgttttctagagtattctctgcattcaaaaattgccatgtaacttaacataaacagaacatgtgaatgtgtcttataacttgtttatttcagatagcagtaaattattgagcatttcatctcagagtgttgatacgttatccttttcagtggcttcatagtattcctttgttaggctataccatgatttatttaacccaatctcaactgatagacattagattgctgtatatactcctttacacatttacttaattatctgaaatcactgtatttcccaccgtggaatttttcacccaccgcaaaaagattgttagaaaccttgtcctatgtgtaacatgtctgtgaatggtgttgcctcctagtggcagagcttaacagcacaaacatcatagcagaagtttttttttcacatagattgtgttcaaaatgacacaagccatatgactgtttgaaagtagagttcaggttactcctccttacatttttattttattttattttatcttattttattttatttattttgagacagagtctctcttggtctctcaggctggagtgcagtggcacgatctcttctcactgcaacctccacatcccgaattcaagcgattctcatgcctcagcctcttaagtagctgggattacaggcacccaccaccacgcccagctaattttttttttttttgtatttttattagagatggggtttcaccatgatggccaggctgctctcgaactcctgacctcgagtgatctgcctgcctcggcctcccaaagtgctgggattacaggtgtgagccactgtgctcggcaaccctttacattttaaatttaaatgtattacaatctatggcttctaagcaaatgaaaaagataataatagaaatacaatatgtgttcctctacaaatccactataaaattactttgttaaatgatttaaaaaaattttttttaaacttgagatttttgttcccaaaaaattgtcttgtaaaaagttatgtcaggcggggcgtgatggctcatgcctgtaatcccagcactttggaaggccaaggcaggtggatcacgaggtcaggagtttgagaccaccctagccaacatagtgaaacccagtctttactaaaaatacaaaaaattatccgggcatggtggtgggtgcctgtaatcccagctactggggaggctgaggcaggagaatcgcttgaacctgggaggcggaggtcgcagtgagccaagatcacaccactgcactccagcctgggtgacagtgcgagattctgtcccaaaaaaaaaaaaagttatatcagaggttaggtgcagtggcttaagcctgtaatcgcagcactttgggagaatgagatgggtggatcacttcaggccagaagttcaagaccagcctgattaacatggagaaacccgtctctagcctaatggtggcgcaggcctataggcccaactacttgggaggatgaggcacgagaatcgcttgaacctgggaggcagaggttgcagtcagccaaggttgcaccactgcactccagcctgggcaacagagtgagactctgtctcaaaaaaaaaaggtatattatttgtttctaaattcctgtatgtaaaaaggcattacaggcatattatttgcatctgaattcctgtatgtacaaagactaactagatgaaagtataaaataataacttggcataaatattaccaattagttgttttggattttttgggtttttttttttttctttttttttttttttttgagacagggtcttgctctgtcacccaggctggagtgcagtggtgcgatcactgctcactgcagcctcaacctcccaggttcaagtgatcctcccccctcagccccccaagtagctgggactataggcatgccccaccacacccagctaatttttaaaaattttttgtagaggcgggatcttgccatgttgctcaggccagtcttgaacccctgggctcaaatgatcctcccactgcagcctcccaaagtgctgagattacaggtgtgagacactgcgcctggccctagtgtaaaagttttaaccaaattacactcacctgaggcattaagactgctttcctcttttctagtattcttatgaatactagaaaatcgataatactagggtattatcgatattcttgatcattgccaattttgaagtcaatcagtgatatctttttttgttttgttttgttttgttttgttttgttttgagatggagtcttgctcagttgcccaggctggagtgcagtggcacgatctcagctcactgcaagctctgcctcccgggttcacaccattcccctgcctcagcctcccgagtagctgggactacaggaacccgccaccacgcctggctaattctttttgtatttttagtagagacagggtttcaccatgttagccaggatggtctcgatctcctgacctcgtgatccgcctgcctcggcctcccaaagtgctgggattacaggctgagccaccgcgtccagccagtgatatcttactgtttttattacatctctttgatctagtgatattgagcatctttgaaaaactatgttggtatattattttgtatatttgtatcttattaatttgtggtttgatttttgcatgcagccttttcctttgtggttttttggtttcatgtcatgctgtatactaaaaagacattttttgatagtttcaaatgttatatttgtctaattataaatgaaagttgtaaaaaaaaaaaaagcagcatgttagaatgtaaagagctctgactttagaattaaattccaccttctccacgtatcatatatattagttgggtagaatatttaatctctctgaacctatttgctcatatgtgtaatgagtactacttcataaggttatcattagtattaaatgcacataaaatgcctttatttttattttatcttattgtattttatttttatttttgtggtacaatcatggctcactgcaacctccacctcctggtctcaaccagtcctccactacaggtgtgcgccaccacacctggctaatttttgtattttttgtagagattgggttttgccgtcttgcacaggctggtctcaaactcctaagctcaaggtatccgcccgccttagcctcacaaagtgctaggattacaggcatgaactgctgcgcctggcctacataaaacaactttatatgtgcctagcaaataatgaatgtttgtgttttctttcttcttaatatcctgtcatttctctgcttttgacagatgatgtcagttcatacagactgtattgtgtcagtgcagattttaagtacattgatggaaataacaattagaaatggtaagtatatcaacttattaagatttaccgtgtgtattattggttgctatttacatggtatctttcacattgctaaatgttagtatatttggaaatatacaatacaaaattatttttctaatcaaaagtcgttttttttggttttttttttgagacagaatcttgctgtcgcccgggctgaagtgcagtgacacaatctcagctcactgcaacttccacctccctggttcaagcaattctcgtgcctcagcctcccaagtagctgggcctacaggcacacaccgctatacccagctaattgttttgtattttagtagagacagggtttcaccttgctgcccaggctggtctggaactcctgagctcgggcaatttacccatcttggcctcccacagtgctaggattacaggcatgagccacctcacccgacctcaaaagtctttaataatgaaatggaacttcagttaaacaacgagtatctgaattttcttacttgcattgagaaaaagaatataagatcttgcaagtggaaaccctcacttactgtttaccaaatcatggcttactttgcttgataagtggaaatggttccaaacttacttagccaattaagtttaattggcttattggtaagcaacagtattatactgataatacagtaaggcatattgaaagcatccactgtaaaagtgtaacatttgctttctcatctttgagagcccttataataaaacaagcatagtggtttacctgtttcatctgtcctggggattgggactataaaggcaatgaagatgataaaaagtcttcctgtgttattgatagttgggattttatcagtggtatttccagccattttaaaatgtgttacttccttctgagttacacccttttatccatcactctcagatattttctttatgtcattttcttattttatttgggaatctgtaattcctatgatcatcctataactgtattgttagcataaaattagcagctgtcatttctataaaaccattgtaattattcatgtttcacctgcagactgtcaccttgcaaatgtgggtttgtagaccacagatttagaatgaaatgttttcttctgttaattagataccttcagtgactcaccagtttggccatggatcccatcattgtctgatgtagcagctgtgtttttcaatatggggattgattttagatctttgtttcccctggagaatcttcagccagactttaatgaagactatctagtgtaagttttctcatcataattaacgccaaaaatatcatttcgtacgacttatatataattatagctaaagtttaatatttatttctgatttttaaaaagatctctcaaagttgagatcaatcttgaattagatacatttttaacatgtcttaatctaaaagccatcatcatgtttagcaggcaaataatagaaatattctcataaaagttttgttttcttttttaaaagactttcctttgttatttaacattgttttggtggaagtattggccaaagtaattagacaagagaaaaaaaacaagagatacaaaaattggaaaggagttgctgaaagattatttgtagatgtgagttaatctagacatagaagcctaagactcaggtgaaaaactatgacaaataactaagaaaatttggtgtgggtgtctgggtataaaattagtaaagagaaatcaataaccttcaaatatctgaagtgtaactagttaaaagatacactgggctgggtgtggtggcttacacctgtaatcccaacacttggggaggccaaggcaggagaatcacttgaggccgggaattggaagttgcagcgagttcaccacagtactgcagcctgggtgacagagtgagaccttgtctttaaaaaaaaaaaggtgggggccaggcatggtggctcacgcctgtaatcccagcactttgggaggccaaggcgggcggatcacttgaggtcaggagtttgagaccagtgaccaacatggtgaaaccctgtctctactaaaaatacaaaaacgttagccaggtgtagtggcacgcacctgtagtcccagctacttgggaggctgaggcaggagaatcacttgaacccgggtggcggaggttacagtgagccgagatcacaccactgcactccagcctgggtgacagagtgagactccatctaaaaaaaaaaaaggaaactggttacagacaaagtattaatttcaagtcaataagaaaaagatcaatacctattagaaaaatgggcagaggaaatgaatagactgatcacagaaaaggaagtaaaaatggaaaggtaaaggaaataaaagaggaaaaagttgaatgttttcacttaaacattatgaaaattctctttctactccatataggatccctggttactcagatgtaatctgtatctgaaaatatgttggatagcaacatttcagctagagactatgtttcatcactttaaataggaaaaatagtttacccagcccatccaaaaatcccaactatttcccctaaatattacaagaatgttcttaaacacttacattttaaaagttaccacaagtttctgcataatataaacatttaacatacctcctactttattatttaacatttagtgaactcagtagtgtgtagtaattttgtatgttgtatacaacaatttgaatttttcttactttagtgagcatgtacagtagtggaaataaactggtagtggctatagtcactattgttgtatactggtgagtaaagatgggcacaagcttaacaaaagtgatctggtgaaggaatgagtgctgtgtaacaaaatgcctgtttaaacaacatgagcatgagtctggaaatgtgtgtgtgtgtgtttgtttgagacagggtcttgctttgttgcgcaggctggagtgcagtgacacaatctcagctcacagcaacctccacctcccagcctcaagtgatcttcccacctcagcctcctgagtagctgagaccacaggtactcaccaccacgcccagctaatatttttttattttttgtggagacgaagttttgccatgttgcccaggctggtctcgaacccctgagctcaggcgatccgccggcctcagcttcccaaactgctgggattacaggcgtgagtcactgtgcctggcttgaacttgttaagatacaaccccactcactgttctctttcttttcttctcttccttcccctccttccctcccttccctcccttccccatcttcccccacttctcccccttcccctgcccctgctcctgcccctgcccctccccctgcccctgccccttctccttccttccttccttccttccttccttccatgagatgaggtcttggtctgtcactgaggctggagtgcagtggcacggttatgggtcactgcagcctcgaactcctgagttcaagtggccctcctgcctcagcttcctgagtaccctgggattacagacacacgccaccatgcctggccaatgtttttaaatctttttatagagagtggatctggctatgttgcccaggctggtctcaaaatcctgggctcaagcaatcctcacaccttggcctcccaaagtgctgggattacaggcatgagccactgcacctggccatcacttttctttttttaaccaggactcacagcttacccatttttgctggtgtgtatatgcatattcatcatggcaagttctctatacaaatagtagatgtagagtgaaaatgtttgcagattgtcagagtaaatatttagatagagaaaattcagatattaagggatactagtacaattcttttcttgaccattattctgctagatacatagacttaaaatttaagtctaaatacattctaacctccttcaattctgtatcccttcaattctcacatccctatgttccttttcctccacctatgtcatatctattcattccttttcatttcctgagtcagtctaattcagattctcttttcatgcctagcctggcaaaaaaatctttcttccagggcctttccacctgcaaggtattattttcactgttgcaggaactcgctctctactattctcaaacctttataccctatatttaagactttacgattttaccctgacctgttttctgttttgttgtcggctttctaatcaaattgatctgcctgctgtccctccacaccataatgactagcccttatatagtgtttgctgtgtgccagactctgttctaagggcttcacatagtacctcacttagtagttactacaaatactagtaagattttcatttccattttacaagtaaggtcagcacggagaggttaagtaacttgcccaaggttatacaactaggaaggggcgcaaagaagtactaagcagctattttgaaaaacaagttcttcacatgtagctgtggaagtatctccaagatacattgctaagtgagaaaaggaagctgcaaaggtatgtaatatactaacatttgtattaaaggtggagggggagtgataaagggtaaaaaaatgtttcctctacatttacaacacttctggcatcaaatatataggttttctacacattgtcatttctccagttccctgtagacaccaactagatgtcctgcagtttaatgcaattctagttctaattacccagagttagcacagagcccacaggttaaggactcaatcccacaagactgccaccacttcatatggaatcacaagtctgggcttccttttcttctaaacaactagctataaatcaggagttcctacagtcctcctcccatttatgttcaataatatgctagaatggctcacagaactcaggaaagcagtttacttactattattggtttgctgtaaagggtacaactcaagaacagccaaatggaagagatacgttgcgcaaggtatggggatgggagtgcatagaacttccctggcctctccaggtactccaccttcccatcatttttttttctttcttccttaatagagaagacaagagttttgcctttgaagtcttgctgtcgcccaggctggagtgcagtggtgtgatctcagctcactgcaacctccacctcccaggttcaagtgattctcctgcctcagcctcccgagtagctgggattacaggcacccgccaccacgccagcctaatttttctatttctagcagagatggggtttcaccatgttggccaggctggtctcgaactcctgacctcgggtgatctgcctgcctcagcctcccaaagtgctgggattacaagcgtgagccaccatgcccagccaaattttgccgtattgcccaggctagtcttgatctcctgggctcaggctatccgcctgcctcagcctatcaaagtgctgggattcaggtgtgagcccaccccaccccacccactctctcatcatttgatgccttagccaatccagaagctctctgaactttagggtatttatggagggcccattacacgggcctggttgattaaagcattagccattttaatctttaacccctctgggtgggactgaaagtttcagccttctagtcacatgattgataactctggcaaccagcccccatcctctaggagtcacaatattattagcataaatttaggtatggttgaaaagggcttattataaataacaaaagaggctccttctaccttatcagacattccagaggttttaggagctctgtgccaggaattggggacaaagatcaaatgtatttcttcttataccacagtgggacatatattcatatttgtttgtttatacataaaatgccaatggaaggaaggactaaaacttgtagtaattatcttaggaaggaaacgagtggttataaagaacggagctaggagggcagtttatcacagcatactgtaccttaatatattttgattttttaaaaccatataaaagtattattttttcaaaaaattaaaaatgttatctatcttttgaaagctaagttcatgcatctcctttttcatgaatcttcactgataacctctgataactagagtgctttgaattgtttctgtatattgctatagcagtttctttaggccatttatgagtcttttacctattatgaattctttttagtcagagccatcttctacatagctctctaacaccaacagcaatgaggatagtaccatataaaaagtagcttgttcaagagaaaactgatgcataatgatagaaatcattagtgtttgccttgagtcagggatagcagattgacttggatttggcataaagagacttttgaggggaatggaaatgttctatttcttgatttggatggtggttacattagtatatatgattatcaaaacttaaaatgggtacattccttttattgtatgtaaattatacctcgataaaacatagtttttaaaaagtagcccagaatttcttaaagtgagttatatattttgtgcctaacttcacattgctttactcacttctcaatagttctgaaacacagacaacatcaagggggaaagaaagtgaagattcatcttataagccaattttttcaacacttcctgaaaccaacattttaaatgtggttaaggtaggaaagaacttttatgtgtcttctgctcagagctagaaccatttagtctgtggttaatggtttttaaaaaaaaaaaagtctcggccgggcgcggtggctcacgcctgtaatcccagcactttgggaggccagggcgggcagatcacaaggtcaggagatcgagaccatcctggctaacacggtgaaaacccgtctctactaaaaatacaaaaaattagccaggcatggcagcgggtacctgtagtcccagctattcaggaggctgaggcaggagaatggcgtgaacccaggaggcggagcttgcagtgagccgggatcgtgccactgcactctagcctgggcaacagagcaagactctgtctcaaaaaaaaaaaaaaaaaaaactctctagtttcttaccaggtgatttccagtctctgaaatttcttagcaataatctttgtattaaaaattgtttttgctgtttttattttgttttaatattagtgatgaacagaactttaagtcagttacatcattaaatagttttgaaaccaatagttttttataagtaggatgtatgaagaaaaaagacttacaatacaacttagtaatcaagagttaatggcagaggccgggcgcggtggctcatgcctgtaatcccagcactttgggaggccaagacgggtggatcacctgaggtcaggagctcaagaccagcttggccaacatggtgaaaccccatctctactaaaaatacaaaaaaaaaattagtcaggcgtggtggcaggtgcctgttatcccagctactggggaggctgaggcgggagaatcacttgaacccgggaggtggaggttgcagtaagccgagatcacaccactgtactccagcctgggcgacagagtgagactccgtctcaaaaaaaagaagataaaaaaaaaaagagttaatgacagtgtgaaacatttttagttgctgaattgaatcagtgatacagaaccattaagaaaatctcaaaaatggaaaatggagaagaaaatgccacttaattcaactattaacattgagtagttcttgccttcttttctctagacatcggatgtttgttttctttatagttcttttttgcatcttttgtcaaaaagagtttataattaaaactctaaaagtaaaatatacctcctaaaatatttttgtctgtgcatttatgttaaacagtttctaggcttgtgtacatctatacatccagaaggttaccaggatcgtgaaataatgttgctgattttaatgttatttaaaatgagtttggaaaaacagctgaaacagattcctttagtagactttcaaagcctcctgataaacctgatgaaaaacatcagagattggaacacaaaggtaatgttacttaaaacttcattattcattttttatatagcattacaatttgactcatagtgcatatggaattaatactgtttctaaactcaagatctttggcggattaaaaatgaactgaggaagggaatgtttgctggagctgtattatttaaattcgtgataattgaattttttctaaaacttcaactctttatccaacaaaaatgtgtttattggggatttcctatggactaagcattaatgtaggtgctagagattgagctgtgaaagagacaaagcctttgccttcatggggcttttgtcctagtcaaagggttagataaacaagtaaatgttgattatattatcatgtcaggtagtagttaagtactacaaatgaaaataaagcaggacatgagtacagcaagaccagatgctatgctatttcatataaggctggcagggaaaggcctttccaaaataaccttggagcagagacctaaatgaaatgatggagtgagtcatacctacaaccagaatttgagttgaacttctgcaaccatatggaggatgaacatgtataatttttgttaggcctttttaaaaattatatttttcagtcttttttggtggaaaaattaaaatatgcaaaagtaaggcaaagagtataataaattcctaagtatcactttgcttcaataattgagacataatcttgcctaatgtaaaaccgaccctatatttcctttccctgctcatcagattattttgaagcaactgttacgcttttttaaaaattgatacacaatggtaatacatattttgggggtgttaggcttttttttttttttttttctgtaagacagcatctcctgtcacccaggcaggagtgcagtggcgcagtcttgtctcagtgcagcctctgccttccggattcaggcgattctcattcctcaacctcccgagtagatgagactatagatacatgccactccgcccagctaatttctgtgtatttagtagagacagggttttaccattttggccaggctggtctcaaactcctggcctcaagtgattcacctccctcggcctcccaaagtgctgggattacaggcttgagccaccacacctggccaggtgttaggcttttaaaaatactggaataggatccctaaagtgcaagaaatcccaaatcaggaacatatatggtcttgtacagctctcatacacatttgtatttagatcagtttatctttccaagaaggactgtttaaatatcaatgggagatatgatgtagtacaaaacgtgaaagccaagtgaaattctgctaaatgtatctgttcagtccatttaagatagtataagtaaaactgaatctgtgtattgtgtacattttagcagattctagactccatgctatttctaaaaatgtgctctgttttgtactagtgcttccattatgtcaagaagggttgtagatgatctgttgggtgttttattctactgttctgtttgaaaagaaatcttacatgttcttttttttcaggtgcctgaactctgtctgggcataaatgaactctccagtcatccccacaacctcctgtggttggtacagctggtccctaattggacatcacgtggaaggtattaaaaagtgaaaattaaacattaagaaattttataattttacattaatgaaatgccttgggttgtttatttccattcatcattctttgaatgttagatcagatatgtttatttcatattcagttgcgagaaaaggcattgatagcctgattctgccttattctaattcttaactcaggtcattatgtaatttttttttttttgagacaagagtctcactctgtcacccaagctgaatatttttttatttttaattttagtttatctgttaccttaatacagatgacatattccacaaaaataaatgaattagcttttttttgctttagtaaaaataaatttcatcagtaaaaaaataggttttctgtcagtaaatcatcagggtcaaagataaggccgttaaatgatttattgagcttcagataactcaagttttatgtacagatattttacatgaaaattttactgttctataacagcttatatgttcctgtacagacttctcttgaaacattgcctatatttccaattagaactagagctcctcttggctcattcatttgcttttcaagcagtattaattaaaatacattctaaatacttttaacttctaattctaggcaactgagacagtgcctcagtctagtgattatttcaaagcttttggatgagaaacacgaagatgttcctaatgccagtaatctgcaggtataaataaatacatttttatttttaataaatgggagaggtaatgagaggtgtaaggaaaattgatgaaccctaagtcaaaggtcctggggtcagagctcagctcttaagcttgatactgttcatgtaatctctagcacacttaactaacaagatccaattttttcatctgtgaaatggagataatattgcaccctccaccacttagggtggttgtggacaatcagatgtgaattaatgtataaagaaactactgggaaaatcataatgtgcaattatatgaatatgatttcatttattgaattagttcagcttttccaagttagcaattttatcacaagattagaaattgcaaaacccttgtacattgattgcatctttaacctgttttaaaatgagtctttttagatcatagagcttaaatgtagttgccctctagtacttgttcagtaagaatatatcatgtatatatgagagtgtggataaacatgtccagctgttgctgggtactggtggcacacacctatcgtcccagctacttgggaggctgaggccagaggatcctttgaatccaggagttcaagtccaacctaagcaacatagggagaccttgtctttaatatatatatgaatgtttttaattaaaaaaaatgtccaatggaagtcccactctgagtaaaattctgaaggctttttataaacattgatagcactaatggggctgcccttgcttggatttgaaaactcaccataggatgggcacagtggctcacgcctgtaatcccagcactttaggaggccggggcaggtggatcacgaagtcaggagatcaagaccatcctagccaacacggtgaaaccccgtctctactaaaaaaaatacaaaaaaattacccgggcatggtggcggacacgtgtagtcccagctactcgggaggctgaggcaggagaatgacatgaacccaggaggtggagcttgcagtgagccgagatcacgccaccgcactccagcctgggcaacagagcgagactctgtctcaaaaaaaagccccatagaacctgatctggatgtccctttgttcttgtttgaattgcaatttggtacaaggtatgccaccagatcctaggaattaaaacaaacaaagatttagattagagactctgcccttgaaaacataatctaatggttgaaacaaaattaaccaactcttatgggttagtgtggtaagaacagtaatcgaagcatgcacgagatgctgtgggatggagagactgatgggcacagctggtttctgctttagtagaattgaggtagatttgattccagatatatggggatcatgctggagctaccaggataattagcagatagttctcattcctttcattgatatttactgccttcaaaagagatccggggataggatttctaccatttctcctaacttttgttgttctgttactttttccttttttgcccatgtaaaatagaataattagctgaataattacatgaataattaaccctcaaactcactaactgatattcaagtaacaatctagttgtgatttttaccacaacttcttgtagttcttctcagaattcaatgacttctaaccacagagtcaactttgttgactttcaaataatttaacagagaaagcattccctgtggcctctatgataatatcgtttggtctcctaagcatttatcctaagttacaagtactaaatctttaacttaaaatccctttttttttttttgagagatgtagtattgctctgtcacccaggctggaatgcagtggcacaatctcggctcactgcaacctccaccccgcatattcaagtgattctcgtgcctcagcctcccgagtagctaggactacaggcatgtgccaccatgcccagctaatttttgtatttttagtagaggcggggtttctccacgttggccaggctggtcttgaacctctaacctcaggtgattcacctcccttggcctctgaaagtgttgggattacaggtgtgagccaccgtgcccgaccacttaaaatccctttttaagcaattcagggttttacataaagggaaaatggatattgttaagtgtaaagaaagctataataaaaggacaaaatgaaagagtacacactggaaaaaaatagcctaagaaagaacaactatattatttagctttgttcaatgtctcctctttcttttgataggtatcagtcctacatcgctatcttgtgcagatgaagccttctgatttgttaaagaaaatggtcttgaagaaaaaggctgaacaaccagatggcattattgatgacagtcttcatttagaacttgaaaagcaggtatccagtgctagaaggtctcaaagagtacatagaagcataactgttatcagcttactaaccatagactgatatgtaggcatttctggatttggacactagacacattctagcaaacataattttaaagcgaataatatttttaatttatcactgtcatgaaattcttccataaatttgagagttgaaaatttaggtaaaaggatgattgttggtaatttgctcccaagagtattttttgtagccctttattagggcagtcgtgaggtcatgaatcatggtaaaaagaatgcacttgagttagaaatgagaaagcctagtttagatgcttcgcttttacttactgaccagctgggttaacttgaccgtatcctttatccttcctgggcaattttcctaatgtgtaaattggaatgacatctatgctagctaattcataggtgttaattttattcatttctctaacaggcatattacctgacctacattcttcttcatttagtcggtgaagttagttgttctcattctttttcttctggacaacgggtaggtagtgtttagtgttgttgctgctgtttttaaataggtgttactgatgatggaatgagtgagcatgctttatataggagaaaactatgtaaacttttcttaatataaaagctaattgattttgctataagaattc

SEQ ID NO: 66 - DNA, 163162 bp, Homo sapiens
aagcttgatactgttcatgtaatctctagcacacttaactaacaagatccaattttttcatctgtgaaatggagataatattgcaccctccaccacttagggtggttgtggacaatcagatgtgaattaatgtataaagaaactactgggaaaatcataatgtgcaattatatgaatatgatttcatttattgaattagttcagcttttccaagttagcaattttatcacaagattagaaattgcaaaacccttgtacattgattgcatctttaacctgttttaaaatgagtctttttagatcatagagcttaaatgtagttgccctctagtacttgttcagtaagaatatatcatgtatatatgagagtgtggataaacatgtccagctgttgctgggtactggtggcacacacctatcgtcccagctacttgggaggctgaggccagaggatcctttgaatccaggagttcaagtccaacctaagcaacatagggagaccttgtctttaatatatatatgaatgtttttaattaaaaaaaatgtccaatggaagtcccactctgagtaaaattctgaaggctttttataaacattgatagcactaatggggctgcccttgcttggatttgaaaactcaccataggatgggcacagtggctcacgcctgtaatcccagcactttaggaggccggggcaggtggatcacgaagtcaggagatcaagaccatcctagccaacacggtgaaaccccgtctctactaaaaaaaatacaaaaaaattacccgggcatggtggcggacacgtgtagtcccagctactcgggaggctgaggcaggagaatgacatgaacccaggaggtggagcttgcagtgagccgagatcacgccaccgcactccagcctgggcaacagagcgagactctgtctcaaaaaaaagccccatagaacctgatctggatgtccctttgttcttgtttgaattgcaatttggtacaaggtatgccaccagatcctaggaattaaaacaaacaaagatttagattagagactctgcccttgaaaacataatctaatggttgaaacaaaattaaccaactcttatgggttagtgtggtaagaacagtaatcgaagcatgcacgagatgctgtgggatggagagactgatgggcacagctggtttctgctttagtagaattgaggtagatttgattccagatatatggggatcatgctggagctaccaggataattagcagatagttctcattcctttcattgatatttactgccttcaaaagagatccggggataggatttctaccatttctcctaacttttgttgttctgttactttttccttttttgcccatgtaaaatagaataattagctgaataattacatgaataattaaccctcaaactcactaactgatattcaagtaacaatctagttgtgatttttaccacaacttcttgtagttcttctcagaattcaatgacttctaaccacagagtcaactttgttgactttcaaataatttaacagagaaagcattccctgtggcctctatgataatatcgtttggtctcctaagcatttatcctaagttacaagtactaaatctttaacttaaaatccctttttttttttttgagagatgtagtattgctctgtcacccaggctggaatgcagtggcacaatctcggctcactgcaacctccaccccgcatattcaagtgattctcgtgcctcagcctcccgagtagctaggactacaggcatgtgccaccatgcccagctaatttttgtatttttagtagaggcggggtttctccacgttggccaggctggtcttgaacctctaacctcaggtgattcacctcccttggcctctgaaagtgttgggattacaggtgtgagccaccgtgcccgaccacttaaaatccctttttaagcaattcagggttttacataaagggaaaatggatattgttaagtgtaaagaaagctataataaaaggacaaaatgaaagagtacacactggaaaaaaatagcctaagaaagaacaactatattatttagctttgttcaatgtctcctctttcttttgataggtatcagtcctacatcgctatcttgtgcagatgaagccttctgatttgttaaagaaaatggtcttgaagaaaaaggctgaacaaccagatggcattattgatgacagtcttcatttagaacttgaaaagcaggtatccagtgctagaaggtctcaaagagtacatagaagcataactgttatcagcttactaaccatagactgatatgtaggcatttctggatttggacactagacacattctagcaaacataattttaaagcgaataatatttttaatttatcactgtcatgaaattcttccataaatttgagagttgaaaatttaggtaaaaggatgattgttggtaatttgctcccaagagtattttttgtagccctttattagggcagtcgtgaggtcatgaatcatggtaaaaagaatgcacttgagttagaaatgagaaagcctagtttagatgcttcgcttttacttactgaccagctgggttaacttgaccgtatcctttatccttcctgggcaattttcctaatgtgtaaattggaatgacatctatgctagctaattcataggtgttaattttattcatttctctaacaggcatattacctgacctacattcttcttcatttagtcggtgaagttagttgttctcattctttttcttctggacaacgggtaggtagtgtttagtgttgttgctgctgtttttaaataggtgttactgatgatggaatgagtgagcatgctttatataggagaaaactatgtaaacttttcttaatataaaagctaattgattttgctataagaattcccatgtataccagaaagaggggcatgataatggtcttgtaactatatcgtattgaaaagaattgttggccaggcgccatggctcacgcctgtaatcccaacactttgggaggccaaggtgcgtggatcacttgaggtcaggagttcaagaccagcctggccaacatggtgaaaccccatctctactaaaaatacaaaaaaattagccaggcgttgtggcaggtgcctgtaatcccagctgttcgggaggctgaggcaggagaatcgcttgaacccgggaggtggaggttgcagtgagccgagattgcgccactgcactccagcctgggcaacaagagtgaaactccatctcagaaaaaagaagaaaagaattgtcagcaaatgttaattctgtttgttggagtggaacttaaccattatactttggcagcagtataatatattcataagataccaacatcaccaaataccaaatgggctggtgttgtgctggacccatattgactccagtagaaatggcagtcaggtggcagcaggctacacaggagaactgctaccatctgtagagaccatgcagtttacatagcattttcacttagcaccctttacctagcaacctccatgtaaccaagaacaaagggcctgcatcccgtatggccttacaagggatgagccgggggttcagatgtccttcataggtaaggagtgaaactccatgttggccactcccagattatttggcttgggactccagttacacattcttcttagaccataggttcattttcagagtatgctttagttattgctgtcagatgcatctgccatacagccagcttttagctcgtttcttcccatttctttgccattccccttttgttcctttagaaataacatttgccttcaaaattaaactgatggtaaggcaggctgctttggaaatgcatttctaatattcagattttcattttgaattattcttcccatactcctggggaaagatcttgcttaattccttttatttcatatcttaactattccaattcctgttttaaaacttaggtcggacatgccgggcacggtggcacacccctgtaatcccagcactttgggagggtgcggtgggtggatcacttgaggtcagaagttcaagaccagcctggccagcatggtgaaaccccgtctctacagaaatacaaaaagttagccgggcgtgttggtgcgtgcatgtaatcccagccactcgggaggctgagacaggagaatcgcttgaacccaggaggcggaggttgcagtgaggcaagatcgtgccattgcactccagcctgggcaacagagcgagacttcatctcaaaaaaaaaaaccttaggctggacgtggtggctcatgcctgtaatcccagcactttgggaggccaaggcgggcggatcacttgaggtcagaagttcgagaccagcctggccaacatgatgaaaccctgtctctactaaaaatacaaaaaaaaaattagctgggcatggtggcagacacctgtaatcccagctactctggaggctgaagcaggagaactgcctgaacccaggaggtggaggttgcagtgagctgagatcacaccactatactccagcctgggcaacagagggagactccacctcaaaaaaaaaaaaaagaaaaaaatacatagtatctcctagacatgatagaaaagacacaagactaattcttatgtttttataaatgctgttgtatataaaactgtgtttgcggttgggcacagtggctcacacatgtaatcccagcactttgggaggctgaggcgggtggatcacctgagatcaggagttcgagaccagcctgaccaacatggtgaaaccctgtctctactaaaaatacaaaaattagccgggcgtgatggtgggcacctgtaatcccagctactggggagcctgaggcaggagaattgcttgaacccaggaggcgaaggttgcagtgagctgagatcacgccattgcacaccagcctgggcaacaggagcaaaattctgtctcaaaaacaaaaagtgtttgctcttctgattagaagctaatatagtcatctgtaatgttcttacatggtttttatattttatacattttttttttcgagacggagtcttgctctgtcacccaggctagagtgcactagcacaatcttggctcactgcaacctctgcctcccaggttcaagcgattctcctgcctcagcctcccaagtagctgggatcacaggcgcctgccaccacatccacacccagctaatttttgtatttttagtagagatggggtttcaccatgttgatcatgttgctctcgaactcctgaccttgtgatccgcccacctcggcctcccaaagtgctgggattacaggcctgatccaccatgccggctataaattactttttatgattaaaaaagtcagtgactgggcatggtggctcatgcctgtaatcccagcactttgggaggctgagtcaggaggatcacttgagcccaggagttcaagagcagcctgggcaatgccatctctgtttaaaaaaaaaaaaaatttagtgattattgtaaaacttatataaagtaaaacctgaaagactcctacaatccagtgccctcctgtaaatttcttcacaatttactaatatattacatataatatactaacaattattttaacaaaaatgtaatcatagtatcatttgcaacttcctttttttcctctttaaaaaaaaatttttttttctttttgagacagtcttgctctgtcacccaggctgaagtgcagtggcacgatctcagctcactgcaacctccgtctcttgggttcaagtgattctcctgcctcagcctcccgagtagctgggactagaggcatgtgccatgatgctggccaatttttgtatttttggtagagacggggtttcatcatgttggccaggctggtctcgaactcctgacctcaagtgatccacccgcctcagcctcccaaagtgctggtattacaggcgtgagccactgtgcccggcctcctctttaagacattagcacttggctgggcgcagtggctcacaactgtaatactagcactttggtaggccgaggcatgcagatcgcttgagcccaggagttcaagtccagcctaggcaacagagcagcatgccatctttacaaaaaaaaaaaaaattaaccgggcatggtgatgcatgcctgtagtcccaactacttgggaggctgaggcaggaggaacacctgagcctgaggaggttgaggctgccatgcactgtggtcatgccactgccctccagcctgggtgacagagtgagaccttgtctcaaaaaaatatataaaaaatcaaatatttgtacttctatctaataactatagtattttgaaacctttattgataaacagtatgttttttgtgattgcacatagtgttaatatgaacatgcttattcatatatctttgcccacttctgcaagcatagctataaggtaaattcctagaagtagaattgttagatcaaagtttataaatatttcaaattttaattattttaaatcgctattatcacattttcatcccagaaagtgttcatttacgttctcaccaagtatatgtgagagaactgcttaggtctatacatttctaaaatttaagatgcataatttttcaaagaattaagtatgaacctctattaatgaaaggttatcttgttcctatagaaaaaaaaataggccaggtgtggtggctcatgcctgtaatccaacacttggggaagcagagacaggaggattgcttgagcctaggagtttaaaaccagcttaggcaacatagcaagatgctgtctctacaaaaaaacaaaaactagctaagtgtggtggcacgtacctgtagtcccagctacccagaagactgactgagatgtgaagattacttgagcctatgagttcaaaggtgcagtgagctatgatcccaccattgcactccagcctggataacaaggcaagactctcttttttttttttttttgagatgaagtctcactctgtcacccaggctggagtgcagtggcacagtctcggctcactgaaagctctgcctcccgggtacacgccattctcctgccccagcctcccgagtagctgggactacaggtacccgccaccacgcccggctaatttttttgtatttttagtagagacgggttttcaccatgttagtgaggatggtcttgatctcctgaccttgtgatctgcccgcctcggcctcccaaagtgttggaattacaggtgtgagctacctcgcccggctgaccctatctcttaaaaaaaaaaaaagtcacaaactgattttgctataagaattcccatatataccagaaagaggggcatgatagtggtcttgtaatcatgtcatattgaaaacattatttgtcaacaaatgttagctctgtttgttggagtggaatttaaccattataccttggcagcagtataatacattcataagataccaacatcaccaaatatcaaatgggccagtgttgtgctagcgagtcgcagtggctcatgcttgtatctcaacacattgggagtctgaagtgggaggatcacttgaagccatgcatttgacactagccttggcaacaaagtgagaccctgtctccacaaaaaaaatttaaaaattaaaaaaatattggctgggcgcggtggctcacacctgtaatcccagcactttgggaggctgaggcaggtggatcacctgaggttaggagtttgagactagcctggccaacgtggcaaaacctgtctctactaaaaatataaaaattagctgggcatggtggtgcacacttgtaatcccagctactcaagaggctgaggcagagaatcgcctgaacctgggagccagaggttgtagtgagctgagatcgcaccactgcacttcaacctgggtgacagagcaagactctgtctcaaaaaaaaaaaaaaagaactgggcacggtggtgcatgcctgtaatcctagctaatcaggaggctgagactggaggagcacttgagctggggagttcaagggtgcagtgagctataattgtgccactgcactccagcctggcaccagagccagaccccatttctttaaaaaatttttttctttttttttttttaaaaggctagccgttgtctgaatattttgttagcgagtatgttaaaggaaggactctttaaatttctgagtactatattacccagttagagctctggggttaattttcattaatgcgagttaatgcatagcaaaacaacttttgttacagtgtgtattttttaaactagtaatcttattgtcatggaagcagctttcactgatacaactactgttacgttgaatagttaatatcagtcattgctaacaggaataatagatttttaaatgatttagttgttctagctgcataatttctttgttaatttgtaatgcttcagaattgttttcatcccttgcatttgttttgcacagaaacactttgtgctactctgtggggctttggaaaagcatgttaaatgtgatattagggaagatgcaagacttttttacagaactaaggtaagtgtgttctttctttttttctttttttttttcttaatcttggttacgttaatatttaaggatagaagcatacaggcctatattcagaaaaagaacatataaggctaggcatggtggctcatgcctgtaatcccaatactttgggaggctgagacaggaggattgcttgaagccaggagttcaagaccagcctgggcaacatagcaagactccatctctacaaaaatttttgaaaaatagccaggcatggtgtcatgcacctgtagttctggctacttgggaggctgaggcaggaggatcactggagcctaggagtttgaggttgcagtgagctatgaacacacatggcactccagcctgggagatagagtaggactctgtctcgaaaacaaaaagaaacatgtaagattagaaataggactttctcttttaataacagaaatcagctcctgctaaattagtgtagctaaattaaaagtgaaaggaaaaaaaatctcaaagcaaatacacttttcactttactttctgttctgaaactcctgacacccaaggagaaaaatacttctagtactaatgatacatatttttccccattacacaaattaaaaccttcatgcttaagttaccatcaaggattgaagcattatttaaataaatacgtaagttatgaaacagtggctttgaaattttatgatggttgaaaacttgttttattcatagagtacaaatagattagctgttattctttgaatgtttcattgaagaatatgttaaaggaaggagtcttcaatttttttttttttttttttttttttttttttttttttgagatggagtttcactcttgttgcctaggctggagtgcagtggcacaaattcgactcactgcaacccccgccttccaggttcaagcgattctcctgcctcaccctcccaagtaactgggattacaggcgcccgctaccatgcccggcaaatttttttttttttttgtatttttagtagagacggggtttcactgtgttgtccaggctagtctcgaactcctgacctcgtgatctgcctgcctcggcatcccaaagagctgggattagaggtgtgagccaccacacccagccaggagtcttcaaatctttgggtcgtacaacacctagtctgagctctagggtggaaatgatttcagcactaagcttgctaagctttttttcttaaaggttttatatactcaaagacagtagaaaagccaaatatatgagtatggagtaggaaaataatgttagtattaatagaatgatttgacagtttttcctgaaacataaaatcagacacttttaaaatacttttttctaaatacaaaaatgagccaggtgtggtggtgcgtgcctgtagtctcagctactcaggaggctgaggaaggagaatcccttgaacccaggaggcagagcttgcagtgagctgagatctcgacactgcactccagcctgggcgacagagcaagactctgtctcaaaaaataataataataaataaaacaaaataaaataaacatacttttttctaaagatttttttattccaagattatcttttagctttgataatgtaatacaatgctgattctttttgcctcttgtctttggatagtcattgaatgtgaagcctcagctttgtaacttaatatcttacattaattagctgcaaaggttagtcatttgaacaatgcccattcagatttaacatatgtatttattttagtaaatttaagttaaatacaaaaataagcaactaatgaagttatcagatttctgattttcaaatacatgtaggggatagctctttccccaagagtagaactctagtttcagaagcacattcttttgagcattcattgaccagaattgctggcctgtagaacttggtagtggctactactgacagccatgctaaaaggggaccacccaagttttatgtttcttaaagacaagggcttggcacagattgttgccagtgcttctcttacttaaagtggaaagcgacacagtggtctgtggaaattgcttcaagggatggtcctgctgaaatagatgagttgcctgcctctccaaaagcctctattatagaaaagttggtgattgttttggagaaatttgaactgtagatgaagaaaaaagcatagattgtagtttactttataaatttaaagctgctataaaattcctgacttgttgaaaacatgtttctcaagcagttatgttcaatagctaattgagaatctctagagtgatagagtttgggttttgtgttacagtttcagttgtgcacagacacttgctaaacctccaaatgtaggaaaatacgaggtatttaaaggggattcgtagtacttgggcacaagcatggagaggagtaacagtgaattttggatcttctaataatgtggagagggacaaataaacgttttttttatggctttgatcctttcaaagggaagctgggaagggaaggcacagaacagccaaagccttgggccctgttgacacagaccacccttcagcttctctatctggttgttcaaaagccagcgagttaaagttaagttcctttgaaggcagagaatgtgtttttggggatgatcttcaataacaggaaaattaaatcataagcattcaatagtttagattatgatgataaagggagtcttattaatttctatgatttgaaatctccttcaaaagatgagtagtttattttctctttgttgacagaaatcaaattgagttgttgagtgtgggcctgttgcagctgtcagatattttgtgtagtgttaagctgattgtaggtgagaatgttttaatctgatcccttttcctgtttttgatatttttaaggtgaaagacttggtcgccaggatacatggaaaatggcaggaaataatccagaactgtcggcctactcaggtgtcattttgttatacaatttcatgtattcttaatagttttgctgaatggcactcttcatactgtttgaaataaaatagggtataacagtgcacttgcttctagttatcttaagataaactgaaaacgccagtataatacatggtttgtaatttttttagttttcgtttgctttatattcattaatttatttccagaagtggttgagcccatttaaaaatattgcattgcatcaaatggaggttattcaattaagagcatttttaagacagatctattgagatagaattcacataccatagattttacccacttaacgtgtacagtggtttttattacattgacagagtgaataacatcaccatagtctaattttagaacattttcatcaccccaaaaagaaatcccatacccattagcagtcattcattcccctttcctctactaccttggttcccctcctgactcctcccaaatcctaggcaaacactaatctactttctgtccctatacatttccctattctggacatcggtaaatgagatatactatgtaatcttttgtaattggctgttttcagttaatataataataagtgaatccatgttatagcatgtacatcccttctattgccaaataattttccactgtatggatatgtcacatttatttatctacttatcagacatttgtattgttttcacattctggctattacaaataatatttccatgaacatttgtatgcaagtttttatgtgaatatgtgttctcaaatgaaacatttgaaaaggaagtcaaattgctgggccatatggtaattctatgttaagtgttttaagaaactaccagactgttttccaaagtgactgcatcattttatattcccaccagaatgtctgaggtttctaatttctccatattctcaccaacacttgtttttactaaagccatagtagggagtagggaagtagaatctcattgtggttttagtttgcatttccctaatgattaatggtgttaaacatcttctcatatgcctattggtcatttgtatagcttttttgcagaaatgtctattcagatcctttgcccatttttttcatcccatacttcatttcaaaaagcctatttttgaatatagttatttgtctttttattattgagttgtatgttctggatacaaatcccttattagagatataatttgtaaatattttcttccattctgtgtgttgcctttcctttatttttatttattatgtatatatttttgacacttttttttgatgttatatctaaggagtctttgcctaagagggacattttttttaacacctgctagtaagtgtgccagcctgcttgtttacagagtaactggcataggattgtctaaaatgacgcttctcaaattttaatgtacataggaatcaactaggaacttggtgaaatatggattctgactcataggtctggagtgagaactgagatattctgtacttctttttttttttttttttttttttttttttgagacggagtcttgctctgtcacccagcctggagtgcagtggtgcaatctcggctcactgcaagctctgcctcctgggttcacgccattctcctgcctcagcctcctcagtagctgggattacaggcgcctgccaccacacctggctaatttttttgtattttttagtagagacaggtttcaccgtgttagccaggatggtctggatctcctgacctcgtgatccgcccgcctcggcctgccagagtgctgggattacaggcatgagccaccgcgcctggctgatattctgtagttctagcaagttatcagattgatgccaatgctgctgcttcagggactaaactttgagtagccagggcctagaagttgcttatattttatatcaaaataataggaacactgaatgttaagtagataaagcaatctctctattttaagtctttgagaaatcttatatttatgttttgttgtttttgtatttgtttctaaccttaatagattttcttttaatgctggtcatgtactgatgtggtattaaaacagaaaataatttaatagcaaaactatactaatcagcttaacattatttaatctgcttaactaagcccctccatgtgtgcagtggtgagaaaaacatcctgcacttattttttactgttttttgttgtttgactactgaatgtgaaatttgaatctgattaccataaattttcagagaagtcaatataaagattttattacttgtcttatcaaagcccattgtctgatgattagtagttttataaggattaattcataatatgattaaattttgctttaccctcttttttctccttcccttttttaggggcagcttcatgacttctgggtaccagattcttaataggagttgcagcagcaaaaatatgaaccaagagaaattcaataagagcctttcatagaggagtagaaaggattattacagaatccaatgaatgccaagaaaatgtacagcaaatgtgccacttgaatatctagtatgaagctggtaatgaagaaattgccatttctgaagcagatatgaaatatgatctgcttaattgttaaggcaactgacctttcaaaagtgcagagtcttattaaaagaggggaggggtagaagcagaataatagtcatatgtctaacctgccccagttaactcctcttgttaaattataagccagttatcttttttagatagtatttttgtcacttggataatcacaggaaatatataagaaaagagcttggactaacttgagaagttggacatggaaagcaagaccaagttccagttgggtttaattttccctcttggttattttcggacacaaagggaatgcttaaaactgagtttagtaataaaaagcataaatctcttctgtaacttttataaaccacagggaggtttcaatccatgcattttccttcattactcaagattataaatctgtttttaaaatacatctaaacaaacagttgagaaacaaaagtttggcatgttgtcagatccccttaagaggaagaggttaagctgtaaagtagtggccctgttttgatgccagaacattcatatgctgtttgttctggatttcttttaaatgcatgtattttaaatactggttaaatcttagaatcttggctatatcttagaattctggctcttggtaaccatattacagaagtctatattgtaaaagcctaaagatctggacaagtttccaacaaccttgtttccatgagtatataattttggcagacacctgaattctttgggacactgtgtctgtgtatgtgtgtgtgtgtgtgtgtgtgtgtgtgcgcttgtatcttgaagttgttgcacttcaaaaccacagctgctgtaaattcttaaacactggagagccatcctttggtttaaatggtagagggttagtggaagtgcacacgttgtttttagcccaggggtagtaacaaactcttactagccaactagaaaattattttgttgacgagatgtcccttttaggagggtttgtttcctgaaagaatgccaactttttttgttgttctttcagtattggcttgagtgacctgttctcctgagtgctctagtgtctccagttgtgggggggaaagatgatggaggggaacagaaactggacttgatgtttgcggtttgagaggcaagaaaataaaataactttctacctctaaattgaggcttaggagtaaaaagcattttgtcctaaatttatcatttaaaatagcatcagtaacttttgagctcatgtcaatcaagcattggcagtcagagattttatagggaagactaagtaaatccagtttccaagaacctaaactgattgaggctccaagagtcagaccaacaaaagttttattctgtgttgtttactggtaagaatattattatcttgatactacctctcaagggtattgttacaaaatgccacttatggttaaagagatagatacaaagagttctatttgacagaagcttgaaactctggcatctatctgcccaacgatgggggctttcgttctgtaatttaatcctttgtagatacattatttgtgtgtaattttatacgtgttcatatttttctcattttgcattgtgtaaagtgtacaaaatctcaaagtataaaatactgcttatattgcttgtaatttacagtgtgtaaatattttctaattgtgtacattgatgggggggacaagtgggttattcaggtttttttttaatgacccttttgtattgcagtttcaacagataactgtccatcaaatttaaaaccactttgatacatttttatttaacagttccaataagaaaaaaatctctatttttaattatatttctcctttagaaaaaaaatacttcatggtccctctaaaataaatggccagacctcagtttaggcccttgtatttatgactctggtagaggtcttcagactccaggtcatagtccagtcagtatttgcatttgggttctcatgaaaactttgtgactctcttttagcacaagtagcccatggtttttcttccaaatcaagtattttacttctcccttgagtccccatgctttgtctccctcctgctgctattgcccggtgaatgggatggtagagagggagaaatgttcattgcacagagaatgtcaggccactttggggacttggcaaacgaagcttgcactgagtggtggtgtgtttggcaatattactgtgccaaaaatcaccttgtctaattttatggatatgtatggcaaacttattacccttcttgcaagctgcacattaaggtacttgtaagtgtttatgcttttgtgtgtaactgtttgccttttctaactgcttttcttgttactgaaaatataattctactagttttatcacattaagaggctctccatgcacaaaatgcattgatgtagccgtaaagtaacagcatttgtacattttctatctcctgatggcagtggtgcctttgtcaccttttggaaggtttgcattttgtttctgctttcaagcgcaaatagtagcttgctttcagcttcacaaaaatctcctcaaatgtaaaagatacaaaatggcgtgttatcatccaggcttagttggagtatttgcatttttatttttatcaaaacaaatataattggtggggactggccagtaataatgtgtggcgtctttaagccaagagtaatttttaaattaaaaatgaaaattttaagaggtagcccattaaacaagctactgagttggagaattaggggatgactgtggtggtttgtcgctaaggaggcaacagtagggtccaggcggcggggcacgtagagcagttagcatgatccatggttattccttactcatgaacagtgtcggcgcacctcattatctgtgcatttgtttttcctgggcagtcctgtcagccagttaatccaccagctcttaggaagtaaatacagatttttttctttccttttttttttttttaaagattttatactacatcttgttaaagtcctatgaatgtgtgtgtgtgtgtgctattaaaactgctttttctcagtttgaacatgtgtttggtaatatttgtttgggagttggggaggctaagttatctggaatgccctgttccctcagcccaccccagtcccctggcttttaaacatttcttcttgctttggattgtccagttttttagcttgatgtctcctgtttctggaaaacataaagccaccattgtacacagttcacttttatataacccagttaattgctgtatactttgcaatcaggaattcagtaatctcattcttacctcattcactatgttcattccaccattcattctaacaattgagtctcaactacatactaggcactctttttaggattcagtaaggatttgatggtgaacaacatagagaactcatgaatcttacctcctggtatccaggttaaaatactttctgttcttgggcaaagagaattagaaacaaatacccttaacctgactcccttgttcttgagcccaggaccaagaaagaagaagctgtacaatgcagaagcagggcttgagatcacctccaacctgccaagcagatagagatctgggtatgccaacttgggaggcagaggttgaaacctcataggaggaactttggagctcatagaaggccttggcattgtcagaggccttgagttccaaaaccatgccagtatttctgccttctgacaggctggctagaaagagactaaatgggagcatttttctctgacagtggggcggagggatgaggggatgacagcccaggaagaagcagagacattgccgtaagtacttactagagggcaggcagcacagctttatgcaagttaagggccttgaccttgccccaaggcctgacctcagatcccagattcatcatactagccttttgatctttgccaaattacttaaactcactgtttcctcatctgttgaataatggtgtctacctcagggtttgtgaggactaagcgagctaatgcatgaaaagtgcctagtacagtgcctggcatatagcaagaactcagcaaatgcttgctgctctaacgaggcgtttctctgatgacagatttgatcttaagcagacacctcagggtgtactgacatctgagcaaaccatatctccaaaaattatagttgtaagtgtgccctatttctttggataccgggagctggagcttctctgtccagctatctctgctgattttttttaattaaaattttcactttttaaaagccagcatgctaaagctgagaaattggtgatgggtggtggttttccagcatttgtgggaatgtcctgacactccctttcccttactaaccattccctaggctggagtcaagagagggcaaaccagaaggcccagctttgggtctgactccaagacgactggctgggaggaaaactaaacaggcttctgaggcacagtggaatagtgagacttccgcattgttgcactggtgacagcccctacagaagaagcacctcagctgtatatatagccaaaataaagaccacaccacctaaagggaaagtgctgggcaaaccagagatggagatggcaaagcaggaacagaaatgctgccacattgaacagtaagcaggacaacttgactaggccagagttctcttgcttcagggaacctgctcaagtttcaggaattcatacccacccccttcacctaggatccctgctacagtaagtaactgttctgtgcaaagtggagctaaactctggtgtgtaagtggctgacaatcactgctgaagacggccagcactaccctcagccactttcttacagcaaagttggggaaaatagactagcaaaaacaaaactcatacttttctgtgtgtgtgaagttctccagaaggtttccaaatggaatcctctcacagccaccctgcgaagcagccagggtagtgaccttatggatgagtgacagcctgttcaaagaatgacctgcctgtgtcccaggatgcagatttatggctgggttagggttaatttctttagttgatttccagttttcttttccactgtctgtcagtattcccccgttcttattttaccagctggatttgcagagagacatactgtcaatcaaaagggcttcctatgggcagctccattaattgcttttacatctgatactctcattaggtttagagattttactgggaggctagcagaaggaaatggattgtggtctgctatcaaaagtactgaagtaactgcccagtgatcattgaaatcacacattttgctcatttaacaatgtctgagtttgccatcagcacctcagaggagcaaagcttggttcataaagtgaagttgagtgatactgagcctaccacactggcctactcgccacctccagagctatctgaagtcagcactgcaggttctgtgaacatttgggaagctgtgcctcttagccccctgggcccctacagtttaattgctctcctatctgctactgaaggaccagcagtcttcctaccctgcctccactgttaccaccaacccactttttgataaggactgcagatttatctttcttagccctgccttgactggtcttcccacctcagacgtccttactcagtccatcatctctttcaggattttcttctgtggtctttttcaaactactagctgacttttcccttttatttcccactaggaacccctccccgccccccccccccccccagccatttcatcaaatcaaactcactgccctctttcatgccccttccttagttccccaacacaagcctgtgcataagcttgaacatttctacctttgccaatggtatttccccttctggcttaccctgcttcctccttctcagacttttccagtcttgattgtcctctccataaacacaagaatgaacttcaaggcaagttacttaatgtcttagagcctgtttccccatccataaaatggggctataaattcctcaggatgggatgagggtacaaataaaaaatgaagcaggatattctttgtaaaagtgtgtgtacattttttattgtgtttctccccagctaccttccctctccccgccacacacatcctatttgcagagtgttgggggaggtggaactgtgatgtgggccctgctgtctagcagtctgcagtcacacacagccatccaaactacgagattgtatatgattcagtgccaaactgtgagctttggggaatccagaaagaaggatgaagcctttcccaagtttcctttagttaaatgtgccacttgaatcctgttctgactcctaggcacatgcaagagtcaatcacatatgttcctgtggcctttatcattttggtccatctcttgagcccacatgaatactgtcatggatggaggaggaaggaccaggctgggtcagggcctgaatgcaggttttgtttggactataggggctaagttcactttaataggctgtgacctattaaaggaggcaggaaccaagtttgcacagaaggaccatcctagttgagttaaaggagttggggagttgattgtgaggggtttcctagattgctgctgggtaaggtgattgaatctgggaaggatagggtacttgattgcctagaagggtgcactctaagttctggataagaatggtgcccaagatgagctggaggggaaggcaagtgtttgaatgacccagtccctgaggtgagcctaggttagggttaagatttggtgagtgaacaggtgcaaacgcttgtggcttatttatccagaaaaagcattttctgtgtgcctttcaggtcaggctgttactttatccccttcaggcctgaccccatctcccccacgcatagctcaagctgaacagcccctgaagctgggaatcaagcccctaccttgtgttcagagcttccctaacgtccagtcgccacctagggtagccttccctccacaccctaggccgagagcagaagcgggtggcaggagcacagggagtgaggtccaggttagaggacaggccagaaggccctccgagagggtcccccaaccccgcaacgccaggacaggtttgcacgtccccagcagtaggcaagtcaggggggtcctagggttacagcggaggagaggacgggctataagcatgtggagggtgcacggggtggcgaggccaccaccagggggcgatttcagggccgcagcgcctagaggtggggggtcgcccgatggccgaaggctgtgtgtgagcctcgccctcaaaccgcctctattgtgctagagtagggggcgcaaagaagagagtggcgaccttcccctcaccccacccagtcggccccgcctttcaggaccccgccccacccccggctccgcctccaccaccccccccccgccccgcctccagccgcggccccttcctctcgcagctggtgctgtggggccgcggagccgcgcgtcgctgtctctatggccccggatccgagcgcaaaggtgagcaaggcgaggagtgcgggcggcgccctggcgtgagcctggggctgcgggccgggggtcgggcaaggcctcccccacgtccattctaccctccaagctgggccaggcctttctcaccaccaagtcccccggtcctgcatgacggctctagaggggcgcgggccaggcctcgggctgcgcggggtgcaaaccggccaccacggagtcggggaccagcgcggggagggggccgcgtggcgaacagtgttccccaggatctgggtcacgtctcccggcgtccggcgggatcgaaggagagcttgtcctcgagctgcagcagtagagactgaggttagacctgacgaagggagaggaccgcggactgtccaggatgttggagggagggggtcccgggggaggggctctctcaagccaggagagaccgccatcctactaggcagagggaaataccgcctacactaggcaggtggacatctgggatgaaggtcgagagcctgctgatcctccattgatcctgtttgaagggtctctcctccccagttccctccaccccaagatctaatagaggaaaggtgatcagagttcagggggctggccctggggaagaacccgaactgtggaacttggggtggagtgtggggcgtggactggagaccttaaacccgtacttcgccactgaagggaggggtgatatgctccgccccgcccacttagccccgccccctcccacaggttaagtgggggctgagagctccagcccgtctcccacctttagaaccgcaatatacataggggtggaggagtactaaattatgcgttccattccatctttgctgaagctaggggcctcctcctgcctgagttactttcccattccctcccttgtagagcggccttgactcatgcacccatcccatctgcccatccaaggtcagaagcctcccccatcaccacacacacacacacacacaaccccctcaccacccccacacacaaacacacacttgaaattgggccttagaattgggactttcaggaacagaggcagggttctgctctgcatctcaccccagtggacactggcagcctccaagcctatggcaaaaactggacccctgtatgcatgtgtgcttgtctctgcatggatgtagttgtgtgttcaagaactgcgtgtgagcacacatgtacttgacccttctgtgaacatgattgcctggcccactatatcaatgggtttgtgtgcatgtccctacacatacatgtgtatgtataggaccctcctgttgaataggtgcacagtccttgacacaaacccacatgtgtgggtttatctctcctcaatgtctgaggctgtgtgacctgctgaatggatgggcatgtaaattcaacgtcacatgtgaatatgtatgattacctgtggctgtggccctctgtatgagcatatgtgtgcacaaaactccctgtgagtatatgtgtgaatgacccctgtgaatccacgtgttcacagtcctccttgtgaacatgtgtgtgtgtgtgtgtgtgcacccatgtgcatgtatatcaccttcctaatagtcacccatgtgactcttaaactataagtgtgacatgcaccacactgagtggctcctctaacctggggcatgttcctcctagccatagtgctccccacacacatgccttttgcactgagcaaataggaggtcccaaaggtaaacaggtgtgcctccacagggaggggtggggcatggccggcttgcctgaagcttcctgctgtcccagatcccaaacagggagcctatgccctttcagggtcagggaatcctcttctctccctttcatatttgactctacccctcagggctctgcccctgcagtgctgacctttacctcttgaataattgctcctgttatccctctggccagttcctgattcctcccctctttccaaggccagatagttaatatttgacctgggagaggaggcaccagtggcaccctctggccctgcctgtgggtggctgatgagatggaatgtattaggtctctccacacctcacccagcccaggaactcttcaaggaaccccttggtgattaggaggcctgttacaggggttgggagaggcctgccacccacccccatcccatccccaactggttggcttgagggagggtccaagatgtgtcgggaggggccaagggctcagggatcccatcatttaccttcttcacgttgcttatgtctcaactggccttgcacactacagccttctgcacagacattatacctgtgcaaccagggggatcctaggtacccaccccaatgcctgtgaatgcctacttgcagatagggacacgtgtggatgcctagccagagggtgcaatacagactggcgtgggcagagatgtgcacccccttggagaggaataccaagaagttataattaaagagaaattccagagggagctctcaggccagggaaaagaaaaaacaaagggaaagcaggacaaaataaacaaaggtccattaaacctctctggttaggccctcctgcataaggcacccccgcaggcagcaggggcagctgctgaccgagttgcatctcattgttgggagaagcaggcattctctccaagaaccccagctcctttgacttgagggcctagtggagcttctgacttggccagaagagggtcatgaccttgggtttcgggttgtgggcatctagggtcttgtaaggaaggtaagttccaccccagcctcctgcatcagagcaaagcgatagacagaatgattgtgagtcgatcctggcgtgggcgttctgtggatgctgggcctccttctttcagtgccccctgaagtctgggtaacgccatccatcttccacccacatacagatcaaagggcttttttttccccgttttttcttcagaaaacggacctcagaaaaccaggactagctctactgtcgggggcagggtgaccccatcagtaacctacaacccctctagaacttcacaactccctctcaccatggagtttgcatttgatgcagaaaggcatgtgatccctccctccttctgacctcttagctggggattccatggccacacaaccctgtgactccatgtccccccgattccaggaccccccatggccccatgattccttgactcctatgaccttatgacccctgaccttccaagtgacttccttggactttgacccctgtgactgtgcttcccattccccgcccccacaacctgtgactctggctccctttgggggtcttgttagtctgggcctccccaggaagatgtgggggaggctctggcccctcctcctcagcatcctcacagcaactgcagtcccaggaccctcactgcggagaccgtctagagaactagatgccacccctcggatgaccataccctatgaaggttagaccctcaacctcaaaaggcagcagaagccagggctgggggtggggaggcaccccagaactagggctcactgttcctgctctccccagagctctctgggacccggcacttcaagggccaagcccagaactactcaacactgctgctggaggaggcctcagcaaggctgctggtgggagcccgaggtgccctgttctctctcagtgccaacgacataggagatggggctcacaaagaggtcaggccctggaacctggaccacccagagggtctctatgcttatccagctccctgggacctcaacttccttaaaaccctgccagccttccatagccccctggtcagacagcactgcccttcccagcccaggtgttccttgcattcagtgttcctcctgaaattgatccccaccccaatttccccaactctgtggggtcctattgcctggtcctatgagtaataggtattggggtcagtgcatcagcctattccctttgcctccactagatccactgggaagcctccccagagatgcaaagcaaatgtcatcaaaaagggaaaaacaaccaggtatgtggtctgccctgtccccagctcctttcctccccttcttcctcaatcagggatgccaggattgttggggacacagatgggtaggtacagacctgccagtcaatctcagcaaccacagtaaacattgtaagtattgccagagtggcaagccatgggcacagcatttttttttttttctttttttgaggtcggatctcactctgtcatccaggttggagtacagtgacatgatcatagctccctgtggccttaaactcctgggctcaggggatccttccacttcagcctcctgagtagctaggaccacgggcacatgccacgcccagctaagtgttttattttttgtagaaacagggtcttgctatgttgcccaggctggtcttgaactcctggcctcaagcagtccccctaccttagcctcccaaagtgctgggattacagatgtaagccattgcccccggcatctgggcacagtacttctaattcaaccatctggtggcctactagtttgtcccgcagtggcatcttcatctcctctgggatcccaaataatcaaaatggcaataagtaggctgaacgcggtggctcacatctgtaatcccaacactttgggaggctgagggtaggaggacaacttgagtccaggagttcaagatcagccttggcaacacagcgagatctgtctacaaaaaaaatacaaaaattagccaagtatgctggcgtgcacctgtagtcccagctacttgggaagctgagtgggagtatcacttgggcctgggaggttgaggctgcgtgagctataattaagccacacattccagcctggatgacagagcaaaaccctgtctcaaaaaaacaaaccaacaaaaaacagtaagtaacctctacagatgcttacttacgatgggttacttaccaataaaaccatcataataaattgaaccattgttaagtcagcaactatctacagcaagtgatgatttagctattatctcagttaattctaaaataaccctatgaaatagtattatcctgcattttgcagatgagaaaaatgagtctttggtcaaggaataggtcaaatacccagtattccatggacaggcattaatgaagcatcagccctttccagctaaagaatagggtgtctccaggggtcccatgtctggctaggtaatggctccatctggagagcttttacaaaataaacggccctgggctgggcatggtgggtcacacttgtaatctcaacactttgggaggccaaggcaggaggatcacttgagcccaggagttcgaggccagcctggacaatataatgagactctatctctaataaaaaataattaaaaaaaaattcccaagatccactgggccaaggtgggccaggggtggtgttgggacagctccgtttaaaaaggcatctccaagagcttccatcaaaggctgcctcttggtgcagcacaggtagaaaatggggctggggaggcagatggaaccaggtcatggaaggccacagatgcccagctgggagtttgggttttattctgtgacagtgaacaccctcagaatttgatactttagaggctctaactttaatgtatcacccaggtatattataaatgcagatgctaaacttagtaggtctggggaagggcccaagagtctgcaattctaacaagctcccaagtgaagttgatgctgctggtccccagaccacactttggatagcaaggctttatagaacagttcccaaagcatgttctgaggaacattaattttcaaaggaggggtttaaatgtcaaatgagtttgggaaacactacatgcccagtcccacaatgcacagcaacatccttcaggctctaggaagtaagcccagtaaagataggtttcacctgtggtttccaaagttatttgaccagagaattcctccctacccccctttaaaaaatgtaaacatccgctgggcacggtggctcaggcctgtaatcccagcaccttgggaggccgaggcgggtggatcatgaggtcaagagatcgagaccagcctggccaacatggtgaaaccctgtgtctactaaaaatacaaaaattagcccggcatggtgatgcacatccatgcgagtagtagtcccagtcacatcaccatggtgttgagagtagtagtcccagctactcgggaggctgaggcaggagaatctcttgaacccgggaggcggaggttgcagtgagctgagatcatgcactgcactccaacctagcggcagagcaagactccgtctcaaaaaaaataaaattaaaaaaataaataaacatcttggggaaacatcactttaggaatatttatctggccccaggcactggatggatgaaaatagggtgagtctggaggcaggaaaagcagtgaggaggctgggggcatcatttgggtcagaggaaggggcctgagcaggcttatggagacgggggacagatggtagtggcttgtaccaggtgagggagcaggaggagacacaaagaggcctgtatggatttaaaccctgggtaacaggcaagaggaggaatcattaacgtggcaaaggagtcaagaggctggcagctgagggcatttgacaggcagagaagaccagtgtggctggagtagggtgagtgagaccagaggaatgggcagagtcccatcacacagggctaggagcatgtgggactctatattcaggtcactgatgagccgatacagtggtgtgatccacttgactttttttcagacatggtctcactctgttgcccaggctggagtgcagtggttcactgcagcctcgacctcctgggctcaaacaattctcttgcctaagcctcccaagtagctaggactacaggtgcatgccaccacatagagatgaggtcttgctatattgtccaggctggtcttggactcctgggctccagtgatcctcccacctcagcctcccaaagtgctgggattacaggtgtgagccaccacacctggctaggtttacatttttagaatatcccttggaaagtggttggagagtagcaaaagtgtgttgtttggtaaaatatctctggaaggaaacttcagacaatagtaacagcagtcttcttggcaggcaacctgggagacagggataaatgggagactccctgtttataacatacccctttgtactttctaagttttatactatgtacatgtattcattgactgaataaatagctttataaagtcgtttttataaaagagaaggttgggaggagctatcaggtagcaactgcagatgtctaaggaagaggtcatggtggtcatttggactgggtgctggtggtggagtcaaagtggaccaagtcaagagacttttaggacaatgaattaattgtggagagggactgaatgtgggggtgaggaagtaggaagcagcaaggatgatccctggcttctaggttgagtcgtaggttggatgaagtgaggtgggaaagactggataaacaggtttaggaaagatgtaggttatggaggaggggatgaacttggcttctgacaaggtgagtttgaaacatccctgggatatcgggtggagagcaagctggcatctagggatagatttggttgtatcaccccagcgaggagggcaggagttccaagaatagaaagaggtgctgagaaggagctggatgggagaggagaagcacctcaggatggtggaatccctgggagctcttgaaccagaggtggagggaactgcaagagacacaggagatattggcagaatggtgtcaggtaatctgagggacagaggagagaaatagggtcatgttactgggaggccaaggacagtgagttccaggaaatattctggagcagtgagaaggatcacaggtatcttggaaagaaccgtttgtcctgtgggtgggggcaagagccaaactacaaagctagactaatggaggaggcttctagtcaggcagggggctcacagccctctccacctcatcccacagacggagtgctttaaccatgtgcggttcctgcagcggctcaattctacccacctctatgcatgtgggactcacgccttccagcccctctgtgcagccattgtgagtatacctgtgttgtgccagatctctgttgacttcattagggatgggatcatgttcaagatgccaaagaagagactcagagccagtgaaggagacggatggtttattaaggggacttccatacagggcactccagtggcggcgggctgcactggagaaccattcccctttgtaaaaaccatgcagtttttatagcattttcacttagcatcctccccctaatcacctccacctggcaaacttcatttaacccaaaacaaagggccttgatcccctggacagcatgtgttccacaggatgggctaggggctcagatgttcttcatagataaggagtgaatctctaggttggccacttgcagatttggaactccaaacatacattgttttgaggccataaggtcattctcaggggatgcttaagttattgctgtcaggtgcatctgccatacaacctgcccctatccctgatcgctgatccctgaccccagactgatctgactttgagccactgtccctgcctgtcttcggaaccacttactgctggttccttgttccctaggatgctgaggccttcaccttgccaaccagcttcgaggaggggaaggagaagtgtccttatgacccagcccgtggcttcacaggcctcatcattggtgagcaggccttcttccctatcacagacatggtatttttaggatgtggatctcatctctaggacctgccaccatgtatatgtcatgtgccctgttgaatatgacatgtctctcatgcctggaatatccccacgccagatggaggcctctacacagccactaggtatgaattccggagcattcctgacatccgccggagccgccacccacactccctgagaactgaggagacaccaatgcattggctcaatggttaggaggatgaggcacaggatgatggggggtaggggactatttcttcatttttactcccttggccagctgaccaccccacccccaaatccccaggtgagcctgtccattccattcctgtgtgttgtcaagtgaggggtcagcctcagagtgagggaaaggaatccccagcctgtctcaaaagcctctcaaactgcctgacccacagatgcggagtttgtgttctccgtcctcgtgcgggagagcaaggccagtgcagtgggtgatgatgacaaggtgtactacttcttcacggagcgtgccactgaggagggctctggcagcttcactcagagccgcagcagtcaccgtgtggcccgtgtggctcgtgtctgcaaggtggattgggctgacgttggggcacgggtatagaggctggacctctgaccctggccccttatcccgtgcctctacctccccagggagacctgggagggaagaagatcctgcagaagaagtggacttccttcctgaaagcccgtctcatctgccacattccactgtatgagacactgcgtggggtctgcagcctggatgctgaaacctcaagccgtacacacttctatgcagccttcacgctgagcacacagtggtcagtgcagggacaatcgggaggcaagaaactgcggacagcataggggctggagcagaggtcaatgaggatgagataggatccactgtggggaggtctggctgcaaagtgagaatttttttttttttttaagagggagtcttgctctgttgccaggctggagtgcagtggcgcgatctcggctcactgcaatctccgcctcccgggttcaagtgattatcctgcctcggcctcccgagtagctgggactataggcgtgtgccaccacgcctggctaatttttgtatttttaatagagatggggtttcactgtgttgcccaggatggtctcgatctcttgacctcgtgatctgctcgcctcggcctctcaaagtgctggcaaagtgagaattttaagcacatcaagctaggctagagccagagaatgaatgcagtggtccactgactcacaggagaggccctgtgggactatagctggggttggccagggtaacagtgagcttcaggctgagcacgagttggggggcaggcttgactccatgtaactcaccccccttgccctatgtcccattctaggaagaccctggaggcctcagccatctgccgctatgacctggcagagatccaggctgtctttgcaggaccctatatggaataccaggatggttcccggcgctggggtcgctatgagggtggggtgcctgagccccggcctggctcggtgagtgcccaggcctggggccagtgctgagtagacagagcccagggaagggtcaaagggtctggccttgtggagagggcaggcaggtggtggagtcccgaggttcaccaccttcgtcccccacgccagtgtatcacagattcattgcgcagccaaggctacaattcatcccaagacttgccatccctggtcctggactttgtaaagttgcacccactgatggctcggcccgttgtgcccacacgtggacggcccctgctgctcaagcgcaacatacgctacacacaccttacagggacacctgtcaccacgcctgctggacctacctatgacctgctctttctgggcacaggtgcttctgatcccaatccctgatccctgttggccctgatcactaatgcttctgaatccattaattcctgccatgactagtctggagttcccagtgtcctgagggtccactgctcctggctgagtccttgttctggacctcaggactcctgagctgttcgtattaggcctcttgcagggtgctgagagcagatcccatagttggggtctaactctctgctctttccataccagctgatggctggatccacaaggccgtagtcctgggctctgggatgcacattattgaagagacacaagtgttcagggagtcccagtctgtggaaaatctagtcatctctctattgcaggtagcccttctctgtgacccttaatatagccttgctgaaataggaagagggagtggggaggttgggcagaggctgtgtatctgtatgagtggggacgctgccgaccaactgtcctatctggctcccagcacagcctctatgtgggggctcctagcggagtcatccagctaccactctccagctgctcccgctaccgatcctgctatgactgcatcttggcccgagacccctactgtggctgggaccctggcacccatgcctgcgcagcagccaccaccatagccaacaggtcccagggaagcaggtgggaagtggtggggggtgacagtcacatgtggtctgagtggaggaggaaggcctgatagctactgggggagtgcaggggctagttattagtaacagacctatctaccctttcactgggaaactgaaacccagttccccttgttcataaaacctgatcttctgtcccaggacagcactgatacaggacatagagagaggaaatcgaggctgtgagagcagcagggatacaggtaagtgactcatatgagtgtgggtctagctacgcagactgtcctctttgccatttactgccatgtgtacgtatatgtttgtatctgagtggctgtggctatgtacatttggtaaggatgactcaaacacagagcctggcacagagtaagtgctcaacaaacatttactgcccaaatgaattataaactaggaaacatatttaagatgtgaagtgtcttgtcacttctggagcttatagccaagtagtggatgacaagggttcaggacggtaatgggtatttccccaaggaagatcggatgactgaactgatatctgaagaaagaacaaaagttaatcatcacagctaagatgtattaagtatttactgtgtgccagacactgatctaaatacttctatgcatgatgtcatctactgtcacagcattcttatgagaaaggtgccattattattatccccatgagggacctctctgaagcccagggagtgtaagtaaattgctcaaacttattcagctattaagaaactggaccagaattcaaacctggctgagtacagtggctcacgcctgtaatcccagcacttcgggaggctgaggtaggtggattgcttgagctcaggaattggagaccagcctgggcaacatggcaaaaccccatctctacaaaaaatacaaaaattagccgggtgtggtggcacatgtctgtaatcccagctacttggaaagctgaggtgggaggatcacttgagcctgggaggcagaggttgcagtgagccaagatcacaccattgcactccagcctggataacagagtgagacctcatctcatctcaaaaaaaaaaaaaaagaaagaaaaaagaattcaaacctgaccccaagcagtctgatttgactttgtgcttctggtcactatactatgctatctcccacaagttagccaggcaagcagaggacatggggtaatggggtgacatgcaagcagagggagcagcaggcagagggaggctggcacatttgagtgacaggagaataggctggacaagtgggcaaaggccatgttgaagattttggtctttatccgaaaagcaataggaaacctctgaagagttttaggctggagagtggcatgatcagatttgtgtttttaaaatacctctcatgaagaatggattacatggggccagagtgggccaggagtcatggaaggagagaaatcaacaggtctaagatagatgccagaaacagaatcttagtgacagttagatacaaacgtgaagaagggccgggcacggtggctcatgcctataatccagcactttgggaggccaaggcgagtggatcacttgaggtcaggagttcgagacaagcctggccaacatggtgaaaccctgtctctactaaaaatacaaaaactagctgggcatggtggcatatgcctgtaatcccagctactcaggagccagaggcaagataatcgcgtgaaccagggaggtggaggttgcagtgagctgagatcacgtcactgcactccagcctaggcgacagaatgagactccgtctcaaaaaaacaaaacaaaacaaaaaggcgagcaagaaagagaagggagactcccaggtttctgacttaagcaactgtgtggctggtggtgccattcacagtggtggcgattcaaggaaaggacttggtgtcgttggggagaaaagctttggttttgaggtgtccaagagacctcatgtggagatgcccagcacatggtagatatccgagtctggcactcaggagagaagtctgaggtagagattaggagttactggcagatggcagaaattgaaaccacaggagaggatgagagcatggagagagaatggaaaagggcccaaggcactgcctgcttcctgggaagggccaacgtgaaccttctgtggaagcatgagcacagagcctgggtcagctgtcactgtgattctgggttctgtgcttggtgccagggacttggcagtgaacagtctggcttgccatctctaatcccttcctgggacgggctggtactgacctctcccccaaaccccacagggccaccaccaccactgaagacccgctctgtgctccggggtgatgatgtcctcctgccctgtgaccagccatccaacctggcccgggccttgtggctactcaatgggagcatgggcctgagcgatgggcagggtggctaccgtgtgggcgtggacgggctgctggttacagatgcacagcctgagcacagtggcaactatggctgctatgccgaggaaaatggcctccgcaccctgctggcctcctatagtctcacagtccggccagccactcctgccccagctccaaaagcccctgccacacctggggcacagctggcacctgatgtgagactgctctatgtgctagccattgccgcgcttggtggcctctgcctcatcctggcctcctccctcctctatgtggcctgtctgcgggaaggcagacgagggcgccgacggaaatactcactgggtcgggccagccgggcaggaggatctgcggtgcaactgcagacagtctcaggccagtgtcctggagaggaagatgagggtgatgatgagggggctgggggcctggagggcagctgtctccagatcatccctggggagggagccccagccccaccacccccaccgcccccaccgccaccggctgagctgaccaatggcttggtggcactgcccagccggctgcggaggatgaatggcaatagctatgtgcttctgaggcagagcaacaatggagtaccagcagggccctgctccttcgccgaggaactcagccgcatcctggaaaaaaggaagcacacgcagctcgtggagcagctagatgagagctctgtctgagcccagcctcccagaacaaatgctcttccaagccagcctatctgtcccaggctgggccactgcctccctaacacagccaccctcccttcattacccccactccatacccttctcccaactttttgatgtccctgtagggctggccagtcaggcccagccaaagccccctcctcagtctccacagacccacatgtgagcagcccaggcccatcggtgctcctcagaggtaggtgctccctcaggatcaggtgccctgcagacccagagccagttcctatcccctaacctaaacacttataggtgaggactccatcctcctgttccattcatctgcccaaaccctttctctttctcccaggcagggctctgcaggtccatatgggctcaatgtcaccaccctctgcatggccctgtgtgctggatggtcctgaaaccagacaagacctctgccagccacctaagccctgcgtacattcacatgcacacatggaagaatgtttatcggctgggctgcagtgcccccaccctcaccttctcctggtgcattcttgtttcatccctgcttctggacttggggtaccctcccaattgccacatcctatctggtcctcttccccagccccatgtggtgacctctttgtcaagagcttgggaacgggccagcctggggaggtaagactgcatcactcccctcctctcccttcctgtgtggcccttgtgaatcagcctccccactctccttggtcattctcaagagtatgagagacagagctccaggcatgtcccatccccatgcacatgtggtaacacacacctgtatcacacatgtgcttacatttccactcacatgcacctctgagcctcccttgctgtcttggacctgtctgttgggtttagtccgtggacatttcagagggagatccccctcccatttaactgtcctcacaggcccttgcctaggatggatgaccaacactgcactcaatgagccagcctctcttttgggggaatcaagcatttgcttcctctagactacagcagggaaagggaggagaaatctgatgtctcaactggcacatgaagcccattcttggaactatgcaaagggcagaggctgggagtttggacgcttagctcctacccctgtcctacctcaccggggcactttcaggggccaggggcctctgaagtctctaggcctatatgggacaatcaattctgactgagctcccccattcccctcgggtgaggatgactgttatttttgtagctgagaacgtggaatcccacgggtttttactgcccttcacccaacctctcccacctccaccccacaatgaatgtatttattgtgagaatggctacacttctttaggaatgcccccacttacaaccaggtgggtggaacaggcatgtgacagagtggggagcctgggctcagctcctccccctgccgttggttaataaacaccctttttccccacagctatgactagtctgcttcatctagatgcgcccacccctgatcaccaggggacaggctcctgagcctatacagaaggtgatatctgcctccaggattggctctgctccccaatacaactatttgcagaggaaattgggatcctccgcttccatcctgactccttggcaggcacacaggcctctttagtaaggttcacactattcattgatcatggtgttagggcatgacaagaaaatgacaacagttcaagaattcttacaggggtttctagattttcatttcctgcctctcatttccccaccatcccccctttttaaactaagattagaaaatactcattaatatcagccttcctgcccttccccaaggttctcagcaccccccaccagctggctcaagggacatggattttatttctgcacaaagagggacgtggggggaaggagatgtatagctaagaccagagaaagcttgtcagccaggacttggtctgagaatcactcccctctccctttcaggggtcaggcctagattaatcacttggcctttgatactaaccacctgacagttgttatatgttctgcgtctagttttaaaataatgaaaactgaggcttgtgcttaacatatgcacacattttgaagacagacctgaaatgtgaccttggataagtttattaacctgttttataaatctgtattcacacagatataaagtgcctagcccatcacagcagagctctccgtagctcagtggttgttccaataagacatcagggattcttcagaagccagccttcagacctctcactgtgttttgagatcattattatcaatttggatttaaaaaacaagggccctgtaaaacccttgaagtcttcctcatctcaggttttagggatgccacttgcataaaaatgagtggttcacaaggtcactgcccccagaagcaggcactggaaagaaacaggcagctcttcattatcccaagcagaacctctgtcaacttgcccattgatgggttccatttgcctgggcttggaatcccaaaggggaagaaccacctttaccggagtaacagtccaaagcctggggctgcagttggtggggcaactcttcactgtgcttgcacctgggctggggcaggatcctgaacctctcgggggcgtagcccgcggaacgtggtcggcttgttggtgaaggggtgccactggccctggatgctagggttgtcggtgtggaagggcttgcggatgcggatcacgtccaagcccgactggtcggccagcttctgcaccagcgtcgagatctcctcgaccgacttgcagtggatgctctcctcgcgcacagccccgttaactggcagaagaggggtgagagtgggtggaagctggccggtgcgaccaagcgagaaggaggatagcgggtcgagcccctgatcccgccctccagcccgagcccggccccactcacggtattcggccactactctgggcacgcagcacggacgcgagtttacatatattacgacccctggattccgtcgggcgaagtcgatcacctcccgctccacgaactccctaagcgacccgggacagtgagcagtatgacccctgactgggggcgacctacccggggagtcgttgccacctccacacccaccccgacccgcgcctgcgcacttcccttggctcacctggcgccgcgagacgaggcgccgtcgcggctgacgctgaagctcagacgctgcagctgctgcacatagcgacccagtccgttgtggagaacgctggccaagaagcggctcggagtcccgcgcgccgtcatagctacagcttggaggccgcggagcctaagcagcgaggagaggggggcgggactaaacctcgaggcttccggttccgggacgaccgctcccggagttttgcttccgaggtcaaggcgagtagcatgtgcgggagactcacgttgccggcgaagtgggagagagaaaagtggtaacctggggctgggggccggcgcggcggagctcggagtagtagagcggagtgaagacacgggggaggatagagactggcattcctttgggccgggggattggcgggagtcgtgctgggtgctctcgccgtgttgaggtcccagtgaggggaaggagaagcggaagagggtctctagtcggggcctagggcaaagggactacaaaaaggatgcagatgactatagaaatgaggacgacgaggagatgctgtggaggagcagtagaggtgagaagatgatgcaaagaaactgtgtcagtgaggaactgtatagagggtcatagaggtgaggtggcggagagaaactaactaacggaccatagaggtgggggagccattgtagaaggacgtggacgcgaaagggtcgtgtagatgggcatatgtgtgaagcagcaacgtagaggggctgaagaggagaaattcatggagagaaagaatgcacctagagtgagctctgcagagtgctgcgtgggatatccctagagtttggtctagtgaaggcacgctaaccaggcacctaaggcatttcaagtagtgacttcccacatttggctaggaatgtgggtcctcctccgaagtgggtaccccctccgtatcttgttacccctgcgtggggagtggatgggtcggaggggcctgccccgaaacttggccccaggccctcctcgcagacgttacaggaaggagactctccaagccttggatatgccagtgttgcctgtaactgcaactgaaatccgccagtatttgcgggggcatgggatccccttccaggatggtcacagttgcctgcgggcactgagcccctttgcagagtcttcacagctcaaaggccagactggtgttaccacttccttcagcctcttcattgacaagaccacaggccactttctctgcatgaccagcctagcagaagggagctgggaagacttccaggccagcgtggaggggcgaggggatggggccagggaggggtttctgcttagcaaggcaccagaatttgaggacagcgaggaggtccggaggatctggaaccgagcaatacctctctgggagctgcctgatcaggaggaggttcagctggctgatacaatgtttggccttaccaaggttacagatgacacactcaagcgtttcagtgtgcgatatctgcgacctgctcgcagtcttgtcttcccttggttctcccctgggggctcaggattacgaggcctgaagctcctagaggctaaatgccagggggatggagtgagctacgaggaaaccactattccccgacccagcgcctaccacaatctgtttggattaccactgattagtcgtcgagatgctgaggtggtactgacgagtcgtgagcttgacagcctggccttgaaccagtccacggggctgcctacccttactctaccccgaggaacgacctgcttaccccctgccttactcccttacctggaacagttccggcggattgtattctggttgggggatgaccttcggtcctgggaagccgccaagttgtttgcacgaaaactgaaccccaaacgatgcttcttggtgcgaccaggagaccagcaaccccgtcccctggaggccctgaacggaggcttcaatctttctcgtattcttcgtaccgccctgcctgcctggcacaagtccatcgtatctttccggcagcttcgggaggaggtgctaggagaactgtcaaatgtggagcaagcagctggcctccgctggagccgctttccagacctcaatcgtatcttgaagggacatcgaaagggcgagctgacggtcttcacaggtaaccctttgagaaatcactacttagagtaaaggggcagaagatcaggtgacaaaagcaagtgggtttgggccatgacaatgttgaaaagaaggttggccctttccccccagttttaaagccctgacctatgtcttggtttcaagggtaggacttcctcctcacccaggtctgttccaccccactgcagggccaacaggcagtggaaagacgacattcatcagtgagtatgccctggatttgtgttcccagggggtgaacacactgtggggtagcttcgagatcagcaatgtgagactagcccgggtcatgctgacacagtttgccgaggggcggctggaagatcaactggacaaatatgatcactgggctgaccgctttgaggacctgcccctctatttcatgactttccatggacagcaaagcatcaggtgagactcccagattccagccaccttgctttcccagacatatcccagcactcaggaacctttggttccttttccagctccagtaggaactcccccatctccttaggtttggagtttttcaaagaatgagagggcagggctggacacactggctcacgcctgtaatcccagcactttgggaggctgaggtgggaggatcacttgagcccagggatttgagaccaacctgggcaatatagggagaccacccctctctataaaaaaatttttaaaaattaggctgggcatggtgatggcatatgcctgtggtcccagctactcaagaagctaaagtaagaggatcgcttgagcctagtaggttggggctgcagtgagctgtgatcacaccactgcactccagcctgggctacagagcaagaccttgtctcaaataatagtaataataatagaagggcagaggaggcagccaagagagttttcaggatgctagttcttctgcctggggtggtctagagacaacttgtcaaattccttgcctttcctcttcccaggactgtaatagatacaatgcaacatgcagtctacgtctatgacatttgtcatgtgatcatcgacaacctgcagttcatgatgggtcacgagcagctgtccacagacaggtgacggtgacatcctctcttgtctagcttgagcccgcttggacatacaacacacacttctcaggcagctggcctctaggcacacatgctgtgctctcctattttctgagatgtgtgcaggcacgtaccacccccatgtgtatcatatggaggtgtggggtatggcagcaggatgtatggacagggatctgagtgtgagtccttgggtagagggaggtagagtgggttgtggtagtttgtggggagatgtgaatggatcaagagtatgtgtatgttcttgtccttctgtgtctgataagctctttgtgttgttgggatggcgtaggatcgcagctcaagactacatcatcggggtctttcggaagtttgcaacagacaataactgccatgtgacactggtcattcacccccggaaagaggatgatgacaaggaactgcagacagcgtccatttttggctcagccaaagtgagtggcctttagcggagctcaagctttggaaaatagagtgggtaggtgtgaccagggacagccctcattcagccttaatcgtcttgactgtccatccgaacaggcaggaggcaatgcctctggggccatgacatgaggaatatatgtgctggaaatacaaaggctgatagttggttcttatgctcttcttgtcccccaggagctcacatcctctcctggggaaacagtaagacagtgattgcaattcagtatgataagagtatgataggcagcacaagtatttggagagcaaagagaaaagatgtctgagtcagcccgggacatctgggagacttccagaggaggtgacaacaaaggttgggttgaggtttggtagacaatgggtattagacaatcagataaatgtgagggccttctgggcatcaggaccagcccaatcctggagcttctagtgttacactgaatgcctattacatacgaggcctgggctgggcctagggaattcagagcaaggagcacaaatcatgtgccatgatggaacaaacatggagctgggaaagagagtaatgcagaagtggaaaaatggcagggtacagtggatcacacctgtaatctcaacactttgggaggctgaggcaggaggattgctggggcccaggagtttggcaatctgagcaatgtagtgagaccctgtctctacaaaaatatttgaaaattggccaggcgtggtggctcacgcttataatcccagcactttgggaggccaaggcgggtggatcacgaggtcaggagatcgagactatcttgctaacatggtgaaaccctgtctctactaaaaatacaaaaaaaaaaaaaaattagccgggcgtggtggcaggcacctgtagtcccagctacttgggaggctgaggcagaatggcgtgaacccgggaggcggagcttgcagtgagcggagatcgcgccactgcactccatcctgggtgacagagtgagactccgtctcaaaaaatatatatatataatatatatatatttaaaaattagctgggcatggtagcatgcacctttggtcccagctactcaggaggctgaggtgggaggattgcttgagcctgggaggttgagactgcagtgagccgtgctcacaccactgcactccactccaacctgggcagcagagtgagaccctatcttttttttttttttttttttttttttgagacggagtctcgctttgtcacccaggctggagtgcagtggcgcgatctcggctcactgcaagctccacctcccaggttcaagtgattctcctgcctcagcctcccaagtagctgggactacaggcatgtgccaccacacccgcctaattttttgtatttttttagtagatacggagtttcaccgtgttagccaggatggtctcaatctcctgacctcatgatccgtccgcctcggcctcccaaagtgctgggattacaggcgtgagccaccgtgcccagctgagaccctgtctttaaaaaaaaaaaaaaaaaaaaaaaaagaatggtctccttcatgagatgtgacatttagactgagacctaaaagagaagaagctgaggttgagtggggtggcccgctgtggagaaggagagggaacagcacaggcagcgtctgaaacagtagcaagcttgtcagggaactgaaagatttgagtggccccagcatcgtggtcagtagttcaaagagctttggtcatggggggaagtacttttccctctcccattctttctctttttttttttcttttttgagacggagtctcgctctgttgcccaggctggagtgcagtggcacaatcttggctcactgcaacctccgcctcccggattcaagcgattctcctgcctcagcctcccaagaagctgggactataggtgcatgccaccatgcccagctaattttttgtatttttagtagagatggggtttcaccgtgttagccaggatggtcttgatttcctgacatcgtgatccactcgactcggcctcccaaagttctgggattacaggcgtgagccattgtacccagcccctctccccattcttatcactcctccctgccctgtcagcccccctttctgctttgctcatgtcctcttactcctgctttcctccttctgccccctgttccccaggcaagccaggaagcagacaatgttctgatcctgcaggacaggaagctggtaaccgggccagggaaacggtatctgcaggtgtccaagaaccgctttgatggagatgtaggtgtcttcccgcttgagttcaacaagaactccctcaccttctccattccaccaaagaacaaggcccggctcaagaagatcaaggatgacactggaccagtggccaaaaagccctcttctggcaaaaagggggctacgacacagaactctgagatttgctcaggccaggcccccactcccgaccagccagacacctccaagcgttcaaagtgaaggccgtgcagagctggtcactgaaatgagcctgataggataggctggagcataaaactctgcaagggctcctctatcctgtggtcctgagctgtgtgcccttctcagtctgaggggcctaacctagagcaggtttccatagtgagaaaattcaatgtagcagactactgagaaactactgtgttgctcaggctttgtttgaggtcctgtatatacagcactgaaaagagagataaagtccctgcctgcatgcattctggcggaagagacaagcaagcaatgaacaaattagcagaaaacctagttttagtgaaaaatgctgtaaagaaaatagaaatgcgatagagtgctggcaggctagtgtagataagtggtctgaaaaggtgtctctgagccgagggcatgtgagctggggcctaaacaactagaaggagagagccacgtgaacatccggcgaaggggacccaggcagagagaaaaggaaatccaagccctgaggtaggaatgagcaggtcagattcaaggcagtgaggtcaggccgcatgaacctggaggggaatcggggacttcatgcgaaactccagcctaggctttcaaagtcaaagggtgatacagtgggtaccaagctcctctgctccccactttgtagagcctagcatgaggtggcatgtactagaattggatcctaggtgcttagccctgcaatatcagggcctcactggtgggagctgcctcgggctgggttgcttggtcatagagccatagaaggaagctgtcagcccggagtgcctgccacctagacactgatgccattgtgtgctgcctcaagactgctggagtcaggacattttatagagccttttccagttttactaaaaaatttttccattgcctttgtttctgtgctttttcttattcatccaccaggtgtctccccagtccgtagctgaatttccctttcgggattgggaatggacgggtcccctcccactgcttgcagcctttgagcggtgggcttccaaggaagcagggacattaaagggccttcacaccccaccttccatttacatctcttcttggcctagggaagacaagatgatctgtcctcatacctaacttccctgaggatctcgagtgattcctggcacaggtactcatcactgggccacatgagcccagtgccctgcctgactggccattcctctgtgatgtgagccactcacctctcaagtggacttagactcaacatattctgtccacccccatccatctccctcctgtaccctctccgtgtttctcatatgctaatgcgtgccagaactcctggggacttgtgaaaaatgcagaaactaggccccattctccccccatcctccaccacgtacatttctcattctggatttgaggacgggtacagtaatcctcatttttaacaagccgtggaggagactgtaaaataggtgacccagagggactgtcagaagtattcctaaatgatgacaccttctcatctctcgtcctctgatatcccaaagtcccagtttccctttggatttgcctgaaagagtcgtgagaatgcaatatgttctgagggggctggggagaatccttttgtaagggttgggggaaggtttcctgctccgtttggaagcagggctgccttgtcaggctcttcctttcaacctatgaaggggcttctggggccgatggaggggtctgtggtctctggagtgtgagaactctggtcacaaatgtctcctgaaacatccggagcaaggctgctggaaagctgctctctgtgaggaagaacctgggggggtggggagagctcctccagggcctcccttcttgggggtctctcccagactggctggagccaggcctccctaatcccgcagtaatcattcccagccgttggctggtctaggcctcatccagagtctgtaacgctgaacggcagccatgccttccagaggcacaataccatatcagtcatacctgtaaggatgtgggttccacattcctgtctccctagaatgcctggtgggttctcaggagatcttttaggggtttccagtaggggacctttgtgaggtctctgtgaactggggatagagggatagatacagacttggctgtttgtcttgccccacccttctagcagacacccccacacagcacaaaccagaatgatgagggggaggggaagctaatactccccccagccctacccgctgcacaaacacgttctattccatacctgccttaaataccccatatcatgattccacccagtctgttcagatccctggattctagaaagcagtggggggtccctagggcctgtgcggattccctgggataggactggtctgtctacacccaactggatgttaagaatctccctgactcacaggttcggtggattgggaggaaaaaaaaaaaatttccctgagatctcaggaaaggcctggctaagccaggtccagttggatctacagccttgtcctctaattgataatgtatgtcacacttggccatgaggggacagctttggtcctctggcagcttcctctctgctgtggatgggtttaagaagaaacaactcggccgggtgcggtggcttacgcctgtaatcccagcacttttggaggccgaggcgggtggatcacgaggtcaggagtttgagaccagcctggccaatatggtgaaaccccgtctctactaaaaatacaaaaattagccgggcgtggtggtgcgcgcctctagtcccagctgctctggaggctgaggcaggagaatcgcttgaacctgggaagcggaagttgcaatgagccaagatcgtgccgctgcattctgggcgacagagcgagactccgtctcaaaaaacaactcaccgaggtctcctgtagcccatatgggccagatacctgtagaccttcctacatgctgccttgagtgccatggtgggagggagcccttggggcctccctgcaatacaggccaacttcctgtttgtgcctgtgggtgggactttatgagtcttcgagaagcccagccatgccccgtgggggtcagaacccgcaggcctgctcacctgggcagatacctactctagggagggggctgtgctggttctgcctgggcagccccacgctgaggtgtgtgcgtggtaggggtaggtgggagctgctctggtgaaacttgagccttctttgtctgcttcccaggggttgtccctgtatttggggattgggccaagagtggaccgggttgggctcccatcggagcagggagggtggcagagtcaagctcttagtttaagcttagtttaaggcagccaggtagccgaattctcggtcacgtgatgctcgcccccttccccaggtcaaaaaccaaatccagtaagctgtgaagtcagaggccagaggggcagcctcggccaccgtcgagtcactcttaggctgggcactgggtcggctgctggtggagtgcggggcagaccactcccctccctgggtggggggcgcggcctgagccgccccgccccgccccgctccaccaggtcgggccaggcgggcgccgggagctgggagccgggagcccagagttcggaacctagagttcggagccggctagggagccggcgttgtcgcggcgaggaggtgggcgcgctggagcaggagcggggccggaactggagccgaggcgcaggtggcgctgggtgagtggtggggcggcggaggtgcaggaactcccgcctcccgctcatccccgctcctgaacgaactttccgcttctagggaagctaggggttggggtgaggaggggggtccgcacttggtggggtccccgcgaagagtccgaacagggaagtgacacgaaaacgcacgccgacgggccccacacacgcgtgcacagacccacgcccgcacttgggacacgcgaacacacatgcactcggaaaggacgcgcccagttggccacccttgcactcccagggacagcgccagccggcccgcgcggacccacagcgggcagggcactctgcggtcgcgtattgggtgcgggaaaggggcagccctgtgactaccgacgggggcgggccgggtgggacgcacccggaggttcctgcttcctggcctcccgcaggtgaagaccaagacgtaaacagacgccgagcacgtgacagctccgcagaccagtggcctgtgcccccaacccaaccacggggcggaaatccaccctagtccggggcgcgtttgcttggtcccaggccggacggcgttccattctccgcctggagcggggataagccctctcccgggaaccggagcacagcgccccctggagccggggcggagcaggagggcccggctgctgggcagggctggggttaactcgggctcctggacgtccttctccccagcacattcttggtgtctgcatccctgaaggtttcggagacaggcccttgatggcagtggacagctgcccccgcctgttaccgccagcccagagagcagctgcctgagcgcctgcgggtccccttcctaccctcacctccactccttgcgggagtcggagtctcctccccccagaaaatgcatgagtgtaaacgctccctcaataccagagtgggcctgcccccctagaaaaaggaggacgagcccctccccccagggaatgagggagtgggcagtagcccgatgcctcctcctcgccccaccccctacccctacacacacgctgagcccagctgccgcctgagctgggcaggctgccagaaagaggaggaggctctcggtgccccaggaggcagggatcagggcaaggccagaggagggggctctgctggggagaggggctcagtctgttcttgtgaggctgagggtctggggtgagtcagggtggctgggctgtgtttccctttccagggaaaaagaaagaaaaacaaccctgtccatggagctaaaaatagagctgagagccggccagggctgtggcctggaagggggggatgctccttcctggggcccgggcgagctccggcaggccttggccctgcgggggagggggtggttaggggagaaaggctgcctttgcccagggatgcaggcatcagctgacctgaccgggtcaccgagacccctaggggaaaggctgtgcggtagaatatttgtgaagcacggcgtgtaagaagttgtctgtgtgagtgactgtgaatagaggctgtcaatgcgtgaaagatggttaggagactaagtgcacttgagactgtgactgggtgcgaaggactgcggattgttgtggaagcctgtgcccaacaggcctgtgacaccgtgtctgtgtgtgaggtggactggaagattatggaaagaaggaacgcggacccacgtgacggctgagactgcggctgcatgtgggaaaggtcttgtgggtgttagggagactgtattgtgtgcgagaaggtgagactacttgaccctgaggaagtggaatattgtctgccgtgaggctggtgtaggtttgggctgtaggcttgcaccggttcgccccagtgattgttggggagccaggggccgctcctctccgataaatgacctctctcttagcaagtgatcccgaggggaggctggggagcacgcggtcgcgccagaggccggcctgggttcgcggggaaaagggcaccgtgccggggagtggggcagggcccgcgtgttgggggcggctgggtgtgttctccgagccggccgccaggtggcgtcgcctccgcgaagcccaggttgccgcctccaacccgccgtggggcaggcgcggatcgagcctcggcctcctactcgggctagggcgcggggtcccggcaccggagagtgggggacggccggccatcggcctctcgcttgggactctgaggctgagagcgtgtcagggaagcttcgcctggagaagcggagggggaggggcggccgccgccgcgccgtggccctttgtgctggaacaatgaccagctgccgctggccccggggccccggctggggttgagggtgaccaccgccgccgccgcgtcgagccgaaccgagcccccagacacgcagtcacagggcgtcggagggagggctcccgactgccgccgagcagcccctacgtgcgccccggcggattcgcgtgacgcgggtgcttgcgcgtgtccgcgccccggggcggagacgcccctcggaccctcccctgcgcggtgccgcccactcgcaccgggcgggggctggccagggccgggggcgccgcggaggcggaggcggggctgggccgggcagctccgagtggcggcgcgcgggccagggccggggccggggccggggccggagccggagccggggccgggcggcgcgcctgtggagcgctgggggcggcctggggctgagcatggagcagcgcggcggaggtgaggggggccgggtctgggaggcggcctggggagcccccaacttatgcgcggtggaatccagccggggggacggcgttccccagtcgcccccactttctggaaggggggctggactctggagaatgggtcaggggctcctggcttcccgccgcagaatgggaactcgtgatcgcagacttgaccccgcttgactggtccttggagtttgggtgggagggagactttccccaactcttcagatccgtctccggccctgaaccagctccagccctctgctctcctcagcccactaaaaggggggtgctcctgggccagagtgattgctcagggagtgctggggagaatgaggggttcccatctcccacagccacaaacgcatttctcaaaatggagcctccacttgcccctccttctctttcgggctccaagagcgggagccggcctggctgggcctggctttccagactcctggctctggctccctggatgtgtggctctcagggcccggctctgtggcactttggacttatgggccctcggctccgtggggttggggggccctggctcactgggtcccgctggctgtccccttgtcggcctgaccctcgggcctctccgagtctttgtctcttttgggtccctgtctttctctgagcctgtctccttccttcaattttcactttctccgtgctcgctgaagtggggaaatgcaacagaggtgccagcccccttggccccctaagaagtcccttccccactgttcactccacaccctggagtgggcccagagaggggaggggagggggttctctatctgctctgctgggggctggggtgtgtggggtggtctgagccccagccctacagaggggcctgtggtcactccctgctcctggcctacccctcccccagctccccgcagctcctgccccagcgtggacacctcttcctggttcgcagtgtcttttgacttgggtgggaaggagggcggtggatttaatggagggcatgcgagaaagaaggggaacagatcaggcaaaggagttagataatgtcccacctctccccacacgccgaagagagaaggaaacaggctccccccaccaatgggccctcaagccacccaggctcccaccactctcatacctgcgtgcccacgttcacaggctccactgcaccactcaccttcctagtcacacacaaacacaggagctcacacataaactcatgaacttactgacaagtctgtccaggcaccgtctctcccacacaccacaaattcacttgttagatccacatttataactttcacaggctttctaatgacccctgatccacatactcttctaagatatacacatgtgaattcacacatgaactcatatgtatgtgaatgaactgatatatcaaacatgcatagactcacatgatgttttcacacacattttcatacacacgtgttcattttcatgctcctgtgcatgtagtcacacaacaaataactaaatgcacacactcctactcccagtgcaattctctgtccacttcttggccccgctctgcatgatgacttcagcagatgcctaagtcctggtcatcagcggcctcgggactgggactagggagggggttccgggtggaggcttgcagctgcttccaggaaggagcagagcctggggaggtggagccctcttgcctgggctctgtggaagtgaggttttggagcagcctccagaggtgaaggcagggcatctaccttcctcccctcagggttagtttggggaccttctgaagctgtagggtttcagagaggttggcagtggggcagagcctgtggaggctccttcaggccttcaggcctcaccgattgggtgtgcagaggctaggagttgtcatggaaactggtatgagcctgcatccacctctgggaggcaggagaccccaaaggacacctgtggactccctaagagccgcgggtttcttatttagccagatcgacagagaggcagtttagccgcctttctgtctgagagaaactgaggcccagcagagggaggcagggcactgcctggccttggctctttgttccctaattaccatctgaggtgctgattgcacccctgaggtacctctgcccaaactgccctgtaatgaggccacctggctgagaggaccagggacctgtgcttcaagctggtagagaaggcccctccctcacctgagtcctggcctctgtggaggatgcaggattgggcttgggcctgggtctttgctgccaggtggccctgcggtaatcatccaggcctcccatgcctctcagcatctctgctgagtgaattcactcctcagccctgttcagaccagcattgggcagtgtggtttggggcccagggggaattgagattcattccagcacttgaagggggagtcttggtggggatcagggcttgttactgatgtcaaggaggtgtttggtcaggatcagtgggtcaggaggggtctcaaggtggagggactctgacaccactgccctgcttacaggtcgcctgcgaggccgctggccaggcctgagcctctgccaccatggccattgtgcagactctgccagtgccactggagcctgctcctgaagctgccactgccccacaagctccagtcatgggtagtgtgagcagccttatctcaggccggccctgtcccggggggccagctcctccccgccaccacggccctcctgggcccaccttcttccgccagcaggatggcctgctacggggtggctatgaggcacaggagccgctgtgcccagctgtgccccctaggaaggctgtccctgtcaccagcttcacctacatcaatgaggacttccggacagagtcaccccccagcccaagcagtgatgttgaggatgcccgagagcagcgggcacacaatgcccacctccgcggcccaccaccaaagctcatccctgtctctggaaagctggagaaggtgaggaccggctcttccttgtgggcctgggtagaacgggagtcctcgcttgggaaactggaatttagaagcttatatagaggaaagagtgtgggctccagattcaccagacctgggtcctaatcccagctctctctcattctggatgtgtgacctcagggaagtcacttaacctgagcctcagtttctagaactgacatgaaggtcaaataatgtatagcatagtgcctagcacgtagcatgtacgcagtaagtgctagttgcttacgttctggttattctgcaccagttatacgtttgactttgggcaaggcctttaaccttgctgagcctccatttcctcatctgtaatatggggatagtgatcatatttagataatggagataaacttttcaaattgcttgacacaaagctgacactggtggccacctccaccagtggccgcaattgttatgaatatatgggcactggggacccaagacgggagggcagggagtgtcataagggctctgcaagattgggcagctcatctccagtgtcacatggcacctcatttcagaacatggagaagatcctgatccgcccaacagccttcaagccagtgctgcccaaacctcgaggggctccgtccctgcctagcttcatgggtcctcgggccaccgggctgtctgggagccagggcagcctgacgcagctgtttgggggccctgcctcctcctcctcctcttcctcctcctcttcagctgctgacaaacccctggcatttagtggctgggccagtggctgcccatcagggacgctatccgactctggccgaaactcactgtccagcctgcccacctacagcaccggaggtgccgagccaaccaccagctccccaggcgggcacctgccttcccatggctctgggcgaggggcactgcctgggccagcccgaggggtccctactgggccctcccactcagacagtggccggtcctcctccagcaagagcacaggctccctagggggccgtgtggctggggggcttttgggcagtggtactcgggcctcccctgacagcagctcctgtggggagcgctcaccaccacccccgcctccacctccttcggatgaggccctgctgcactgtgtcctggaaggaaagctccgagaccgggaggcagagcttcagcagctgcgggacagtctggacgagaatgaggctaccatgtgccaggtgtggtcagaggcaatgatggggaaggggcatggcaggacatcccaaggccctgggatgcaagcggcatttccattttggcagggaacgggggttgggtagttgtagttgtgacccccctgccctccccaccagttgtctggtttaatgtgtggagtagccaggtgtggtggctcacatctgtaatcccagcactttgggaggccgaggtgggcggattgcttgagctcgggagtttgagaccaacctgggtaacatggggaaaccccatttctactaaaaataaattagctaagtgtggtggcatgtacctgtagtcccagctacttgggaggctgaggtgggcggatcactggagcccaggaggaggaggttacaatggactgacattccaccattgcactccagcctgggcgacagagcaagactctatctcaaaacaaaaaacaaaacttgtggggtggaaaggagtcagagtgcatggattcaaacctcccactgccaaatactagtttttgggcttgagcaagttgcttaactttactcagcctttatttcttcatctatatagggatatttctagcttcgtaggattattatgaggattaaataaggcaaaaggtgtaaagtgattagactaatgcctggtacctaggaagtgctatataaatgcttgccttttttaaaattttttattattttttatttttagtagagacagggtttccaccatgttggccaagctggtcgcgaacccctggcctcaagtgattcacctgcctcggcctcccaaagtgctgggattacaggcgtgagccactgcacccggccaagtgcttgctttttttattttttgagacaaggtctcattctgtcacccaggctagagagcagtggcgtgatttcagctccctgtagcctcaaccccctgggctcaagcagtcctctcaccccagcctcccaagtagctgagactacaggcgcatgccaccacaccaagctaatttttggtctttggagaggcagggttttgctgtgttgcctaggctggtctcgaactccggagcttaagtgatccacccacctcgcgtgagccaccgagcccggtctgcttgctcttgtgtttgtttctatgatcatcataaaagcagttagtattgttgttgcaattactattgttgtttaatggaatccacccttcctgagccctcggaagtgggctgccagagcagacactgagtggggagttgggaaaactgcccaggagccaggtctctcttctcgcctgcaggcatacgaggagcggcagcggcactggcagcgagagcgtgaggccctgcgagaggactgtgcggcccaggcacagcgggcacagcgggcccaacagctgctgcagctgcaggtgttccagctgcagcaggagaagcggcaattgcaggacgacttcgcacagctgctgcaggagcgcgaacagctggagcggcgctgcgccaccttggagcgggagcagcgggagctcgggccgaggcttgaggagaccaagtgggaggtgggccagaccaggaggggcagggagcagggtcacacagggagaaaccctggaaaaaggggcccagccccaccctccctcagcctgccacccccagaggtcctcccctttctcacctccgtgagatgaggttcccctctgtccctttctgggaggggggtctccttgttggccttgtctagtggcacgtagccacgcttccagccagtagtaagaatgtggtgcttgtggtgtggaggcactattctaagcatgttacatggaacagatcatttcatccttataacaacactgagggggctaccattagtctccccattttagagatgagtaaactgaggcccataaaggctgaagccccaaatctgaacccaggcagtctggctccaatatctgagctcttaactaggtcactgtagtacctctccagcaggcacctgggcactgccctccattgtccccactcctgcagcacttgccaggacccagtccccagtccccagtccccagggcttggtggtacttgcagtgtcttgtgatgctttgaagacaccagctttgaagcaaaaagttctaggtctgctttccacttaagccccatcttaactgtatgaccttggacatgtcactagacttgctttagtgtctccatctgtaaaatggggataaagatggactcttctctcccaaatgcccagcatgatgtgcagggcctgtccccccaggagaacctgtctcaccatccttccccacttcctcccacccccaggtgtgccagaaatcaggcgagatctccctgctgaagcagcagctgaaagagtctcaggcagagctggtgcagaagggcagcgagctggtggctctgcgggtggcgctgcgggaggcccgtgctacgctgcgggtcagtgagggccgtgcgcggggtctacaggaggccgcccgagctcgggagctggagctggaagcctgttcccaggagctgcagcgacaccgccaggaagctgagcagctgcgggagaaagctgggcagttggatgctgaggcggccggactccgggagccccctgtgccacctgccaccgctgacccattcctcctggcagagagtgatgaggccaaagtgcagcgggcagcagccggggttgggggcagcttgcgggcccaggtggagcgattgcgggtggagctgcagcgggagcggcggcggggtgaggagcagcgggacagctttgagggggagcggctggcctggcaggcagagaaggagcaggtgatccgctaccagaagcagctgcagcacaactacatccagatgtaccggcgcaaccggcagctagagcaggagctgcagcagctcagcctggagctggaggcccgggagctcgctgacctgggcctggccgagcaggccccctgcatctgcctggaggagatcactgctactgagatctagggccctcagcaaccagctctgtagggagctctgccagaggggcagcagctgcagatccacttaggccccagggtccacggatggccccaaaggctgagggccccaaagccacttgtctcctaggatccaggcctctgggcttctgccaagaactcagggtggccctatgacttggaggagcaagatcagaccgctcaaaggtccccgtgttcactgttacccagaggctcttgttactacccacttcattccccaccgctgccagtgccactgccaaccctgttcacaggcgcttccagcccactccagccaggggagcagggaagaagaaggggctccctcctcttcacattccccccgaccccaaagccagagaaagccagatggcaccagctgctccggatgtgcctgcccacattgggggacagggccgggcctgggctcggttcccaggtttgagctctgcagcctctctcctggagtgagggggctgaagtcagaccaaaggaagaactcagaaatgtcttgtttatttgtgtttgtgaccaagcagcctctcccttcacccaggtttatggcctcgttttcacttgtatatttttcacactgtaaatttcttgtacaaacccaaagaaaaaattaaaaaaaatttttttgtttaaaaataatgtgaatgtgctggataaagagtacaggaacttgtttgacccccccccccccaccatttgctggctattctcctccccctcatagagctctcttggggagaaaaggtgatggaggaaggacaaatccagtagaatgtctgaggtcttagtggaccccaacgtgaaatgatctctcaggatttcagggactagaaaagcctttcatccgtttccttgcacagaatgctgcttggggttgaggaatggatgcattgaccccttcagggccctgtctgagagtctgtgtccctggaggcttgggcgactcataagggacagcatgtgagaaagtgcccaccaatcccaagctccagaccttggctttctcaccccctatcctggcttgggaggttggggagcagtgagtgcaggtgacacaggctgcccactagcaccttgtccttggacactaaggcagagccttaatgacagctgaggagggaagaaagtggaaagatgtgagccaccagtgtggcactgggaggaggcagggtgggcaggagctggagagtcctgaagaagttggtaggagaggtcctggggataacgggatgctggagtcagtgggtgaatctgaggttagggggagggtcatgggatgcgtggggagggtgcgggcttagaatcaggagtctggagggctggggagggggctgggctgggagttggctggaggagcctggcatcagtgggaggagtctggggattggtgggaggttctgggagccagtgggcaggaactggagcagcatcaaggggttggtgggcaggcaagtggtcagcaggaaggcccccatcagtaagggctgatgagtcagagggtgagggccgtgggctgggcccggggaccctgaccacaagctccatgggctcccgggccttgtttcgataagcccgacggatggtgtctactgcacgctggtgggtcacctgctctagattctctccgtccactgccacaagctcgaagccagcctagggtggggtgagagagtcacatccctccctcctcatgtcaccctgcatcagcccccaacctgaaggcagcatcttctcacctccacccatgaggacactcctcccccatctgggtggaggggatggacaatgagacttttgtgcctgcagttgttgggggcagggtggggcacagacaagggctctttgtcccttggggctcaggctcaggctagcatgaggggacagagttttccctgggcctgctcatcctgctcacctgaaccccctcaccccaagcctcctcccacaacccgggctaaacatgtctggctggaagctgagcatggccagccccacctcctgcctggtttcagctgtgctctgagagggtgggccagggcatgcttcacccacctgcagggccccactgaggaaagcggcccccccagggaagatcttctctatcttcaccatgggctgcaccttggactcaatgcccccagaaatgctgatacctagtgacagggagaaacaccgtgtgagagtgcagccggaccccaaaatgcaagctccctggagaaacctagaatcccatccccaaatccaaggccccaacttctcccacatccctacattctgttactactcaaatctcaactcattccaaaatcctccagatcccagcccctcaaatctagaccccacccaactgcaccccaataccccaaattcccttttatttatttattttttgagacagagtctttttttttttttttttttttttttgagacggagtttcactcttgttgcccaggctggagtgcaatggcacgatctcggctcaccgcaacctccgcctcccgggttcagccgattctcctgcctcaccctccctagtagctgggattacaggcatgtgccaacatgtcaggctaattctgtatttttagtagagacagggtttctccatgttggtcaggctggtcttgaactcctgacctcaggtgatccaccctcctgggcctcctgaagtgctgggattacaggcgtgagccaccgcgcccggctgagacagagtcttactctgtcacccaggctggagtgcagtggcgcaacctcagttgggctcacggcaacctccgcctcctgggttcaagtgattctcccgctcagccttctgagtagctgggattacaggcgcccaccaccacacacggctaattcttttgtatttttagtggaaacggggtttcgccatgtagcccaggctagtcttgacctcctgacctcaagtgatccgcctgcctcagcctcccaaagtgctggggttacaggtgtgagcctctgcgcctggcccaatactcctccagattcttttcctaggcccaggcttcctagtgtcctctgccgggcccagtcccacgtggactcacctaaggactgcttcatcttggacagtgtcactgtcttcagctcgccactggggttcttcatggctgcctccttggccgtcccctcagttccactctccgagggcccttgcttggcccccaccttggctgcctccccatccagaggtcgtggcagagggggtctggccttccgaggcttgtggtagcgcccattggtcatgctgggggcaggggtaggcaccggggatggggagcgtctacctggagacttgccttgaccccggctgctgcggctgcggctgcggctacggctgcggctacggctctgagcccggccccggatctggctctgcggagggtgctctcggctcaggggttctgtcagcagccagttaggccgcaggggccggggagccacggggggtagctggggagggggtgtgcaggcaattcggaggggggtgaaggcatctactggcacgtcttgtagaggggggatccctttatgggggtggcgaggggcagaggcacttggggagaccttgagggcccccagccgctccctcagctccccattatcttcctcttccgggaagccgttcaccggcagcaggtagaagcctccgcggctgtctggggaagagcgccaaggtcagctgcccactcctcccctctccaggacccaggccttgctttggtttgtgtggggcctgtgagagccaggcccgagtttgttcaggcaccactgcagtgcggcccacccaccggggaggcagacagacatgttctattagaatcgcttatttatttatttgagatggaatctcactctgttgcccaggcgtggtggcgcgattttggctcactgcaacctccacctcccaggttcaagcgagtctcctgcctcagcctcccggagtagctgggattacaggcgtgcaccaaaaagcccaggtcatttttgtatttttagtagagacggggtttcgccatgttggccaggttggtctctactcctcacctcaagcgatccacccgcctcagcctcccaaagtgctgggattacaggcgtgagccaccgcgcccggcctagaattacattttaatgcttcctgctggaatcgttaccgttctattttaatgtgtctaagaaaaaatacgactagcacaccaaacgtaatttctcagaggttactgcatagaatgagactagattttaaaagtgagtgggtttcaaaccaactattaagtaatagtacaggtggtgaccagcagatgtgataaaatggctctggtggacaagagctttccttcagggaaccacaatgtgcctggaagccacaactgcccctagtggggaaagaagtagaaggcccatcctcctttccctaatctccccagggctgtgcccctccctgggctctgggactctgactgaccaggcacgggggtgataaggtgacgcttgggtggcgtgtcctgccgggctggtctcaaagcaggaggccggactggttggagagatgaacaggtcagcggcaaggtaccccgccaggctccgggacggaggcagctcaaggggctcggcaatctctgcagccctctccaccacggggtcccatccccacccccagcagggctcaggacccagaagccccgccccccactgctgacctgccctgctcttgagggcctcaaaagcctccagctccacaagcatcaccatgctgtcgaagcggcccaggtctgtgggggccaccacactcctgggagagggcgagagacagcaggggtgggaggggcaggcaggatttcagttccggaggtgccaggatgcccttcagccctcgggaggttgggggtggtaccagggatccccttcctgcccccaagccctctctgcaacctcctcccacctgatgtcctgcagcagtagcagcttctccggcctgtcgaggatggccagcaggggcctcaccaggtcctctatgcctccctcgtgcacatactgcagatagaggcagcacaggtcagacagcagtgggggcttccagagctgagtgagggggacaccagggcatgcaggtgtttcttctacgcatgtagggacctatccagccctgcgtgccttgggaaaggttcactccacccccagctgccacagggtggtctgatcttggtgacagggtggaagcctgcagtaataacagacctgcaataaatggcaacagcatcgataacagctttgggacagacacttttctaagccttttacatactgtctctcagcaaccaccctgagaaatggcattaattattcccgttttacagatgcggaaacaggctcagagagaaggacttcactcaaagccacacagataaggaagtgtgaagagggactggaacccgggaagtctaactcttgcctgctctggtgccggaaaaggatgtgcagggagtggactctcctccccacccccacatcccaggcagaaggaaggaatttgagccaaactctaggctgtgtgcctggctgtcccagcatatgtctgcacacagacctacaaattaggctttgttcggggctagaataggagccttggggaagggcctctccaatcagttcccttggaggggggcggggtggagccccttctgcctggcactgcccggatgccaccagccacaccccactgactctgaagacctgaacactgggagccatcccatttggacagcacatcgccccctcgtggcaagagggagactgagtcagggacacgcacgcatagaacactttctatgggcacaggcacagagacagagcatgccttggtggtcagagtgagtcattcataaatatctggaaataaatacaatacaaatgatgtgtgtggccccaaaccacacacagttacagcgactcacacatacacatatcaataatacattcccttttgtctggagagacacatgtggtgcagaaccagcctcatatgtgcacacgctttaagtccatggacttggattcggtacctactaagtgccaggccctgtactggccagcaggggcacaatgatcctgtctcagatcttcaggaactgggtctagtgggagcgaggggaagatgagtcacataccctggtgaactacaaaccatgggcaatggggcacagggagtctcagaggaaggtgggaagatcccagtgggcttcatggaggtggtggtattttgactgactcttagaagatagacgtagggaacagcacaaaagttgggaagaaagtgttgcaaaggtggtgtggaaaaacgagtagatagtggtttaaacgtggccatggggtccatgaagagcctccctgcagggctgctgcacaggctgtgactatatgagtagcgtctctgaggttgtgcaggttgtaacctgtataaacctatgcggcggccgtgggaaagtggaggttggtgggttagggagttgaatctgggaggacctcgaatgtgagagccaaagacaatgggtcacctctgccaaagacaatgggtcaccaggtggcctggggagtgtacagcgatcagacaggggtttcttttctttcttttttttttttttttgagatggattttcgctcttgttctcaggttggagtgcaatggcacgatcttggctcactgcaacctccacctccagggttcaagcgattctcctgcctcagcctaccgagtagctgggattacaggcgcccaccaccatgcccagctatttttttttttttttgtatttttagtagagatggggtttcaccatgttggacaggctggtctcgaactcctgactacaggtgatccgctcacctcggccacccaaagtgctgggattacaggcgtgagccaccgtgcctggccaaccagacaggggtttctgattcctggtctggcagctgtagagagatggctcacatggggagagaagggaagcctggagttcagggctacatgccccagtcactaggagaactttactcatcactccagccagggctccatcgcagagggtctgatctcttggtgtggggggcttgggtcaggtttgggtggtggttgagctcggcaggtggtatgggggcacaagtgggaggtttgggcagaggagaagggagggatgagggaaaaggagcctccaaagagacagacccagagccccacctcgtggccaaagcctgcattgccggcccactggaggctggtacacgctgccctacttagcgctgggagctaagggtgacactttctgagtttagcccaaagccccttagcttcccccagcacacacccctatctgcagctctgctgcaaaccgggccttgataacaggatgcataaatgaccatgtctcagtctccaggtgacaatgcatggacacacacacacacacacacacacgctagccagacacgtgcttgctcacatgcacacacacacacacaatcatgcagtcatatcagtacaaaccaggtaccccacagacacgccagtgcacacaccacacagacatacaacacagccccactttgagtaagatgaagggtgagggaatccacaaacaatttttcaagaccccccagctcgccctcacacacagtgtgcagactcctcacaaagagcccagtgtacacacacaggccttcctgagacagggacaggagaggacctgccagtcctggagtgagtgacctgtgccccacagcctccccaacaggtgggccccagagactccttcaaatctgactctctctccaccctggggcgctctggttctttttgaagtggaagagaacagagaacgacagtttaggtgttgggggaggcaaaggattacttacttgggcaacaggggagaggacctggcatgaagccaggcttactggctgacctaggagcagagggtggcatgcagtgaaggatggaggcttgcagagggcagaggcaggcgactgcagggactcactttccccacgtggcacctgtccgctccttctcttctcagcttaaatatcacctcctctaggagggcctcccagcccacaccatctaatgtgtgtctcctgggttaccgtctcatgttctttttcttcagctcttcatgtgactcatcaccatgggcgtttaggttctagtgattttctagctcttcttcctgtgagctggcagatgtgtgtgtgtgtgtgtgtgtgtgtgtgacaggagtgacttctgattttactgaccactagcctcctggtgtcaagcccagacactggtcagtggacagtggcctgaatgaatgatgggctgggtgactgaaggaccgtgtgccagggctgcggatgggatgaaggcttacccgggagcagtggcgggtgacagccagcacctcgtcatcagtcagcagcctctgggccaggtcctgaatgaggggccgccggctctcccaggcctgaacctgctcatccacattaggcagctggctggagggactcccagacctggcagacagcagggcccggcccctctcctggtctgcagggcaggaaccatcaggggaggggagaggggcttccctcagcagggctgggccccagaattggccagctgagagcccaggtacctggggcagaatcctagcctagcctatatgctccccaccatggtagcccacagcaacctgcccaccaatgcagcacaaaccccagccctcagccccaacatggacccctataccagtctgtttcttaatggggtcttagcccagtgcccccagggccccctgaacatgcactgtcatagtagtctgttgcccagtggaggcccagcacaggctccctcatcacccccaaatatatctttgggagtcccaacacaagctcctaaaatgcatcccaatatctgtctgccaccctatctttcctagtcagcttagtccaattcttttagctgcccccaatacataccattctagctgcctgatcccccatgcttgaccctgactgaatttagtccagagccactcagctggcccccagtatgcaccctcatctgccgctctactgtaaactaggccttggtaaagggatgcatgaattaccacgtctcagtctccaggtgacaaacttctgtaccgggcccacgccccctgctatgaagaagaaagaggctcagctgcaggccttggcccccagtctgaaaatggggttcaggagggctcaggacaagctggaatggagaattcagactggaagtaggtgggatagggaggcaagaggcctggccctgaggggcttgaaggcaatgctcaggctatggacttccttcataggcaatggggagtcaggacggttttggatcaaaacagggtgcagtctgagcactgcttatgcaaattcacttggaagcaaatgtatggagggaagaacctcagggacagagcttggagaagtacctaccttcaggggacagagggaaaaagaggagccttggaaggagatagaggagtggccagagaggtgggaggagaaccagcagagggcagggacttgggaactgtgggaagagagatgcactgacggagaggggccaggcagccgtaattggaagggattgtctctcccatggtacaatcaccttgagaccccagaacatcccaccccagggcaaagcagggtccagctcctcatcctctggttgttttgttgatccgacatccacccccctcttctgaaaacagcaccctgattttcccctggggacccaccccactctgttcttagcccgtgtactccagggtgggtacatgacccaggctggccaacaaaagcactttccctcccacatcacagcgatttattctgcatggcacaggatctcagctgggccagggagagcctaccctgggacttcagctggaactatttaaggagaagcactttcccctggggttgctatgcaatagaggtcatcttacccccaggtgggcaaagccccacaatagcgaagtcaactcatgggagagatggagggggacagatgtctgatgatgttgctcagatgtttagacccagcttaaatcagcagctgagccaagacgtgctttatttttcttttactttttttttttctttagagacagggtcttgctatgttgcccaggctggtcttaaactcctgggctcaagtgatcttgctgcttcagcttccagagtagttgggattggccaggtgtggtagatcacgctgtaatcctagcactttgggagactaaggcgggtagatagcttcagtccaggaatttgagactagcctgggcaacagggtgaaacccccatctctacaaaaagatgcaaaaaaattagctgagcatggtgatgcacacgtgtcatgccagcactttgggaggctgaggtgggaggatcgcttgagcgtgggaggcgcaggtcgcagtgagctgagatggtgccattacactctcgcctgggcaacaagagcaaaactccatctcaaaaaaaaaaaagaaagaaaaagaaagaaaggaaagaaaggaaggaaggaaggaaagaaagaaagaaagaaagaaagaaagaaagaaagaaagaaagaaagaaagaaaagaaagaaagaaagaaagaaaagaaagaaagaaaaagaaataggtattattacccccattttactcatgaggaaactgaggctctcaggggttgagtagggactcagctggtaagacgcggtgtgggatctcaactcagaactgctgaatgccgaagctagtggacttcactttgccttcctgtttgatcagcccactacttacctttctctatgtccaggcgagggtaagttttggccaggctcccgctgtccagtgtccaggcctctctgcgcccgtcccgcgctagcctcccctgccgccctcccttgaagaagaggttcatcagcgtcttggagcgctgcagggcacccttctccccaggggaccccgacttctccttcttccgctgctgcttctcctctgcagacacgagggagcaacgggggagctggaggggtgggcagaagggaaggacgaggggcaggggtgtggggagggacagagagaagggagaggagagggcagacaggatctgcagctacgccggggtgagagtgcggttcctcttccgactttctgacccttttccccaccgcacagctgtggctatgtaaggaatctcccttgaggcccagttagagaagggcacacatgcgtgcgtgtgtttgagcaactgtgtgtgtaaataggcctgggaactccaggatccaggggctggggttagggctggttcggggaacaggggctgagactaagggtgaatgtggggtccaggactaatttaaagtggagcccacagcagggtctgagcagcctggagcttgggttgggcaagggcttcgtcaaggcctggggcaaagggaggtttgagcccgggacaggatgtgagacaggttttggaccagaggctgtggagggagcagccgccacccatcccccacgtaccccacaaggtcagatagctctgggagcgcgtgatggggggccggggtcggctgagggccagcagcaaagccgtcttgggagactcagagagcgcagagtcaaggcggcggccgggatgggggccgtccgagcggatggcggtgtccctgaggatgactgtgggccgcacgctgcaccaggtctccacccggcctcccgcatcgggctccgtctgcatggctgtgtccgcccgcccccagcctgggccgcggctgccgggctcctcctgcccgaggcagatgtccatgcggtccgacggcagggagcccgagctgtagggggcgctggaggcgcacgaagagacgctggagctgctctcagaggccggggacagctgctgcagcaccccgttgctcactgcagggagtagagaagccagggatcagcgggcttgcttcagagccctgcccggcttgcagaccacccttgggcttaggggtggaggaggcaaggtcaggcagcagccagggttagaaccgcagtggtgaggaacccgctgctccgaaatgctgccactgacctaaggcatgtcacttctcaaatcacccactgggactccagaccctaggagagcctgcattttatccgcagattctcagaggggagcccagaaatagctctggactgtgtgaagggtcttggttcctgtgcttttctgcttccccttctgcttctgcttctgcctcctcctcctcctcctcctcctcctcctcctcctcctcctcctcttcttcttcttcttcttcctcctcttcttctttcttcttcttcttttttttttctttgagacagtctcattctatggccctgactggagtgcagtgatgtgatctcggttcactgcaacctctacttcctgagttcaagcgattcttgtgcctcagcttcccaagtagctggtatgacaggtgcccaccaccacacccagctaatttttgtatttttagtagagacggggtttcatcatgttggccaggctggtctcgagcacctgacctcaggtgatccacccacctcagcctcccaaagttttgggattataggcataagccaccgcgccaggcttttttttttttttgagacaggctctcactgtgtcacccaggctggagtgcagtggcacaatcacagctccacagctcaccacagcctcaaactcctgggctcaggcaatcttcccacctcagcctcccaagtagcacagaccacaggccctcaccaccactccagttaatttttaaattattattattattattattattttgagatggagtttcactcttattgcccaggctggagtgcaatggcatctctgctcactgcaacctctgcctcctgggttcaagcaattctcctgcctcaggctcccgagtagctgggattacaggcatgggccaccacgcccagctactttgtatttttagtaaagactgggtttctccatgttggtcaggctggtctcgaactcccaacctcaggtgatccgcccacctcagcctcccaaagtgctgggattataggcgtgagccatcgcggccggcttaaattattatttgtagagacgaggtctacctatatggccaagactggtcttgaactcctgtactcaagcgatcctcccacctcagcctcccaaaatgctgggattacaggtgtaagccaccaagcctggcccttttcttcttcagagagccgggccccaccctaaggcctcagccctttccctccaaccttgggagatctgagccacttacgtcggtccagccagcagtactcagaaaccatctccttgtaggcaggataccggccggtctcctggggaggggatggtgggcataggagggaagggggagcagtgaggagggagagtgagaatggggcgggggtgacaggatgggagtaaactttcaacttcatttctgtcctccaaattcatcatgctctggccgcacaggccactttctttctgaacgtgccaagttcctttttgcacttgctgttcactctgcctggaggcagccctgaccctgagatacaggggccttcctgaattactccattccatctctctgttaatttccttagagcatttgtcactatctgcaagcatctagtttattggtctgtctccctccagtagcagagaacttatctgtcctgttcactgttgcagccccagtacctggcacagtggccggcacatagtgggtgctcaaaaatattgttgaatgaatgaggggcagagtgggagtgaggaaagatgtttgggataatctgagaggaaggaaaaggaaaaatgggatgggggagaggtagaaattggcgggggaaggcggcagaggaggcacccagtgaagccttcaccccaagtgaaggcttagggaagcagaaaggtagagcaggggccagggctgggcaccaggggagagtgaggtggcatcctccaggagccggaatgagaagacctgatcctcagacaagtgtgagacccacatgaataatgaatccagccacctcccgtgaaatccaacctctggccccagcccagccctcctagctgtatgccctggggatgcccatcacccaggtcctgtccaaaccgcagccaccacccctcccttctgggcaagacatttgttcctttcaaccctaggcctccacccttcataagaagggggcaccactctagcactgtggggagcaggactggaaccaagcccagccactgaccagctgagtaagtgacctgttcgtgagttgctgtgcctctctaaacctgtttcttcttcttcaaaacagggatgagaacaatgcctgtctaccttctagtggctgtgggaacgtcataaattgcagagcattattaagaactagggtggtctgggaagcccctactctagcctcacctctccctacccccactgttctgcccaccttgatggtcagcatgatgtgcgtttggcccttcagcacctccacggcctggctgtggctgatgtcgtcaaacctgacaccgttggctgccaggacctggtcccccaccttgatgccattctcctcggccagcccaccatggtccactctgaggccagacaggcgtcagtctgataggcccctggcctgccctccgttaccccactccagacccccttctcttggacacaagactgcaccagtcaaggtccttgaccctcctactggggcctcccgccccctcccaggccctcactgagacaggtggttggccaggcctcacttgctgaccatccccacatcccagcctaggccccactccagaccccattctcagttctacccgaagacacttcctgcctcagccctcacttggacacatagatgcccaggccaaactccttgcccccacggatgttgaagcccaggcagaagtcgtcggaggttgtgtataggtggacgatgcgccggacaccatcttctgagctggtgtcggagggtgttgaaccgcacttctccactaccaggcgccgattcaccacatccaccctggacaacagcagggggccctcaggtggggtcctccatccactgccacccaccaccctcccagcagttctgacaactgcagggaaagtgggggttgcctttgggggactccccaggcctgagacctgcagtggggcataggttcattagctgggaaaccagcctaattgcctctttttattgagcagctgcaatgtgccaggaccattccttttttttttttttttgagacagggtcttgctctgtccacccatgctggagtgcagtggtgtgatcatggctcactgcagcctcaacctcctgggctcaagcagtccttccacctcagcctcttgaatggctgggactacaggtacatgcccaccatgcccagtttttttgtttttgttttgttttgttttttgagatggagtttcactcctgctgcccaggctagagtgcaatggtatgatctcggctcactgcaacttccgcctcccaggttcaagtgattctcctgcctcaacctctcaagtagctgggattacaggcatgctccaccacgctcggttaattttttatttttagtacagacggggtttctccatgttggtcaggctggtcttgaactcccaacctcaggtgatccacctgcctcagcctcccaaagtgctgggattacaggcttgagccaccatgcccggctttttttttttttttttttttttttttagagaaggggtcttgctatgttgcccaggctaggccccatttctaatccttacagcacccctgtagagaggtggtgttttgcctctgggtttcacagcaggagcagcggcaatgtggcagcagaaccactgggatctgggagagcagagctattggaggagggcaggggaaagatgcagcctctccttattttgaggtcaggcctttggatcccctgcgtttcctgagccagcgagcaggaggaacagaagcctctcctgccagtgggttttgggtgttggtagggttggggtgggctggggcaaggccagggctaggatgagggagttgctgctcaccacgtggtcttctccttggagaacttgatgcccggcacacggcccatgcgccgaaccatcatgtgcaggcggctgctgctggtcagcacctttacggcgctacccatggtggtgctctccaggctcagcccattcacctccgtgatcttgtcccccacgcacaggccagcccgctctgcaccacaggatgggagtggctggcatgggtccccagggtggggctgagcctcccccatcagatggagctccctggggtcaaactgagcttctcaatcagagtgaggattgtcagagcaggggctgagtgttcccagtgcctagggatctgtcccttaaaccattctgacttgagggttggccctgtctccccatcaatcaggccctccagagctggggactcttccgtctgtccctgacagcagcatcccctgccattcactgagattggagtcacatcctaagcgtggacttcagcctgggggttctgcttacctgcactgctgccttcctccactttgctgacgaagatgcccaggccatgctctgagcccccgcgcacgctgaagcccagcctccctgctggactcttctccacccggactgaatggatgatgtcactttcatcactgttggctgtgaggacagggatttagggatgcccccatgttcattgtgggcacagagggcccctgggttccccaacttggggcctgcaaaggctaggttgctgggcacagtcacacaggcacgtaggggcctaaatgcagtggggcaggtcagcccatttctaaggcccctctgggtgatttttatgttattttttaaagaaacagggtcttgctctgtcatccaggctggagtgcagtggtgtgatcatggctcactgcagccacaaactcctgggctcaagtaaccctcctgcctcagccttccaagtagctaggactacaggcacacaccactgtgcctggattaattttaaattttttgtagaggcagggtctcactttgttgcccagactggcccaaatccctggcctcaagcaattctcccaccttggccttccaaagtgttgggattataggtatgagccgcatatcctgcccgctctgagtgattttgagaccatgggccaggaaggtgtgaaagaaggtgagatcagcgggacaggactctatgctaaagacaccattctctagccaggtgtagtggtgtatgcctgtggtcccagctacacggaaggctgaggcaggagcccaggaggtcgaggctgcagtgacctgtgttcacaccactgcactccagcctgggtgacagagtgagacccctgtctcaaaaaaaaaaaaaaagaaagaaagaaaaagaaaaaaaaagatactgttctccttccttcctaatatgtgtgtgtgtgtgtgtgtgtgtgtgtgtatcagtgctttctgagcttcacatgcccatgggcctggggtaagccaaattaataaacaattctgatactcccagggtcagatggacagacaagaaggttcaggattctgttctatgggggatggttgagggtgtctggcttcatcagcttgcagcataaattagtatattagctctatcttcaaatgcttgtagagctaccctgtggaaggcattagatgttttcatctgtgtaaacagaacctgcctgcagtactcttgctcacacagtggaattagacagaggcagattttgtaaggaaaaactttctaaaacattctgctgttggaaatagaatgggttttctttcttttttttcccccgagacaaagtcttgctctgtcgctgaggctagagtgcagtgatgcaatctcggttcactgcaacttcggcctcccaggtttaagtgattctcctgcctcagcctcccaagtagctgggattacaggcgtgtgccaccacacccggctaatttttgtatttttagtagagatggagtttcaccatattggccaggctggtcttgaactcctgacctcgtgatccacctgccttggcctcccaaagcattgggattacaggagtgagccaccaccccagccttgaaatggaagggattttatttatttatttatttatttatttatttatttatttatctgagacagagtctcgctctgtcgcccaggctggactgcagtggtgcgatctcagctcactgcaagctccacctcccaggttcacgctattctcctgcctcagcctcccgagtagctgggactacaggcgcccaccaccacgcccggctaattttttgtatttttagtagagacggggtttcaccgtgttggccaggattgttttgatctcctgacctcgtgatctgcccgccttggcctcctaaagtgctgagattacaggcgtgagccaccacacccggccaatggaagagattttctaagacagatagtaagcctcccatctttggaggcatgcaagctgggacccagcaaatctctgtctgggatgttatggaatccctgagggtcctcccatctgttagactctgtgattctggaagtcagagttctaggaactacctggctacaaagggaaagaaaccccagaccacaccacactgcaatacgtatgtgcccaaggcggccctctccatcacgctggggaaagtaggcggggaagggggttcctaaaggttgaacctgtcggggaagaattttttttttttttgagacggaatctcgcttcttctcccaggctggagtgcaatggctcaatcttggctcactgcaacctccacctcctgggttcaagcgattctcctgcctcagcctccctagtagctgggattactggcatgtgccaccatgccgggcaaatttttgtacttttagtagagacagggtttcaccatgttggccaggctggtctcgaactcctaacctcaagtgatccacctgcctcggcctcccaaaatgctgggattacaggtgtgagccaccttgcccaggccaggtaaggtttctgtaaggactctgatgggtgggattttgatgggtggggggtaagggggggcactgatgagggggaaagagccagggaggctcagctgtgggcccttgaggaggccttccagttacagaaaagcaagaaggctggaggggtaagttgggtcccaggtgagaagctgagatttcttcataggtaagggttactctagaggtgtttgacagggagaaatcacacacacacacacacacacacacacacacacacacacacacacacacttcaatttgatctaagagaagtcaggttacagggcacggccagggcagctcagaaagaaatccccgagggcagcctggggggaggggtggtgcaggacagatgtggggggccagggctttcccagctgattagattacacagatctcaggacactttcagccttagccaaggagccttttactcccttgctaccaaccctctctcctcagggcctcactggggcctccctagggccctaggtcagggaatgtgaaatctgagattttccaggagcctgagccctgcaaggatggaatcttctctacctccactgccccagcctctcccccaggtgctccactgcagccccggcactatccttgcttccactcttgccgcctttagctattctctatacagtacccagagtcagcttttacattagctcatgtcttttccctgattaaaaacttcaacacctgttcctgcttctagaactccagtctcctcaccatgccctataaggccctgcctgggctttcctctgcccacccctccgccctcccctccaccctcccctccctcactgagctctggccacactgatcttcctgttcctcatggaggccaagcccttccagtgttccctctgcctgcagtgctcctgcccaggcctttagaaggtcagctcctcttcctcgttcccctcctggctcagacaccactttcttggagaaggcttcctggagtgtcctcccttcctcccagtgagtacctcttgtagggcttctcaaagcgtaatcctggatcagcagcgtcagtgtcatctgagaacttgctaaaaacgggaattccttcgctttaccacagacccactggaccagaagctctgggactgagccctgcaatctatccctgaatgagccttcccggcaattctgaggcatctgaggtttgagaagcaccattctatcatgtcatcagatgatcacattctgactcttcccatcctttgtcgtcgttcgcttatttgtgatttatctgtctcttttcactagaccataagttcaatcatggtggggacttcgtaatactcttctagtatatctccaatatgttggacagtgcttggtatttgataggtattttttttgaataagtgaaagaataaatggatggatggatggtcaaactaggagagtgaggagaaatgcattaagggtaatgctttcctggattaaaggtaatgcattttctctgggaccagttgaatttaaggagctggtgggatctcatggggccgatgtaggtggcaatgtcaccgtttattccttatcagttactttactccccgggagtgatctaaataataacatggggcagggttccaggctgcggtgacttgggagatacctgttctcaggcagaggggagaattctgagctcagagggtcccagtccagtcagaggagaagccaagtggtcagagcaactcctcagtccctcactgctaggagatgctgcttccttggctgcacagtggcgctagcatgaggcagagggagaaagcaatcatgaaacccctggaagaggatctttagagggacagtataggccaggcatggtggctcatgcctataatcccagcactttgggaggctgaggccggaagatcacttgagcctaggagttcaagaccagcctgggcaacatggtgaaactctgtctctacaaaaaataaaataaaataaaattagctgggcttggtgttgcatgcctatagttctggctactcaggaggctgaggctggaggatcacttgagcccagaagtttgaggctgcagtgagctatgatcacaccactgcacttcagcttgggtgagcgacagagcaagaccctttccctcttaaaaaaaaaaaaaaagacgttataaacagcgcttgcatcatacatgggcaaagggaaggggagagagagagaaacagaaagagtgtatcagagggagtatagcatagttcttttaatagaatgggactaataaagacagttatgcggtgcctgcttcccttttccccaatgtctcctaactcctctggggacttctgctccctcaccagaatgaccgtggtgaccctcagcagtgccctgtgctcaccagagggtgaagcatagactggtgtatgacaggggtgagcgtgccagggcactggtggaggaaagcctgctccctgagcaacatgccccaccctgctccagtggcctagggaggggaagagagatgccctgctgggtcagagggggaggagcagggcctgaacagtccagtctgggatccagccaggggagctctgctggctaagaaagaggagaggagctggagatatttatctggtcctgctcacagaaagctcagactcagggggcctggctccgcacctggcattctaggtcctgtcttgctcatcagctgttagtcacctcacatctgtcactacagccaggctggctcctaagtgcccacctaccatgctccatgcttttcacttccagcctttgttggtgacagctcacccctgccaccagctgttcttattgctctgtcctgctacactgtagattcctggaaggtgaagagggagcctgatttctctctaggtcccttgtaacacctccccagggctggtatagaattgtgctccatgaagcggcattaagcaactacataagcttaggtctccccttccctgatggagctccctctccaccctcaaccctcctcttctgaacatttgctgtgctgccttcattcccctccttcagcacggaagccctgaattctgtctacccgcttgggcactgactcctcgcagcccagcacagagcttgtcacacaatggactggttgatggaggatgtccttctttatcctgccccatcccccagaagtacacacaatggatctggagaagggcagagcccatgggagagaggccagttcaatcccctgccttgtccaccaggggctagcataccacacgcatgcctgtccctgctgccatggccttctttccctcctctgacccttctacgaccctggacccctgcaggattggcctggaggagaggccaagggcaggtgaggaagagtgtatgggttcccaggcggcctgccacctccctgtgactcccatctcttgaattcccccaatcatactggctctgcctcctcctgctgagttcccattgtcccctacccccaccctccccaacccaggccagtggctgggtcccgcccctaccttcgatgggggagttgatgaggatgacgcgtcccatgggcgatgaggctcggattccgcgggggggcccgttcagcagccgttgttgcttccttagcaggtatcgcgttgcggtggagcctgagtcgctgcctaggtggcctcgggaggagagggagctcagagagccggagctcaggtctcctaggcccagtgggtcgaagcccactgcgaaaccctgcgccatggcggctgggctagggcggcaccctacaggtccagaaggaatctgctagctctggagaggccagccctgcgtgcttcgagctccatgagcctctgtgcggggctggggtctcagtaacgtgaaggccctcgcttgcgatgcctctcagaagtgtgagctccaggcctgggcagggagagcagggatgagggaggggtgtaaatgtttcccctgctgccccctaaaacttccacccctccccctggtttaagcatcctgccctcccatgccttaggcccccctcctgtctcaccctaggccagagaactgccccgtccaggcaccatcttggactctcgctgactttatacaaggcaggtgggaacctttcacccctcattcctgctcggggctgagtcatctactcccgtccccagtcctcagtagaggttgagagtggagttgggattactgcgggccctggggcttagagaggtgtgagacaaaagagaggtcaggacagctcatggcatcacctctctcatgcatatgcgggcatggaggtggcccggggtggggcgggggctgcgtggggcgggctgggcctcgaggatagggcttcaggaccttagacagctgaggcccaggaagacccccagacacccgcgggctccaggctgcggctccgggtctaaagaggctgcatgaacctctcccaagctttggggaggatctgctggagaggggtcccacgacatcccgcgcaaaacccagggccagttccctcagagaagctctgggacctagaatgaagcaccccaacatcaactcggccctccaggccccccacccctttgtgcctggtcggcctcacctggtcgctggtgtggcgccgccagccttgtcaaaccacccgcaggcgagagctactgccgcagccggcaaaccccacccacgctgcgcggaggctgcgggaattgggctggcctgcaccgccccgggctcccattggctggtagggccgccagtcattctattccggcacctcccttaggcgccagggacagccgagcgttacctggtcccgggcagcggagttctttacccaccccagttctggttctgacgccctagctcattccgcaaatttagggcttgggtctggcttgttcccctccggctcgaaccacctcttctctgagccgagccagctaccggggctcctggaattgccacccctccctgggcacccttgaggcctccgtggagggacgtcacggggcagagcgggacgtgagcctgagtttgctgcaggcgtgctctgtgtggtggctgggtgagttgtgagtatgtgcgtggcggagggggtgccttcttcacttgcatcctcctcctctgtcagaaggcgtctctggctacccagttctggaatggtcgcagggtggggcagctggtcccaggaccggaagaatcctaagaatccttctgatgcacttgctcggatgcagaccgcgaggttcctggggtcgtctgcccctccacatctcaggggtggggctacggtctggggtgcagggctaggggttgggagcgtaaggagaccagggacacagtggagctaggggttacagagggggagcagggagagggctggggacatagaagaggcacaggcacgacaggaacggggctgtgaagtgatgcgaatgccgcgctgctacaagaggagcttgtggatactggggtaggagcccagggggacaagcaagccaaaggccattgccaaggcagccatcaagtaaacaagccaggcggtaacccgagtccctcccggcgcgccagcagaggaccgcccctccacaccgcccacctgcgcccggggctttctctctgggcacctagaccgcttgctgcagggctgggggtctgctgaggcccgccaggggactgtaaaccaagggagcagcgcccgcggctccagcccctcctccctttggctggggagggggccagaactgatccccgaggtgggattggctctgggaagcagcttagggcctggtccaggtggcccaggctgggggcatcgcctcgaatgacacccaccgccctcaggttctgccaatccccgtgcccaccgggtgggcgcggccgggaagctcctgcccctccctgctggtcggcgtcacgcgtgacgtcccgcgtgatggctgggagggcccggcggcgacagcggaggcagagaggaaggcggttctgagagcttcagagagcgatggaaagcgtaagtgctcgctctccccggcgggcggggttctggaatgggggtcagagaaggaggcctgccttgaaactgtctgtcctggtgcagtcaatgtcctcggctctgtggaggtccaagtccacagggcacaagggaggttggggggaggaatgtcagggtggggctgtgtgtagtcacacattcaagtgtctgcagatgggcacagtgtgcgcctgtaaaggtgtttgaaggccggtgtatacaggacacctccactctgtctgtatgtctgggcagggtgtgcatgatagtgtctttgtgtgtgggtatgtgagtgtgaggggagggcgtctctgcctctgcgggaggaagtgtggctggagaggattagtcattctgtaggattctgcccaactcagccagatggctgcaccaggctttcctctctgtgctgggtggagggagcagccactgaatcctgctcttatccggaggcaagtggcccagagagaggtggatgagtgtctgtgccagccctgcctggccagggaccagggagagcctggggtcattcagtgtgagttggagaaaaatgggtctgtagagaggacttgtgcgtgcccacatgcacacacatggctgacatcagagtcccctgattgagatctggaacagataagccctgggtggccagtaaggccttgctctcctccaatcagggactggagtgtgggatgtcttgtgccattttccaaaacagccttgggggtttgtatccaggtctcagtgcagctggggcctaaagctcacctgagcatgggtgtgtaatatatatattatatattcttgtgcatctgtagcacacgtggctgggatgtttgttgctgcttatgtgtcaaccacatatatgtaaatcctcactcatgaaaatctgtaccaggatagagcacaaggagatctgttttcctgtttctggtcttcccttccccctcctccagtggctgcaggtccctgggctgggacattgcccaggaaacagctcctccccacacccttgcttacctacctagttgaaggggtggcctgcccctccacacctgtgggtatttctagtagggtgggacaagagactgagaaaagaaataagacacagagacaaagtatagagaaacaacagtgggcccaggggaccggcgttcagcataccaaggatctgcaccggcaccggtctctgagttccctcagtttttattgattattattttcattatttcagcaaaaaggaatgtagtagtagagcaggttgataataaggagaaggtcagcaaaaaacatgtgagcaaaagaatctatgtcataattaggttcaagggaaggtactatgcctagatgtgcatgtaagccagatttatgtttctctccacccaaacatctcagcggagtaaagaataacaaggcagcattactgcaaacatatctcacctcccaccatagggcggtttttctcctatctcagaattgaacaaatgtgcaatcgcgttttatatggagacattcagttcccaggggcaagcaggagacagtggccttcctctatctcaactgcaagaggctttcctcttttactaatccacctcagcacagaccctttatgggtgtcaagctgggggacggtcaggtctttctcatcccacgaggccatatttcagactatgcatgggaagaaaccttggacgataccccgctttcaagggcagaagtccctgtggctttccgcagttaattgtgcccctggtttattgagactagagaatggcaatgacttttaccaagtatactgcttgtaaacattttgttaacaaggcacgtcctgcacatccctagatcccttaaaccttgattttatacaacacatgtttttgtgagctccagattgggtcaaagtgctggggcaaagtggctggggcaaagctacaaattaacaacatctcagcaaagcaattgtttaaagtacaggtctttttcaaaatggagtctcttatgtctttcctttctacatagacacagtaacagtctgatctctctttcttttccctacatctagtcaccttgagctcttgaagggactgatgataagctcaggggccagggcaggggcaccaaagatttcccctagctggagcccttggacccttggactcccgctctgacccttatctctgtcctgcagaaaatgggtgaattgcctttagacatcaacatccaggaacctcgctgggaccaaagtactttcctgggcagagcccggcactttttcactgttactgatcctcgaaatctgctgctgtccggggcacagctggaagcttctcggaacatcgtgcagaactacaggtgaccacccctcaatctgaccctgtgtgccaggatctcattttctgtgattaatataatatgttttgtacctgcctcctcaagcttgacagtgaccctgtccctcaatcccctcactctctagccccgtctgttggcatcacagagctttaacccaaaggattttagggcatttgggttgagaagatggcattgatatttatgggaggggctgctctatgcatcacaaacctctacagggatctatcccattgcggggtcaccctctgcaaggatagaggtgctcaaagtggagtcccaggaagataggagggaaatccccttatctttgggaggaaaaactcttgcaatgcttgcagccatttttgacccactggaaaccaccatcatccctgacccagcattttggcagaaacagaagggtacccctctttgtgtggctataagggaaatagaaataggagcctccacttctgggaaactttggccctctcccaaagataaggagcttccttatgctgagactgggggctgaagttcctggttctctgtccagagttaccctgagctgggcaggtggggcctgtgagggcagatctgccccctggcatagcctgtctgctccttgccaacttctgcagggccggcgtggtgaccccagggatcaccgaggaccagctgtggagggccaagtatgtgtatgactccgccttccatccggacacaggggagaaggtggtcctgattggccgcatgtcagcccaggtgcccatgaacatgaccatcactggctgcatgctcacattctacaggcaggtcttgtcccacgtccccttcttcagtgccctaagctagagcatagcttgactaggtgcgcttcttgtctgggccaactgggtgagtgaaagattgtgtcagaatcgcttccattcctcagaattcagcctcaggaggtctctcaccccagagacagtaggtgtgtttgtataaatgggggtgggggtacataggggttaccagaacaggttctagggccattaactgggtcccttcttaggcttggggaataacctttggtttcattacaggggtctaaagatgagggccactgtagacggggcagaagtgagtgtctttgttccctcaggaagaccccaaccgtggtgttctggcagtgggtgaatcagtccttcaatgccattgttaactactccaaccgcagtggtgacactcccatcactgtgaggtgagagccagcccccagcagcagctgcactgtcccatctgaccctctcctcccagcctgcagtgccctctcctttctctccggttccctgtggaccatgcagccagtgctcagcgccctctcctcagcctgccccaccccgaattaccctgcctaactgaaggcatgaggtcctcttatgtatgctgtgggggacccacccctcttcacagggtgctactggggcttctagacaagtttacgccggagatggagggaaggcttcttctgcaaggagcttccccttttatgcctcatgtattgaggacttggcatatccctaaaggaaagggccacctgctggacttgtcacctctccccgtgacctggcttttccacccacaggcagctggggacagcctatgtgagtgccaccactggagctgtggccacggccctgggactcaaatccctcaccaaggtaaaggcccctcactcccctgaccaccccattcatcctctatctgcctccttcttcctcatcacacctccagttctgacctatatgccccctatatctccccagagtccctcaccaccccatggcccttagggccactgaacaacacccttcctccccagcacctgccccccttggtcggcagatttgtgccctttgcagcagtggcagctgccaactgcatcaacatccccctgatgaggcagaggtgagtgaccccggctcctggcatgtgcatgcccagaatgtagcacactgtccatccacgcagaccacctcagaatggggacatccctctccctccccagacatgagctgctgggccctggctcagtctgaccctgggatcctcaggtgggagaaccagcctttgagcctggggtgtgtgaggggaccctgaggagccgctgctcattcgggcattgcaggtgggatccggggcctgtgatctgaccccaacccccctcccttgcagagagctgcaggtgggcatcccggtggctgatgaggcaggtcagaggcttggctactcggtgactgcagccaagcagggaatcttccaggtggtgatttcaagaatctgcatggcgattcctgccatgggtaaggcgggagtggctgggtggggcataggagactctgagagaagcaggtgcagttctcagggactttggaggactctggggagagagggaggagctttgaggggggtcacccttcacagttcctgactttaactccactactaatgttctccttcttggccctgctctccccacagccatcccaccactgatcatggacactctggagaagaaagacttcctgaaggtaggcgactgtacctctcttgtcctggaatgggcgatggctgggagaagtgaccaggccccaactctctctccagcctcgcctgattctctaagacttgccagcccttctcctgacccctgcaccgcctcctccaccttcgttcattcagcaagaatgaactgggctggggtgaaggaactctgcaggggcaggaggagaggacaaaggaaggaaaccaacttcatcagtgttactccagtggcttctgacacacagaaggggactgtcatagtcatgcttgatctcatgctcattcttttaccccctagtgcctccatactgagaggtacacacgggtgaacacgcacacacagacatgaacaggacacgaaagcaaagcacaggaacaagctctggctcattcacagaatcatttattcacaaatgtattgagtgccatgcaccaggcatgttttagggctgaggagatggcactgaacacaatggttatggcccctgtcctcatgaagtttatagtctgatgcagaaaccaataaacaaggaggcacccaataaatacattcttagaaagtgtaatatgtgctttgtaggaaagcaatgggggtagtgtaattgagattcatgggggagagctgtttagataggatgatcagagaaggggtctttaatgccgcaaaggatgaggagagagccaaataacgcagagaagagtgtttggggtacagaaaacagtcagtgcaagggcactgcagtaggaggggcttgcacatttgaggaacaggttggtggtccctgtggccagagcaaattgagaagagtgccgaggaagagatgtgcttggaaagggtcagattcatgccactgggatgggaagaggtaagtggaggttcacaggaggtttcctgaagaaatcagctcctggaggaagtgagggaagaaaaaaaagggccagggagtgccatggcaaccaattctgagaggtgagaggtcatgggatgccggggagggtgatcagcagacaggcctggctggagtggaagggcgtgatctggaggtcccagccctgtcattgccttgggagaaagaaaacggccacaggtctaagggctccaaggcaaggctgatgggatagagctatggtgggtgaaatggggtgacagtgaggcaggggacacaagccgttccattgtctttctgtctctccacagcgccgcccctggctgggggcacccctgcaggtgggactggtgggcttctggtaagtgtgcaaggagttagctggggtgtgtgggagtgccttgtccatggtggatgtgggtgggtatggattgtctttaagatgtttatagacatcatccattcatacattcagtgggtgtgtgtttggaacaactatagggtctactttgtgtgttacggggtggtccctgtccttgaaggtcaagatcctagtgagggggttccagtcttcatctataagaggaaaccatggaaatgtaccttttggtgccatccaggagattcatgcccatttaattcctgattctgccacttactggttgtggggctctctttcctcagaacctgatgtccaggttgggtttactattcctaaaaggtcctttcagcttttatcaatctccacccctagggcctatctccaaggatggggtggggtgcagggagggaacaccctaaggccaaagctttacaaacctttccaacacttgtctcccccagcctggtatttgcaacccccctgtgctgtgccctattcccccagaagaggtaagtgctgtccctgggctgggtgggggactctggattggactctgcatctctggaccagctgacctagggtcttccagggtgttcaggaggaggcctggcaggcactccactgattctgggagtgggggaatgacagtgagccagtccttctggcagtagaaggagaggatttttcagcctgggaggaggtgggatggcaatccctgggcctgagtggggttggattcaggggacgttaactggcctgtgctgttctattgcagctccatacacataagcaacctggaaccagagctgagagctcagatccatgagcaaaaccccagcgttgaagtggtctactacaacaaggggctttgaggagggtcagcctctgtcccctccctcacttccttgggctgctgctttagtggagtcatgtcacccctaccacttggctatctgcctagcactgggcaggggccttggtgggcagatggcaattgagggtagcaacctattagggtgggggagggacctccataaggcttttcctcccttctctggtttcaaagatcagagcacataacccctcctgtgcttgagtgtccatgcatatacatacatgatacacatgtgtatgtgtacattgggtcctgaaagctagaagcaggcatgctagcctagtatgttctgacatctggcttcccttctcagcctcatgtccacctgcctgccagccaggctacaggtgtgacttccttctctaaactgttacaccagccaagttatttttgatggcacctcatcccttctagaaataggaggagccccaggatctcaggacagagacttatagacactagtaggacaaagcgggctgaatccttcaggtttctgatacctagctccccaagctgactgggctggcagaggagaacatgttgagacaagggaggcaggggacttatgcatccctcagtgccatcccttgtatcctggaatagctccatttcccctcctcctctctaccagacaaaggagtgcctgtgtcctgtactgccctcgctgtctcccccaccaccctacttgacagcgtgggcatcttcaggcacagccttgggagttcctggtgtgctctgacatcatgacctcaaatctaaatcctccaatcccaactccctttcccaaacaaaaagccacagaggcagagcaagcattcccctttaagagcttccactgcaccccctcccaagggacacagcggtaggaatggtgcttaaactccacaggtatcagagagggtgtaactaggacatcctcaagggcagctaggccccgaatgtacaatgttaagacagggaattttgtgttccattgacttttttttttttttttaatggagtttcactattttgcccaggctggagtgcgatggtgcgatcttggctcactgcaacctctgcctcctgggttcaagtgattctcttgcctcagtctcccgagtagtggaaattacaggtgtgtgctaccacatcttgctagttttgtatttttagcagagatgggggtttcaccatgttggccaggctagtctcgaactcctgacctcaggtgatccacctgccttggcctcccaaagcactgggattacaagcatgagccactgtgcccagcctgttccactgacatttcttagacattcagcaaaacccccaccttaacctcttttctttcttgagggttggtcctgtccccacctccaccctcccaccccctggaagaggaagggcccgggcatcagtggctagtccaaataaaatatgggcttggggatggaatgggtggtggtaagttcacagagtgtagttagatcccaactcccatgacctctggcttcagtggtgggtggggcagggcagatgaaagggcttcagtgggaacctctgagagcattttcctgttccccctatcaaccgcccccagtgataacatctgtgaagccagccattactcaataaactgcaaacttgtctacttcttggtcttcacttgattccacgtcctgagggcccagaaagagtcccctgcttgcagccttccgtctctccctggactctccccaagtccaggtcttgtctcattcctccccctgtgtagggagcctcatgccccagcagagggagctctgagattagaaaatcagtcctccctctggcacccccaagtatgtactaagacagagggcgaatgtagatgctttcacctttttttttttccttttcttttctttctttctgttttttttttttttttttttttttgcgacagggtttcactctatcacccaggctggagtgcagtggcaccatcatggatcacagctcactgcagcctcaacctcaccagttcaattgatccgcctgcctcagcctaccaagtagctgagactacaggcacgtgccaccacacccagctaatcttctgtatttttttatagagatggtttttgccaagttgcccaggctggtctccaattcctgggctcaagccatccacctgccttggcctcccaaagtgctgggattacaggcgtgagccaccgtgcccggcctagataaccagttttaatttcatcctgtcctgtcaatcaccaagcccactggaatccttagtcaactcttaaagctctttctgcagttacacttttggcctttggcaatccccttgaaaagaggccttgtattgccaaaaactgcaatcacttttgcaccaacctaatacttttactggaaaatctatgtaacataaccccatgtggggagtgaggtacagaaatctctgcaaaacaaaacccttaagaacattttataacagaattatctgtgctccacaggtatcactaaaccatgtcagagaaaagattggccagggcactagtgggcttctctgtcatctttccttcctaattccacaccagtttctcaaacacgtcaaaagagttagctatagggcacatcacaggctctctagggacaaaccttagccaatcataccttccaaactgcctccttatacttggaaatttcctcagaagtcagcatttgggctgacgcagcacgtttttcactagaaagtgctctgccccattcttgggtgggcctcctgtcttcctcccagacctcagactttaggaactttctctggaagcctgaattggtgtctttgaccttccctcccatcttcttccccttgcctggcctcatttgctccagagcccccatcctgcctattatgaagacccgaaagaccacaaccttccctctctccctgcccatgttttaagtttagcctggccatagggaggtggtcaagtagggatattctgctcctttccaggatcaccggaaccaatgacacctgcttcctaaggacaggtaatcaggaccagcttcaactctggcactgtggggctatgccagactctggcctagtcctgctgggtctgatgccctacaggtcagagccaagccccatttcctcccagtgaagcctgtccatttcaagccccgcccccgggccctcgcggtcaaaagtaagccaccaccttctgggaacagtcagaagcagagtcccgcccctgctgtggtccctgtcagtcaaagctaggctcggctccgcctccttcccgtttcccgagcaacggctttagtacctcaggccccgattctcgctcaccttccgggtcggagcctggaagctacgtctcagatccgccttcccgctgacctcgatcctgcgccgttaaatccaccaagtccccctccctcctttccaatatcgaaacccacgaattccctagcgccagccctttgacttcctgcccaaaaatccgcgaggttttcgaggaatcacgcgaggactctcctcctggatcccaagcccaggtttttttttcagctgcctctgaggctgttggctctttcttcggcgccgtcctcctcctttccctctctccacccttgcgcctaacagtccaggaaacgtttgctgaactcttaattgtggctctgtggccggcgctgggtagaaatgggcggttgggtgaacagagaagctaccctctcacctgcagggacaccgcgcgtgcccgaaaggcatgaaggacaaccttttgctaggaattgtggaggaatcttgattcagctgtattatccccaaaaggggagtttcctaagatgctcccttctctcttcttttattatacacatcttttccctcattgggtctctcctaggctccagtgtcagctcaggctgccagacaaaggcagcctccgctccaggccacagcctcccatagcttcctccttcctgtcttctcagaccagcaatgtttgcaactaaataacgacctggagaaggcaggaggaaccttgcatagcttggactacacacacaatcccacatccaacacatccagtaggaaaataaccccatgcctttaataaagaaacgagaagctccttcaggctgaagtgcttgcttatggggcaagagtttgctatgttaacctataaattaaccagctatgttattttccttccgacctctcctcctctatcaccagcaagtcctcatcaattgacaatttttatttcccaaaaggaacactttggtttgggttttgagattattttgttgaaaccaacagaaaataattgtggctagcttcagtaaatagggggagatattggaaggattctgctatagttttcatacccagagatggaggtgaacaataggactggaaaggacaaagccaactttgggggtgtcagcagctggagtttatgggcatggcaatccccttgaaaagaggccttgtattgccaaaaactgcaatcacttttgcaccaacctaacacttttactggaaaatctatgtaacataaccccatctgggaagtgaggtacagaaatctctgcgaaacaaaacccttaagaacattgtataacagaattatccctgcttactccaagtttcaaaaactggagcagcttagatcagttgtgtacccctaggaggtggccaggggtcagggtcaacaggcaaggacattggacattcaggtttacctctgacgttgaggctgtaaccaaagaagggcaattgctgtgaactgggaatcaccctgattggtatttactacaacatgtactactggccctatacagatgtttctttccagtttaaatgaaagccccactgagggcaggcaccatatcttcactttaaaattgtagtaaaaaacacataacatgaaatgtaccatcttagccatttttaagtgtacaataatgttaactatattcacattgttggctgggcatggtggctcacacctgtcatcctagcattttgggaggccaaggcaggaggagcccttaagcccaggagtttgagaccagcctgggcaatatagggagacactgtctcaaaaaaaaatttacatatatatatatatatatatatatatatatatatatatatatatacacacacacatatatatattttcacattgttgtgaaacaggctccagaactttctcttgcaattctgaaactatatacccattaaacaccaattcatatatttacttttaaatgcccacagcatctacaatagtgcctgatccacagtaggtactcaatacttatttgctcaataaataaatgaggaatccaaatgtgccctaattcccacccatatattgatctcaggtaaggtcacaaacacagtggttctcaatctgttttatacctcaacaaacgtaaaaatgtgacaccttcaaaacaaatgatggctcacagctttagtgattttcagcctggaggatggggaaggatgtcctcccagggagtcatatcagaatcttgggggtagcatgccttgaaaaatcccctgaggaagtgacgcttgccccctagttattatagtcagcaagatgaaggaagaactcagctcctccctccctcttctcttgtctcttcaggagtttccaatgcagagaatggggtgttggagagagtgtctcatgtgtaatcagagccactctctccaagtctgttgtttatctgtttccctgcacaagccaatgcctagttcctttggcagttccctgtggggctgacctacccttcacatctgcagcttcttggggctggcaccaagctgctatcgcttaaggcaggctggaagggagacaacttcaccgtactgttgtccagttcctagagagtggtcccacagctgtgttgcttggccttagtgatataggatttcattttcatgaccttctttccaaggcaccaaggcacagtggggtgggatggtgatgctggtcagtgacggtatcaggtaaaacatcaccctgcactctacctggcagcattactttctaaattctcaagtcttctgagtctggttcatcctgctggatttgttcatcactgctaatgatcttttctttctctctctctcttttttttttttttttttttgagatggagtctcactcttgttgcccaggctggagtgcaatggcgcgatcttggctcaccacaacctctgcctcccaggttcaagcgattctcctgcctccgcttcccgagtagctgggattacaggcacatgccaccacgtccggctaatttttatttttagtagagaaggggtttctctgtgttggtcaggctggtctcaaactcccaacctcaggtgatccgcctgccttggcctcccaaagtgctgggattacaggcgtgagccaccatgcccggctgttagctatttcttttgacttaaggtgctgtgaaaaaaattactgaaaaactaagggttctatggatgtagaaagtttgagaacttctgtcctaaataaatgaaggaagaaatgaaggaatacaggccaagcattgtggctcacacttgtaatcccaacactttcagaggccaaggtgggaggatggtttgaacccaggagttcaagaccagcctgggggacatatcaagaccccatctctaaaaaaaaaaaaattttttttaactagctgggtgtgctggcatgtgcctgtaatcgtagttactcaggaggccaaggcaggagaatcacttgaacccaggagttcgaggttacagtgagctatgattatgtcattgcactccagcctggacaagagagtggagcctgtcaaaagaaagaaaaaggaaagaaatagagaaagaaaaagaaagagaaagaaaggagagaaagggagagaaagagaaagaaaagaaaacaaaggaatatcactgggctgcatttgggtgtcagacctgccctctgtaaacccaccaggtactgtgcctttgcaggaaattttcccttgttggtgggaagttctaaccttatttcagcagttcaaggttgtttacaatgtgatcagagggtgttagggaacccatcgggactgggcatggtggtccaggcagggaaggcagagcttcactggccaggccaggccaagccatctcagaaggtcagagacagaggagggaatggaggctgaggaccgaggggcccctctttgtgtctatgctctgtatctcccgccgagcggcaccaggtaggcggagtctctttccccaactcgatccccgaggacctgctccaagctgtgactactggaagctactgtgggtctgctggaagggaaggatgtgctatctctctccgccactggagacctcggggccttcaagcgcctcatccaggagaaggaggggagtgggcaccgctggggctccacgcaggtccacacccctccctctttcctgccggcatcctcaggtgactggcaggcgccgtcccggctcaaagaccgcagagcccgcgggtccccagctcatacattaaatatgtggaggcgttgggactgcgtgccacaaacatgaagacaaatttttaatcccgagcaagaacatgctgggagatggggggcgcaggagaaaaatgaattaggtttttattatgtgttttattatgctgtaattgaacaggattaggtgagaatacaatatatttctgatgcagctggaggcgggagagggcgggagagaagctgacagcaaacgggagacagccaaacccgcagagaagcccggtctccgggaggcagcgggtcccagcggagggccatggagtggcgccagcgcggctgggtgggaccacctcttctttcccagcagtctgggccaggatgggggcgagggtggtggtgactgcattgaaaggacggggttagggacaggtcccactagcttatgctggaggaggggacgggcttgggagttggagggctggggagcttgaaaacccgcctcagaggggaaactgagtcacagagaaggaacgggagcggcagtaaaaagacaggacgctcttgatcactggggtccggaggtcccgaaattctcacttgaccctaacatctctcccctgcacacgtgaggcacaggccttgcaggtcagcaaacatttcggagcacccaatttgtgtctggtcctcgcttattgcaggacgacccgggttatcggacacccccccttcccaccccaatcccacccaactcctgtcaccttagaaaagatccatatctaggcaggcctaactcagcatcctaccccagcactgcgccttcagaaggccccctcaggtaaagggcgcccaggtgagctcccccactccacacacccaaagctggactgtcggggcggacgaacctacctctcacccctggaaccgcctccctcccccggcttccctctccgtccgccccagcccgggcagcttcattaagggcctccgccagctctgcagctcacctgctgcagcgcccctcgcgctccgcaaggtaccggctcctggcggtgatgaagaggcccattaaccacttctacctttagggcggactgggccgcactccccgcctcccaaccaggacattagaaaccgtcaaccaagattaatagttgcccggctccggggcagggagatgagcccagatactgcggcggcggcgctcgcttcgcgcgagccaacccggcacgggctgggcgcaccacctgccgctgctgtcgctccactccgccttcctttcttctcctcctaccactcgcccgcgcacctgaggctctcaggtgagtccagcaatgggattgcgagcgtcagtgttctctgctgcgtcgccgacctgggcgcgctcgaaggcaagtcttggcacttcggggaagaagggctcgccctctccaggagactcctccagctttcctgctgcctcgatttaaggacttccaaccttaaatgatggccgaccatcgcttttttggacaggcttccttggcccccgccctccctcaattcagttctcttattctctctccgtgcgccccgtcatacttttcagcatacctaccgtatttgtgcttttgcctttatttgtgcggcaattattgggcgattatatcattgatgtctggctccctcactggactgtgggttccagggggaagacgccgcagttttgctcaccaggggctccgatgtgcattcagtaattgtgtgttgaatgaatgagtgggcaacaggcttgtccccggtttgtttattggaatatctgcttcctgtgcaagcctcctggctgcttaaacttcctcacagcacctgcactctttctcctgactcctattataattgtaacactgatttccatgatgtcagttcagcgtcttctcccccttgggaccatgagctcctgaggcaggtggagcagagcacacagccgcctccccagtgcctgccagcagggaactaggcacttggactggagccttggggctcttctggccccattcttttgaggactctgtggtctggagaggcagagtgacttgcaggaggtcacatagccagttagaagcaaagccaggatgaaaactttcctcttcgacactgtgatttttctacaaagatcacaccatcagggaccccaaggaagccccttctgacttctgaagttgctgggctttggggagcctgtggggttgtcctaggaatctcttcctttggcgatgatggtgacccagaactcaacctctcctgggaggtaaaggagttcggggcgcaggggtgccctgtactgtgtgtcaacaggggcaaattctttcaattacatctcaactccagtttctcttctttggatgtaaaaccacagaagtcctctttctccaatctcggagagaggtgaactgtctctggtttccctccctccccaccattagaagaaatgtgggccgggctcggtggctcacgcctgtaatcccagaactttgggaggctgaggcgggaggataatctgaggtcaggagttcgagactatcctggccaacatggtgaaaccccgtctctactaaaaatacaaaaattagcagggtgttgtggcaggcacatgcctgcgatcctagttactcgagaggctgaggcaggagaatcgcttgaacccgggaggcggaggttgccgtgagccgagatcgcgccattgcactctagcctgggcaacagagcaagactccgtctcaaaaaaaagaaagaaagaaatttgggaccagaaactgaagaaataaagggaactaaagagaaagtgctaagagagacagtaggggcctgagctcttcctccagctcatcacacccctggtgtcacctctctagaacccacttactctaggggggaggggtggaatgggtttggggatgggggcaagatcgatacatcactgggttttgatgaccgcaggctttcaccttgcagataatggggtgagcggcggtaaactctccccgactgagcgggctcccccggccttaatgagataatcaatacttgttctcggcttaatttccatctaattgctctttaacgacgccggataatgggccgcctcctgtgaggagggagctggctgggaatccgacccgcctcggactcccgcctttcctcccccgggcaggatgccctcgcgcaggtgggaagggggcgcaccgcgttctctgcgtagccggagctcccttcgcccgcccgcctgccccgcgccgccacctgcctgcagcgctctcggcccccaccggggggcgcttcagactttggttgcaggatcctggccaaggctccgtttcaggttcgggccacccccaaccttatgggctgtggaaccgcgcgcctctggacaagcccttttctcttctcacgtcccacctcgatgcactgccctgggagggggccccaagaccttaggtaagttgctgtgtttctgcacctaaggaggactccatttttccccctgtaaggttgctgggctgtttcctgtaaaggaacctggctggtcaccacagaccactcaggcaaggagaggggaacaagaacgaggaagactaggccccggggctcagagagcctcctgattcccattaacctcactcccccgctccaaccaccgagtcagttaggttcctgcgaacgccagcagctcagtcatcagcgctcgcttctctcacttcccacctgcctatctcagcaggaggaacacctggaggttctccccagggactctcagacagcctggcctcctctctcctccccccacctcatctttcttgtcttctcttgaggccaaccctgaagcactttggcctcaggtgcccagatgctgtgacctgcgatttccccatcatctccctacctcctgatctcctgccacctgggcacacactcgcctgcatttccacagcttgtcccctgaatatggggtatttacatttataaaacacttgctgctattctggctccagctgcaatgaagttaggctggcaaagatactctaatagtggcaggatagtgtgatgttagaatcatgccttggacctaggcagccccaggttcaagtcttagctctgttgcttactggccagtgacactgggcaaactttcctacaggtctgaaactcagctttctcttctaataatcctaccctacacggttttgtaagtctgaaacaagttaacatatgcaagttgtttgccatagggcctggcgcactgataaatgatagctattattgttattgttatcatctttattataattattttgacaaagggtctcgctctgtcacccaggctggagtgtagtagtggcaccatcatagctcactgcagcctcaactcctgggaccaagtgatcatcctccagcctcggcctccctagtagctgggactacaggtatgtgccaccacacccagctaattttttactttttgtatagatgggggtttcactatgtttccaaggctgatcttgaactcttgggctcaagagatcctcccacctcggcctcccaaagtgctgagattacaagcatgagccaccatgcctggcctgttgttattattgcatgttagagctgaaggaaccatctagttcaaggaacatgaactcaaaggctatgtcaggaatcttaaataagggaagcacactaggttgggattgtgttgagctggagagggctagtcctgtttaaaacggcagccagtactcaccttcaattgttgctgggtagaccagattccccactgtttgttgtttgttttcaaaacaatctggcaacatcagcagcttggatatcatctctggcctttcttaccttacccctcccacctctctatcctagcactaggagcagctgggggttctcctcaaagcctctctgaacatcctggcctgaaaattctggccccaaattctggacttttatataaaatgtctcaacgtttgagtagaaacttaaaaacaccatgccaaatatgacatgccttaagtccaaattcacccttgtttctcagaagaaaccttggttcagatgggtctcagctgctggcaaagctgagactgaaagcctcgattctaagtcaaaataaaaacttctgggaggcccttcctaggctgtggggcctctagctgccacctaccatagatgctgcccgtcacaggcagtgcccagtggctgagctattgtttgcacttggcagctccagaagcataagacctgggtcacagcagctttgtctcttgtgatgcagccacactttcaaaaatgttaggccaggccaggcacagtgactcatgcctgtaatcctagcactttggcaggctgaggcgggcagactgcctgagcttaggagtttgagacagcctgggcaacatggtgaaaccctgtctctactaaaatacaaaaaattagccaggcatggtggtacacacctgtagtcacaactactcaggaggctgaggcatgagatttgctcaaacctgggaggcggaggttgcagtgagccaagatggtgccactgcactccagcctgggtgacaaagcgaaactccgtctctaaacaaaacaaaaatgttaggccaggtgtggtggcatgtgctggtaatcccagcactttgggaggctgaggtgggaggattgcttgagcccaggagtttgagttcagcctgggcaacatagcaagacttcgtttctacaaataatttttaaaaattagctgggtgtactgacaggcggcggtggtcccaggtacttgggagactgaggcacaaggactgcttgagcccagaaggtcaaggctgcagtgagctgtgattgcgccactgcactccagtctgggagatgaagaaagaccctttctcaaaaaaaaaaaaaaaaaaagttgttgaggggagtgtgacagcaagtcaaaaagtcccaggacccaggggatcttaacccccaatttagagccctcaaattctacacacttctttagttcatcaacttctatttaattctactcaacagatttcccatctgtatcccccacactgggggacagatccagcaggtttgttgggaagttctcctgattgccacttttttgttttgtttttggagacggggtcttgctttgtcgcccaggctggagtgcagtggcacaatcgtggttcactgcagccttgaactcctgggctcaagcaatcctcccacctcagcctcccaagtagctgtgactataggtgcaggccaccatgctaagctatttggggaggggggtagaggcagggtatccttatgtgcccaaggcacctggcctcaagtgatcctcttgccttggcctcccaaagcactaggattacaggcatgagccactgctcctggtcctgtgattgtgacattttgctacctctcttcttgtatcttacccttggggaaaatgatagaaaaggcacaaaaaattctggattttggcaggctgagtatgttgacatggaatgcttatgaacttttatacatgcacagcattctatgaatcatattctgatgctctgctgggacctgagattctccatgtggtttggttgcttaaaagccaagtagttcctagctaattagtcctttttatttcccatcagccctgagaaagcccccactgtttcttgcttggagttctgagcatacacttgtcaggctcttccttagtttcagtgaactggtcagctgaggggagtcccaacactccacagaagccaacactagactctgttatttctcaagtgcaaaggttgaaagtgggatatccaggccgggtgcagtggctcatgcttgtaatcccagcactttggaaggccgaggcaggcagatcacctgaggtcaggagttcgagaccagcctggccaacatggcgaaaccccatctctactaaaaatacaaaaaaattagccgggcatggtggcaagtgcctgtaatcccagctactcaagaggctgaggcaggagaattgcttgaacccgggaggcagagcttgcagtgagccaagatcgtgccattgcactccagcctgggtgacagagacactgtctcaaaaacagaagaagaagaagaaaaaagtgggatatccagtgctttgggagaccaggagtttaagatcagcctgggcaacagagccagaccctgtctctaccaaaaaaaattatccaggtgtggtggcatgcacctgtagttccagctacttgggaggctgaggcaggattgcttaacgccagaagttcaaggctgcagtgagctatgatcatgccactgcactccagccatggccacagaaaaagattctatctcttaaaaaaaaaaaaaaaggaaggaaataaagtgggatgtcagcaaagatattgtcacaatgtggttttggggtctaagatctccccctggtccctgtggtcttgatggggcactcaggaagatggcctcctccctttacaggggttgtcttaattttgatttcccagaaagcagatcccaaggcaaggattttggtacaagtagtttatttgggagtttatcccagaaaacacagtgagggggaagggaagtcagagagaggaggaaaaccaaataaaggatgcattaatgagcaggttaccactgaggacaactgtgactcagtctctctaagccttctgcaaaactgtggagaacacacctcaaaattatcccactgaagggtaaggaacaggattatctgtcctctattgtttttcctcaccggatgtggcttgctcctgagttgttacctccacagcatttccagcctgccctgcatgtcagccaagctgactctaggggctaaagaactccctccgacagacagacacaccgggtcataaaggaactatctgcaggtaacctttggagtgagccaagggtatatgagtgaggtactgactgcatctgctatggggtttgtggtccagggtggtggctcctgggccatgtggtgaattattgttgagcacatcacctaaacagagtcaataaaaggtttccctgagatgtgatatactgatacatttttctgggcgtcctaagtatgatgtagccgggagctgtttatggacttcttccctggctgtggaagaaaatactagaagtggttgtagacgaatccatggagtgatgttcaggagagaggtttgggccagaaatagaaatctggaagtccggcagaaggaacgaggatgctgtggggtgtcagcagaaagttatctcactggcctcacctacagaaagttgtcttcaagtaaaattggatgtaagggcagaaacttatctttccttctgagtgtgtcataatgcaaagtgaacttcaaccagtgaccctgggactttacccatgtgcacagctcccccaacaggtagacgcacagtgtgcaaatgtgtgagagtgggtttttgttgtttttatagagacggggtcttgctatttcactcaggctggacttgaactcctggactcaagtgatcctcctgcctcagcctcctgagtagctgggactataggcatgtgtcaccgcacccagctgtgtgtgtttagctaccgtaactagctgcctttcctatcactgacttttgatataataattttaaagctactcatatattaaatgacattgtgtttagtactatagagtctactagcttttcccttggcatcagttttaccctgtcatacccctgaagacccatttactcacctcatggtcacacaactctacacatgcaataaaatttcaattatacacacacacgtaatatcaaaccagtgatatccaaataaggtccattgtttagctaatagtactgtataaatttcaatttcctggttttgataattatatcatggttatataagatattatgttatcaccagggtaggctaggtgacaggtacatgggaaatttctttgctattttcacaacttctatccaagtctaaaattcaaaataaaaggtttttaaaaaaatatccaagagaggaaatccttgcagaactggccatttaaaaattttaggctctaaaatttttacctaatggctaaaatttaaaagaacaacaacaataccaactcttggcaaggatgtggcataatgaaaactcatcaactgctgaagactatataaattcatacatcacactggaaaaagtgtatggtaatatctactaatgttgataatcccagcattttgggaggctgaggtgggaggattgcttaagccgaggagtttgggactagcccagatagagtgagaccctgtgagaaagaaaagaaaaaaaaagaaagaaaagaaggaaagaaagaaaagaaaaggaaagaaagaaaaggaaggaaggaaggaaggaaaggaaggaaggaaaggaggaaggaaggaaggaaagaaggaaggaaggaaaagaaaatctactaatgttgaatatgcatatcacatgaagcagtaattccaatcctaggcatgtcccaatttctataaatgtcaaaaccaggtaaacttaaagtatagagttaaaggtggttattggccaggcacagtggttcacatctataatcccagcaatttgggaggctgaggtgggaggactgcttgaggtcaggagttccacaccagcctggataacatagtaagactttgtctctgcaaaaataaaaataaaaaaattagctaggtgtggtggtgtgcctgtagtcccagctacttgggaggctgacgtggaaggatcctttgaacccaggactttgagactgcaacaaaccatgatcacgccactgcactctagcctgggcaacagagaaagaccatgtctcaacaaaaacaaacaaacaaatcaaaaaaacaaacaaaaaaatggttatctagggagaagaggagggaaaattatcggggaggggcatgatgggggcttctgagggtgttggcaatgttctgtttcttgacctggataatcacaagtgttcatttagtaataattaatttaaccatatatctactttgtgcacttttctgcttgtctattatacttcataatgaaattaagttaaaaacaaaatgagaacaagaaatgtagaaagggccaggcgcggtggctcacgtctgtaatcccagcactttgcgaggccgaggtgggtggatcacttaaggtcagttcaagaccagcctgaccaacgtggtgaaacactgtctctactaaacatacaaaattagcctagcatggtggtgcatgcctataatcccagctacacgggaggctgaggcaggagaattgcttgaacgtggaaagtggaggttgcagtgagccgagattgtgccattgcactccagcctgggcaacaacagtgaaactctgtctcaaaaaaaaaaagaaagaaagaaatagaaatgtagaaacaatgtacatgtggaatgatttaagcatcttttctaagtttatcaatataacatttggccaagtcatcaggttggatggagctacagtcaccatttcaagggtcaatgggatactgaaggtgggtgttagggggagggattgccttttgagatatacgaaggtagactgaggcctgatttagatgtcctgaagcttattcaacttgccttaatgcctaggtattccagaaagccagttcctggctattccagtcttcattttgtaacactacttatagctgaattatgttttcctttttcttttcttttcttgttttttttgagatggagttttgctctgtcacctaggttggcgtggtggcgcgatctcggttcactgcaacctccgcctcctgggttcaagcgattctactgtctcagcctcccaagtagctgggattatacgcatgcgccaccataaccagctaatttttgtatttttaatagagatggggttttgccatgttggccaggctggtctcgaactcctgacctcaggtgatccgcccaccttggtctcccaaagggctgggattacaggcatgaaccactgtgcccagccaatctttttacctggccaccccagctttgctacatttatcttgacattctaatttacctataaaaatagcctctactaggaagccaaggtgagcagatcacttgaggtcaggagttcaagaccagcctggccaacatgacaaaaccctgtctctacttaaaaaaaaaaaaaaaaaaaaaaaaaaattagccaggtggctactcaggaggctgaggtaggaggatcgcttgaacccgggaggccgaggttgcagtgagctgagattgcgccactgtactccagcctgggcgataaagctagactctgtctcaaaaaaaaaaaaaaaaaaaaggaaaaataacttataaagcagtagtgagtattacactcaaccattagcctcattccaaattctcttaggatgtttattgatgatatagatgataaatacacatacagttgtgatcagtatccatatacttcttcttttctcttaaccttatttttccatacatacttttcactttgtttcctacatacattattttgagtttacctatttgtcatagttggtagctacaaagtattccattttaattatctatgttgaggttttttttttaatcaaccaattctaatattcacaggaagcacaatttctccatatccgtctttaataggtcagtatggaccatttgtttcattcctgcttcttcctcaaagttgcaactctactattttcaccagctgtgtcaaaacagggtttgtgaagtgacaggttgaaatatgtggatcatttgaagtaatttcttttctttaccaaattaaacaatgactgtatgccttgtttcatcttttgttgttcatctgtatagggctcttttcactcttttatttttaaaattctattttttatttttattttttgagagggggtcttgctctgtcacccaggctggagtgcagtggcgtgatctgggctcactgcaacctctgcctcccagattcaagcgattctcctgcctcagcctcctgagtagctgggattacaggcgtgcaccaccacgctgggctaatttttgtatttttagtagagacagggtttcaccatattgaccaggctggtctcaagctcctgacctcaggtgatccacccgcctccgcctcccaaagtgctgggattaagaggtatgagccaccacgcctggccctaaacttctatttttaaagagacatggtctctcgaacccttgagctcaagggatcctactgcctcagtctcccaagtagctggtgctacaggcgtgcaccaccacactccagctcatcattctgtcattatacttcagttatttcatgtgtcagtgactgaaagtgaacgtatgataatcttgtgaacacagggcttcacagtggaaagaaaactacattctatacctcattccttcttcaatacaagcatctgcaggaaaaggggaaaaaagaggcgggaccatctattattcaacaaatttcaacttcaccctgcccatctggatctagtctccctcattaaatgcaaaggatgctgccacctggctcctctccctagcagtattcacatcatctaggctagaaaatcccttccctttggcctgttttgcacaaaaccgagtaaacattttcaaagtatatatacgcaaaatcatttgctatctctttactatgtatgatgcgcataggtgttactgaatattttggagccttgatggataaagtatgggatgttgaggatcggggaatgtatctaaactttcaagttgtgtcctattcaaaaaactcccttctaaaagcatttttacggtatgtagggttttaatgtaacaaaatctctacttaataacagcggatccccttttattatctttgtgcctacctggatgcacggttccagcatgttctcgtcacgaaccacaagcccaccagagggcgctggttccccgtctacctactgttctccatcagcgactcagaaaatccaggttaaacactcaggcagtctttcacatttaatccacaaatatttaccgagaatttgacgtgccaccaggcgcggggctaggttcacaagatacagtagtgagttaggcacgattcctactaccagaagcttagagcatagggaagactaaaagtaagccaccgtctacaatagtaggataagtggagagtttctaggtccgtggagtttgttgttgaatatctgctccaggccttagaagccggcagcaattcactaaaagatcccggacttgtctgctctgtatcccagccaaggagctccgtccccaaggtgttttgttagagtcagagacctctccttgggtgattccattcgtcagccccacaagtccccgtctctggcctttttcagggtctccggcagctctctgacagttccccttctgtctcaggtcgacacttattccaaggaccagggattactcacaactatccgccagagtttgctccgccctttctttttcctgtttaaaatccgcgggctcttagtgttctcggttcctagatttcctgttctgattctcgcgacagttgcgaggcctcgcgtgaagttcccttctagtccctatttcgaatttgagaccgggagagagtgtctgcccttgcccacctcctcagaacccctctggccagggatggcgcctacgtggctcgggagcccctgaatgaatgggcttggcccaacttaggggcgcattccgacgggagagtcctggctgtattccgaggctccagtgcgcatgcggagtcgatcccgcgcaggcgggcggggacggcagccgggtcttgtgggcggagcctgactaagtgccgcccccttgccggctgcagattgctatttctgccccccaccctcgcccatccccccgcgagctggactgcgccaaggcttctgtgagccgcttggggccggccggggcggggcctgcccgacccgggtttggctggcgggcccctaggaatgctctcctccccgcccccggcccaaagtgccacggtggcggtggtggcggccgcgaggccgagtgtctccggccctgccagcctcgcaaccgtaacctgtaatcccgacccgagggacgcccgccggggaggcgccagcccgcctctccctgcggccgctggtcggctccgacctcgaatcacccggctcacccgcgggtcgcagcacctgccggatgtggggaggaagaaggaggccagatgagggaaggcggatgtaggcgcccagtctgtccgcgccttggtggggcagctgggtgggcaagcctgcggtcgctcccgggaaccagccctgggctgcggggagacgaaggtggttggtcctgccctccaggagcgccccgacatcgacgtaaaatgacttggcaccagagctcctgccgcctcccccttatgcagctgccctcgccgacgccagggactgtaaaatcagatgggacagggcctagccgttcagccaacactttgagcttcccagccaaactcctacccccactccccgcctccggtcctcacccccttcctctctcccagcctcggtgtctggttacggctcctctgctcgcattgtgactttgggccaggctgggggaaatgacccgggagggtcccatgcggctacataaaattggcagccttagaactagtgggaaggcgggtgcgcgaagtcgaggggcggagagagggggccggaggagctgctttctgaatccaagttcgtgggctctctcagaagtcctcaggacggagcagaggtggccggcgggcccggctgactgcgcctctgctttctttccataaccttttctttcggactcgaatcacggctgctgcgaagggtctagttccggacactaggtgagcactctgtgccccaggccataagcgaggcggcatcagcccccccagttctcaccccccattagcagcttcttacttctggagccacccattctctttgggcaaggatgctcaggggccagggatcggagtcgggtggtgcacggaagtggtgctggtggtgggtgtgcgtgcgcctgagccttatcaccctttcctcacctctcttcactcccagccctcccaagaacagcccaactgattgctaactgccataactggataatccctagagggtcactaggcctgtgtgttgggggaggctacttggtagcaggggagggggcgatgctagtgtcatgctttggtacaagaagcagtgaggttggtctttcggcacaggccctgtttctgacctcctgacctggcttcccttcctggcagggtgcccgaacgcgctgatgccccgagtgctcgcagggcttcccgctaaccatgctgccgccgccgcggcccgcagctgccttggcgctgcctgtgctcctgctactgctggtggtgctgacgccgcccccgaccggcgcaaggccatccccaggcccagattacctgcggcgcggctggatgcggctgctagcggagggcgagggctgcgctccctgccggccagaagagtgcgccgcgccgcggggctgcctggcgggcagggtgcgcgacgcgtgcggctgctgctgggaatgcgccaacctcgagggccagctctgcgacctggaccccagtgctcacttctacgggcactgcggcgagcagcttgagtgccggctggacacaggcggcgacctgagccgcggagaggtgccggaacctctgtgtgcctgtcgttcgcagagtccgctctgcgggtccgacggtcacacctactcccagatctgccgcctgcaggaggcggcccgcgctcggcccgatgccaacctcactgtggcacacccggggccctgcgaatcgggtacgcatggcccggggcccccaccccagcacttaggtttcctagaggcactgctccccgacccctgacagcattggtctctggccagcagagcaaaaaagataaggctatagaggcctcgagtccagtataaaaccctgctctcgctactggttcataaaagctgccaccttaaggtgggggtggggggtggagtggagtgggagtcccgggcttcgtcagcaagctgcattcgctgaaccacgtgaaagctccagagctggctggcagggagagacaggtcctctgagggcgcaggcacataacctatggtttgctcagagacccccccgacttttcccagaccagtggagtccaggcagcaagacgggttcctgtgagatgcaatcacgtttcattcttagagcagtttgttcacccagtctccccacctctctgctttctcctgcttttagggattagtgaaggggagcgggaagttctttctctatccctggggactggggtccattcaggcctctagctttccttggtagctttagtaactttcacttcctgagcccgggctctgcgtctggctcggctggggcagccagaaaacaaacaccccgtgggggtcccagcaatttcctccactcctgcaggcttcctgcctgtcgcacaagtccagcttcaggttctctgccttgccgcaggactcccccagggggtactgaggagggaacggctgcttttcctcctttgggaactgggcctgtttagaaaaggggaagggggatctggaaggttttgattacaggcacgcaggaaaggctggggagggtgaaatgaggacaggggagcagttagggacagagtggctgccaagctacaatgtagatgtgtgtgcttgtttgtgcattgggtctgcatgaggttctatgtgcacatgtgcatgtatacctatctccacgtctgcgtggtacccttgtgtgtaccagcatccatatctgtgtgtacctgtgtgtgtcacggtgtgtttatggatgtgtatttacctcagcatatattgtgttctgccacaagcatgtccacaaaaatttgtgtatcatgtctttgccagactggatgcctttgctgggccatgctattctcagacctcccgccttcacccccagggccccagatcgtgtcacatccatatgacacttggaatgtgacagggcaggatgtgatctttggctgtgaagtgtttgcctaccccatggcctccatcgagtggaggaaggatggcttggacatccagctgccaggggatgacccccacatctctgtgcaggtagactggtgggagaggcttccctcaggcagcccagggccctccagaaggaccctgctgattccttgcctggctccagtttaggggtggaccccagaggtttgaggtgactggctggctgcagatccaggctgtgcgtcccagtgatgagggcacttaccgctgccttggccgcaatgccctgggtcaagtggaggcccctgctagcttgacagtgctcacacctggtaaggggattcctgagttctgggggttggggggatggtgctggattccagttgtgaatgtgtaagaaacagaccatgtgtctgtatacacaagcatagccttccgcagactgggctatgtgggcaccgacagcccctctctcctgttctctcttctttgcccatgtgtgtttgcagaccagctgaactctacaggcatcccccagctgcgatcactaaacctggttcctgaggaggaggctgagagtgaagagaatgacgattactactaggtccagagctctggcccatgggggtgggtgagcggctatagtgttcatccctgctcttgaaaagacctggaaaggggagcagggtcccttcatcgactgctttcatgctgtcagtagggatgatcatgggaggcctatttgactccaaggtagcagtgtggtaggatagagacaaaagctggaggagggtagggagagaagctgagaccaggaccggtggggtacaaaggggcccatgcaggagatgccctggccagtaggacctccaacaggttgtttcccaggctggggtgggggcctgagcagacacagaggtgcaggcaccaggattctccacttcttccagccctgctgggccacagttctaactgcccttcctcccaggccctggttcttgctatttcctggtccccaacgtttatctagcttgtttgccctttccccaaactcatcttccagaacttttccctctctcctaagccccagttgcacctactaactgcagtcccttttgctgtctgccgtcttttgtacaagagagagaacagcggagcatgacttagttcagtgcagagagataggtgaggccagctcgagatcttataccactctgtattggacaaaggctagcacagggctaggcaccaataaagatttctaatgatgcacagacagtttatgcagatgtgcacatgaaaactgaatatccctgggaggcctcccacactaacagaactctggcttccagaagctgcagggcctgctctctaagcacatgcctgccagatgtacaaagagaaagtttgaacttgggcctatcccgcctttgagggagggaggctggagccatatggctggagggaagttatcttccccgtctgccctccattggggctgatatacattatctgcttctttgctcatcttattccaaacccttccccaggccagaatggggaacagggctatgtgggttggcccccaaaatgaaagcataaactggatagaggagggtggaagtttggtcacctgtgtggtccatacccttccccagctcccataggaatctacccatttcctgcagaagccagagtcatggtaaggctgtttcctatctgccccaattgtgacctgtcctctctggcttggggtccccaaatctctttcctcattctccttacctatcccagggacactggtgagactcaatgtttatttaatgattggaggaaagaatgaaagcataagtcagcgaggccgaggcgctgtgtgtagatggcgacagcctcctacacgccagggctccacccggatcctggcgccactgcgggagggcctgcccttggctcagcgtcagagtttgtcctctggggcccaacgcagggagcctggccacatgggaggggtgtggtccggaactccaaccccaggtcctgcttggccgcccctcccgcggctacgcactactccatctactgctggcttgccccgggtccttaagccagcgacagtttttattgccgaacccaggctggaagcgggcggccctaggagccgcgcacaacagcgcaagcgggctggataccgggagccgattccagggcgcccacagaagcagaatcagaggggtaggcgggggtggggcgtgctgttcggcgctgtggccaaaatccgcccggcgctgaaagaggggacgtgggtgtgagtcccagcatcagccagggaatccgcccctagcttgttcttcgcccagctgggctccaagacgccctctgcgggcccatagctcctaccgcgtccacctgcagagcagaggctcctcaccaaaagccccaccccaccggagagggtcacgcaggtcccggggaatccgcactccttaatcgcgttagccgactttgtaggtgttcaggagcagcctcctagcagcctcagttttcccctccccgccctgctggttcaagcaccacagcctggaatgggagaactgttgtccaccgccccctccctccccgcaccccgcctctgctgcagcggacccgctttaataatgtcgctggaaagtgacacgcgatttattattaaagtaatgcgggcgcagggacgggaaaggtttaataaacgtgctgagatgccgaggattattcaccgcaaataaatgagagcgcgggcggcgttttaataaataatttcccgctgctcccgggggaaggcaggggagggggagggagggggagggaggaggagggggaggctgagccgctgccagaactcccggtttcgcctgcccacgggcttccaagccatccccgcgttttgtgtcctaggttgctcacacccgagatgtgaggttccaggagcgccgacccagagttgccaggcctgaaggcgggagaggctcagtcgcaccctacatttcccacctccaagattttaagtatagttcgcttgaaatccctggaatgcgctttcttctggctcctacccggagatccggagtccggacaaaccggggcaggaagggtccgtcggaccagctcctcccaagccgaggcttccaggtctcggccgggctcttctccctgcttttagctgagccgggctgggcgtacctctctcctccatctagagcagggtgtgaagaggaagccagagggggctgtctgaaaatgaccctgaccccctcctcgggctgtcgtgaggaggagggccgcttcgcccggctgctcgtcaccgcgaaggctccaaagaagtgttgcgcagccgtgctggtataactgagggtgtcctggcgaagcccagcccctggcgccctggtgaccgggggggtcgatgtgcggactgggcagaactggagcccgaagctggagagcgcccctcaaaaagaagcctggaagcccgagagatgaacccgactcagagagggccaagactgcagaccttggggaccgaggacaccctcaccacgctggtgggggctggggggatggcgcgggcggtggcgtgcggggaagcgcctggggaacacctggctctgcaagttttgtgccttagcggaaagaggcgacatctctggcaagttgggagtacaggaagtagcgaaggagtgccatctggtggatccttctggtagtgacactcagacctgggccaggggccttgagacaatttacttgactggaaaaatctgaataaaaaaaagatgcttcaatttgtattcatttaatgtatatgaatgtgcacatgtatgtgtagcatatattagtatgatatctatatgtaaaatatagtagttatgtgtgcattgtatgtatacatgtatacatctaatttcatatgtatgtatgtggatatattatacatgaagttttttttgagatggaatctcactctgtcgcccaggctggattgcagttgtgctatctcagctcactgcagccgggttcaagcgattctcctgcctcagcctcccaagtagctgggattacaggcgtacaccaccatgcccagctaattttttgtatttttagtagagacgaggtttcaccatgttggccaggctggtcttgaactcctgatctccagtgatctgcctgcctcggcctcccaaagtgctgggattacaggcgtgagccaccatgcctggcctacatgtaggttttgtatgtatgtatgtgtgtgcaaaagtcctcaaccctggggaaaaaaagaggccctgaagaaaggggaaaaaggcagtgaaggggcagaaaccctggtagtccagcaagggagggtgagaaggaaggggggaggtatgagtattactatagaccaagggttggggtggcacctggagactcctggacttgactgcaactgtatgtattgttatatgtatatgtatagacatttattttcaagtatatattccattatgtatcattctttctttctttctttctttttttagagacaggatcttgctctgtcacccaggctggaatacagtagcactttcatagctcactgcagccccaaactcctgggctcaagtgatcctcctgcctcagtctcctgagtagctgggaattacaagcatgagccatgatgcctggctgtgtcatattctttctacaaatacttgttatgtaccagcactggggctacatcatgggaaaaaaattgcctgtaacccaagcacttgggaggctgaggtaggaggattgcttgagcccaggagttcgagaccagactgagtaatatagtgaagccccatctctacaaaaaaaaaattttttttaatttgttgggtgtgatggcgcacacctgcaatcctagctactccggcagctaaggaaggtggattgcctgagccaggagttcaaggctgccagtaagctatgattgcaccactccagcctgggtgacagagccttaacagaaaattgttcctgccctcatggaacttggattccagtctaagatgtgtatgtatacttacattagttaggtatgtttatatttccaggattatgctcacatgcacatataatactgtctaatatgtgtatatgcgaggagtagataggcctaaactctggtaggcctggagattccctggttttttactcacaatcactggtcctgtcacctggtactctattctgagcatgaaggcagctgagggcagagggaaagaaactagagacataggcctgttgcctcctaggatgcactgtggttatttcctcagccttctgaatgactgaattctttctaaaccgggaacagctgtgtaagtccacgcgtggtaaggaactgttagtgcacatcaagtcttgcctctgctcagtgctggggaagggtgggagcggggtctgggaggctggggtaagaggctaggttctctgagggcagtgatgagggcacttagagaccaggagggatcagttctgggaggcagtgagctctgggagtcacttgcagataatgaggggcggtttgaggacacttggggagggatggggtggtgggatagagaagggggcagaagtgagtaatgaggttgggattggggatggagttggggtggggacagggcagagatagaggctctggtggcagggatacacctgtctgggggtggagcctggaagccatcttgagggagtcatccctccctccccacccccacctcccttccccatgctgggccccagtttagccctctctctgctgaagctggctcccagatgtgctgggggcagaggagagctaaggctccagggcctggcctggcttaggtgactcacttaagtggtgggcgaggtggggcagggctcacaataccagcgtcccatgaagccttgtcccagccacctgggtcatcacctacctggctgccattaccagcttccagtttgggctcagcccaaggcgttcaaacaagggtggggcatagatctggaaaaggtcatagaatatccacccactccaccaacacacacatttctaggactgaagtgggaaggtgcttctgaatcatttcttcctttccctgcttttgctagatgctttccagatgcagtcaagtccgggagtcaccaggtgccaccccaacccttggtctatggtaattttcatacctctccccttccttctcaccctcccttgctggacttccagagtttctgccccttcactgcctttttcccctttcttcagggcctctttttttcccccagggttgaggccttagatccctgggctgtgtcctcgctggttagggagtggggtgcgggtgggatgtgctaaaaacgcaagctagttcctggcctagatttatttttctgattgatttatttttagaggcacggtcttgctatgttgcccagactggacttgaagtcctgggctcaagagatccttctgcctcagcctcccgagtagttgggactataggtgcatgccactgtgcctggcctggatttggttttgacatttactctgccatttcggcaactaaaggctctctggacagggtggacagttatgaaagtccagttgcggtgacaagagttaccccacaatcaaatctcatcccatcctcttggtggggagcaccttgaagtactcagtatcttcactgaaatgagggctggagtcccctggaagaaaagacagggtctctatgagaagtggtgacagcttgagggaagtaatggagtctcccaggataagggttgaggactctagggacaattgcttcctgctacccccaccccgagagctggagtagggctggagaaggcctcacagttctcctgggcctaactccttggtgtcagaggggttaagttctgggggcattagtggggggtttctggggggagtaatctctgaagggtaatggtgggtctttgcataggaggttttgcagtatgggattgagtttcagttctgctttttttttcttttttttttttttttaagtcagggtgtcactttgtcgcccagactaaagtggcacaatcatggctcactgcacccttgaactcctgagctggagcaatcaatcctcccgcctcagcttcttgagtagttgggagtacagtcatgcaccacccacgcagccagttctgctttttaagtgcgtacattgggtaggtttcttaaccttccttcttctgtgtcctcttctgcaatatagtgataaaatttactccataggggttgtgataaggattagagatcttataagcaatgtgtctgtaacaaaataggtgctcaataaacgtcagttttactatgcattactattttggggtagatgatctgcatggagatgggggcagggtgcccagtgcagagcttcctgctgaagtgggtgtgttggagaatggggtgattgcagtcttggcatctgcctggaggaggccttaggaattgggccttaggaaaaggggaaaggcggaggcaggatagagatgggcagggactgggcttccagagagctcagcagtcttcacccccacccctaaccctcctcagggagcccttgtcagaacccagggctctacctctgggcttgtgaggaggggcatcccccaaagtcacctccatccatctcttttatctgggctgatgaagggctagagctccaatggggcctctgatggggaacagatacagaccaggcggaagcagccggaactgtgctgggctggagctgaggactgggccagggggtcagtgaagacagataaagctcagagcagctggaggctcaagggacctggggcgggggagcagcagggctgagggccggctgtgtcctgggaggaggcaaggccggaagcttctgatggggaccagtgtccatcaaggacttcaaatgaccagacaaagcctttaatgactctttgggaggagggaaatagggacggagctgcctcccccagacatgtgtgcaggaaggccaaggtgcctgctgagagtgagggttggtcctgggggaagtcgaaacttaaaacaggaggaaccctccaggcacagggctgaggcagcggttctggggctgccttacctttaaggcagagagagatgggaaaaggattgggaagtgattctgtgattttagtttctgttttaattaactttgaagggcttggggcctccctgaatgccagggaggggagcagagcagacatttattttcctcttttcccttttaaagacaattttattaaatcactttgttttcattctggcttgaacatggggcgtttaaatggaaaagtaattatttcaccttgtttgcttatggagagaggggagtcaggaaagggagggacgccagtgagaggaagaggctgcagtctcaagcccagtgtgcacacagcttgcgtgcacacacaaccatgctcacacttacaccataatccacgtccacatatctctcacactagcacacgtgtgtacagtcccaaatgcagacacttcagtacttgcacgcacacatccacattctcctgacacacactccttcgccacagccacacttacagacagaagcactctctgtcatgcacactcacagcacattgtgctcacagtacaggcacatcacagtacccttaaacaccttccaagcacccgtgggtgtgtatgcatacacccgttcacacaggtgcatgcacgcacacacacaaccccaatgtaggccagtacttccaagcctattgcattacatcatcggaagtacacgcagtctcagacacaaaattacacagacgctcattctcaaatacacaggcacacccacaccctgacaagcagccttggggacagacatgtgagggggacattgtcacggagaaggtgaaagagtggtggaacgctcccttttactggggttcctgagtccccaaattgatctaggctactccatgagcccctttctctgttcctgtaaagttctctgaatgattgcttgtgaccttgattctgtagcctctgggacagtcgctccccgcaatctagccccccacctcagatcactgtagcaaggcaagaggccccacaggttttctgggttcagccggccctcatcaggacccaggttctaactccagcttccccgactcccgccgcccctccctgctatgtgaaccagcgtcggaggggttaaaatttctgtagcgcgcccccctccacccccacccctggctggtacaaggagggccggtttgtgccgtacctgtactttgtcttcatctgtcaccccttctgacagtcagatacatcttgtggggggggggcgtggggggcgagggagcaataattaacctctcccgcctcatcccccaaatgccattgcctcagcagcggttgcatgggggctgccgaggagaaagagggaaggggaggagatggagatggggagaggggagaggggagaaagcgtgacgcttccagagccacaagagggagcagagaggaaaggccctgacattttattgctctgccaacctcttttccgcacccttctttccacccctcttcctgggggagctgcgggcaggtgggagaggcaattagagcgataggagaagcctgccgtactcaccaccattccctcatagcagaggctcctggcaggggttgggggtagagcgtggcggggaagacaatcttcatatatgagctcttcaaggggacccgcagaacttacagcatgctaggcaggggtagagggggtggccgccccgtgctggcgtttcatgttgctgtcaaatgaacagagcttgtgttaagaaccaatttttcttccaatcaatgaaggggaagatgtcttgggtcattcctggagcagtcaaatgattccaatgccaaggagctgtggctcaaaggggacttcagatttgggctgggcaacagaggacactcgaaaaagtcaagcaagcccctaagcagtggctggaaccagagcttgggtaaggggaagaccaatttgtcttgggctgggtccttggatgaggcagccggtgggggagaataaggatctgtaagaaacacccagccaaggagaactctgtcaggagataatcagcggggatggaaaggagaggggttgctgtcaccgctggggctggtggggacacagagagtgagacagggcccggcctatcccctgggcagcctgaaggccaggagattctagattttcccaccactttaagaagttgttagtcaaatctatcatctttaaggtttttttgtttgtttttgtttttgtttttttgagacagagtctttctctgtagcccaggctggagtgcagtggcaccatctcagctaaatgcaacctctgcctcctgggttcaagtgattctcatgcctcagccccccgagtagctaggattacaggcatgtgccatcatacccagctaatttttgtaattttagtagagacatgttggccaggctggtctcaaactcccaacctcacgtgatccacctgcctcgacctcacaaagtgctgggattacaggcatgcaccactgcgcccagcctcatcttttaagttttaattttaatttaatttaatttaatttaatttaatttttttgagacaaagtctctgtctcctaggctggcgtgcagtggtgtgattatagctcacagcagccttgaacttctgggctgcagggatcctcctgcctcagcctcctgagtagctggggctacaggtgcatgccaccaagccccagctatttatttatttttttgatttttaatttttttttttgtagagatgggcaacatcttgttgcctgggcatctgtcacctttgtggtgtctgagatataggaccttttctctaaggtctctgagagagttgtgaacacagtattgtccatgagtcagaattcctgggttttaaccctagttctaccactagctaactgtgtgatggaagataagttacttaacctctctggacctcagctttctcacttacaaactggggagggggctgctgatgagacaaactctatagacaatgctggtactgatatctataatctttctacgacctgaggaaccttggttagggccatctgtgccctcctccagcacatacacattctgaacccctccctccactagcagcatacacacggaccaaaaggtgctctctctctctctctcacacacacacacacacacgtgtgtgcacactgtctccttgcccccatgtgctgtgtacatccctggactcccaatcaactataaaatttgctgtgtttgggaaggacgcaggggctagggcaccctaatagaaaagctgactctatgcatttctgttaaaagaagagcctaacagaggtgggaagtggagcaccaagataggaagtgtgcactggaaagggcttcccaatggggagaagaggcactggcagggggaagagagtcagcctgagagaggtggagacagagaaaaagaagccgacttagctgcaggggacctgctgctgagagtgaagagtgaaacgtgctgacagccttgtcaggaagtcacctcgatgcatcccacacccctgtctgtcaggttccatctccccaggggaggagctctgtgagtcaagctgctctctgtccatccccgccaccccccacaatacacacacacagccctgctccccaagatggaattaatttctggctattatttttttcacctggagaagtactgcaagttttgacagcattagggaagatgagagaagtaggaaaaagtcaggactacccagggtggggccacctaggctggggctgggtcaccctaggtggtgcctaggattgagctgatcttctgggttgatgtggcagttaacatagagctggacttttctctaacagctctgagtctggaacggctgtgggtcaccgaggacacatcacggccctggaacaaagctgggctcttgtatagctctgttctcctgaaggggatggttggagtttggagagactgatgagggcagccttacgtgtgaggtggagattctatctccctagccttgggagtcagaagtgatttccaccctctttggccaccctctggggtttcttttctggccttgtctccttgctcccagcttcccatctgtgggaataggtctcaagtttcagccccagtctctggtttcacccactcctagggcttcacctatccccttaataactccttagtctgtgtttaaaaaatccttttttttttttggtcctttactttaaaaatgtagtctaggaacatacgcttataaaaatttccattttggccaggcgtgctggctcacgcctgtgattctagcactttgggaggctgaagcaggtagatcactcgacctcagaagttggagacctgcctgggcaacacagcaagaccccatctctacaaaaaatacaaaaatcagccaggcatggtggtgcacacctgtggtcccagctacccaggaggctgaagtggaaggatcattcaagcccaggagttgaaggctgagtgagccatgatcaggccactgcactccagcctgggcgacagactgagaccctatctcaagaaaaaaattcgatgtcaaacttctgtattgtataaaggagtgaaagcctttctctttccctctaattctattcccttttccataagcaactactgttaacaattcagtgtgtagtcttctaggtctcttacatagtcaccatatagacacacacaaaaatagggtttaaaacaattactgtatatttatcgtgtcatactattattttgcaatttgcctttttcacttaaaaataccagagatgggccaggcacggtggctcacgcctgtaatcccagcactttgggaggctgaggcgggcggatcatgaggtcaggagatcgagaccatcctggctaacatggtgaaaccttgtctctactaaaaaaaaatacatagctttgggagatatatctaatgctaaatgacgagttaatgggtgcagcacaccagcatggcacatgtatacatatgtaactaacctgcacattgtgcacatgtaccctaaaacttaaagtataataataataaaataaaataaaaaaatacaaaaatacaaaaattagccgggagtggtggcgggcgcctgtagtcccagctactcaggaggctgaggcaggagaatggcgtgaacccgggaggcagagcttgcagtgagccgagatcgcgccactgcactcccgcctgggtgacagagtaagactccgtctcaagaaaaaaaaaaaaaaaaaaaaaataccagagatattttctaggtcatatatggatatacctcaatatgtgtggatatatttcacatgacactccagaatagattgaaccaattctttattcatagacctttaggttatttccaagcgatgccacaatgatcctgctttaatacatgtcattttttggtacaagaatgaatatttcctgagattaacgtttctagaagtggcatctgtgagtcaaaaaatatgcactaggcaggtgcagtggctcacgcctgtaatcccagcactttgggaggccgaggccggtggatcacctgaagtcaggggttcaaaaccagcctgaccaatatggtgaaaccctgtctctactaaaaatacaaaaattagctaggcttgcatgcctgtaatcccagctactcaggaggctgagacaggagaattgcttgaacctgggaggcagaggttacagtgagcccagatcgcattactgcactctagcctgggcaatagagcgagactctgtctcaaaaaaaaaaaagcactatatctaaccctgactgtccttcaagtttgaaacacacattgccaagcaaacacccatggatgcttggaagagggtggcctgctggttattgcaaggtgaatgtctctaagtgcttcaaacttgacaagtccaatgccaagggcattgttccctcttttcccatcctgctactctgcctcccagcctccttgctttggtcagcatcattcctacacatgcttttgcccaaacatcatactttgagtcatctttgaccaaggcatctgtgtgttcagatttgcccagagttgtccacagttcatgtctattgtcttggtaaaatcattgctagaactccatttatgctcaaaactgttctagattgcatgataaattatgtgcccacattatctctcttcatctgattcctgttcagttcatcacaaagtcccagcagttgtttttccactcttccctctgttcctttgcctctgcatagctcaggattccatcatcaggcctgaatgacaacaggctcttaactagcctccccactctgcatctctcattcctccaacccatccttccactccactcccagtctggtctttttaggccacttatttttatcatataattctttggctccccactgcctacagaattgagaccattcaagatctgtcataatgccatggctcatcagagcagacatcacccatccccataaagtcagaaatctgcagaaccttatatggagcaagggcaataatcaggcactggaaaaacttttccatgccactcaaatctgcatgagatggcctggcataagaaaggcaaattaataagagaaaagaccctttgtgatctgaatgaagcccagaaggtggcttggtgtctctctgaactcagatctggggctagccatagagagacccccttgggcaacattccttctagctcattctttctctccctgcccacttgctttgctacttgcacagtaattccaagtgcggtttcttgttccagagctagagtctctagggacatcttttttttttttttttttttgagacagagtctcactctgtcccaggctggagtgcagtggtgcgatctcacctcactgcaacctctgcttcctgagttcaagcgattctcctgcctcagcctcctaagtagctgggattacaggcatgtgccacgatgcccagctaactttgtatttttagtagagacggagtttcaccatgttggccaggctggtctcgaactcctgacctcaggtgatctgcctgccttggccttccaaagtgctgggattagaggtgtgagccactgagcccagcctgtagggacatcttttggttctgcatagtttctgatgggctcttaaccagctggtgcctgccccctgtactccatgccaactccgaggaatgccatatatgatccaagatcaaagaacacccaatccttgagtgagtgggagggtggaaacacagagccatatactatgataagaattgaccctcaagccacaccctgaggggactaccctagggaacctacagggagggcctggtcagagctccctatccctccccaccatgttaactcccacccacctgagtctttagaatgagcttctggagctcttcaccaaacctaagggcacctgcagcctccccactcccttccctggcatcccttcccttcactcagatgttgccaaatggatggtgagcttggataggtcctggtggcggaactccaaacagggagggaggcatcctggccccctgccagcattctgtccatagtaatttggcagggaaatgccagctgcatatatctgcacatctgtttatgcctctggcttgttatttattctctgcctttcatgggcagcagagccagagcacacctcaactcttcccaagtcagattaactgggaaagaaggctgggacattcagtcactacaattgctgatgctcattgaaggatttgccttcttcagcagctgctgccacttttcatagagacacagaggagaggatcggggggaagggagggaaagggataagggtgggaggagaggtgaagagaggagagggctgtagtgtttgagccacagttgtgctgggagtactcaaatcaggtgggctgattctgagctccactggagaaggggagttggccagtctgtcagaaacaatcaccctgaccttccttcctgctaaccaccagatttcggcgtgtgtgttcttgtatggcttgggtaagagtcagtcgtgggaataaggcttttaacagaggtttggtgggataggcttcttggggtgcttaaataacttttctttttttgagacaaggtctcactctgtcacccaggatggagtgcagtggcacgatcatggctaacttcagccccgacttcccaggctcaggtgatccacccacctcagcctcctgtgtagctgagaccaccagcacacaccatcatgcccagctaattttttgtagagatggggtttcaccatgttgcccaggctggtctctccctcctgggatcaagcgatccacccatcttggcctcccaaagtgctgggattacagacgtgaaccactgtgcccagcctaaataacttttcttgagggattcctggggtgaagtacctggtggtgaagaatcagaagccaggccctgtccctgggattaaggacaaggaatgagaaggaagagggaggaataagaggaagggaacaagaaggaaaaggaaaaggtgttttgaagaatgaggaatgtttagcagggaagaagagggaaaagcggagggacctggaagtttggtgatccttgaaatagtgggggtgctgtccttggtcctgactgacaaagggcccacgaatagcccagacggagtgcctaccccaaactccctgcaatttcccatgaaggtgaccagatgattttggaggaagaacaaagagctagagctgcatctgatgggaactgaatccacaggcctggcttcgctctcacaccttctccttctcctacctttccccaaagcaactccctgtttaataaatgctccttgcaagaggtagacagttgtgggctcagaggagatctgggcaggactcctggggaagggtgcaggtacctgtgccctgaagacccctggcctaagtccctcctcatgagataagttggctggaaagtggaggtgccctaaggtgggagtactggcctgatcagattaaaagcaaccagatcctgctaaaagcctggattgacattatgcttccactttctctcctgttcctttgcagaacttgaataccaacaccatttttccctcctttaaaaaattgtatgtaacaagctgttcacaggcaggccttgcacagatgggggtttaatcagctacagtctaagcacacaagcattccagcctaattcaattcctgtcagttcattaggggaaatattcatcacccagagattacagcagggccaaaactctgaatggattctaaagagctgtcagtggagtagcaactgcaccagcctatgcagggggccatattgtgtggagggtgtctggcagccctggccatgctctgagacccctgatcctaccgggcttcttcacagggactctgttttgagaatcactgttttgcagacctcaaggcaaggcactgagggggaagataagagagaaatacaactgcatttgggagtccctatttaaaggggacatggaggctcctccttttagggagcctctagtccaatgggggagacgtggcttccaccctccggagtgctctctgagttctctgaagactgctgacttataaatgattagacttttctttctttttttttttttttttttttttgagatagagtcttactctgttacccagaccggagtgcagtggtgcaatctctgttcactgcaacctccgcctcctgggttcaagagattcttctgcctcagcctcctaagtagctgggattacaggcacctaccactatgcccggcaactttttgtatttttagtagagatggggtttcaccatgttggccaggctggtctcaaactcctgacctcaagtgatccacccacctcagcctcccaaagtgctgggattacaagtgtgagccaccatgcccggctgattagacatttttgtcctaaaatctctagcaagaaattacctcctcacaaaggcacaggtgggagtatgattcccaccagttcctgcagttaaattggagcagaagctggaaatagaagtcagggcacagactcaagaccatgggacgctattacttttcttgtgccatgggagcctaggtcaggtgaacctgggcggtggaggtaagggatctcttccaggttggattttcccaaatagatgagaccctcaatatcaagtgaccttaaccatctcgtatggagaggcttgagtatttccctgtgtgtagtttctgcccacatccctatatgaagcgtaggaagcttgtttgttgatcacctctggctttcccagggctatcctctgcctcccatttttctcttgtcctccctggtggtggtgcggaagtcttgccttggatggttcactaatcctagggtgtctgaaccaaaggcaaggcactcacagggctagactttggcctcaaagcccatagtgcttcctgccatcccgtttctaggcttcagccctagacatgtcctctggactgaggagagctggtcacctgtgaggtctatttcctctgcctaggtcttctgcccttttgctcacctgggctaagacggagaatgggagagaagaaacacggagcatgtggcctaccctcccatgtgggtgagggagagcttcctgcagctgagacccgaaagataactgtgaggtaccagttgaggggctggggaggatttttgccctcactgagcccctgtgctccctagacttctttcccagactcctgaaacccattcttggctcagagtccttcagtcagtctccatgagccctacccctccacccacagcctgcccagcatccggcttcctagggagtccctcggctctgagactacatcaggacaatattccacagggattcagttggaagacttctgacctggagggtggggtctggctgtttctcaaagggagcgaccaaagcctagaaggcacataggctctgccactctcaggcccatctccttaggaaggaatcagggacagcaataagaacccagaacaaagggccaggaggctgatagaggggacaagatccaggtcagaaacaaaaactcagcttagccacagtgatgcttgagagttatgagatggctggggagatccacaagcaccttttcattgggcacaggtataacctaccttgaacttgggacctggagccaggtcctgacactgaatgggcagttataatctacttgggagcctggctagaaaccttgttttcccacttactagctagggaatctttggtgagccactttttttgttttgttttgtttttttattttattttattttattgagatggagtctccctctgtcatccaggctggagtgcagtggcgtgatctcggctcattgcaacctccgcttcctgggttcaagtgattctcctgcctcagccttccaagtagctgggactacaggcatgcgccaccacacctggctaatttttgtatttttattagagacagggtttgaccatgttggccaggctggtctcgaactcttgaactcaagctatcggcctgcctcagcctcccaaagtgctggaactacaggcatgagccaccatgcccgtcctgttttgttttttagacagagagtcttgctctgtcacccaggctggagtgcggtggtgtaaccatagctcactgcagccttgaacttctgggctcaagtgatcctcccatctcagcctcccaggtagttaggacttcggacatgtgtcaccacacctggctcattaaaaaaaatttgggggagccaaacatgttagctcatgcctgtattcccagtgctttgtgaggcagaggtgggaggactgcttgaagccaggagtttgagactatcctggacaacataacaagaccctatctctaccaaaaaataaaaaataaaaattagcttgctgcagtggtgtgcacctctgtgcacctgcagtggtgcgcagtggtgtgcacctctcagctactcaagaggctgaggtgggaggactgcttaagcctgagagtttgaggctgcagtgagctgtgattgcaccactgcactccagcctgggtgacagagcaagaccctgtctctaaaaataataaaataaattttattaaatacataccaaattttatttcaaggaactggttgatgcaattgtgtgggttggctaagtaagtctgatatctgtagggcaagcagtcaggaaggaaagatcaggaacaagctggaaccccctgggtgctagcaaagctgctgtccacaggcagtcgggatgggagaacctagcaaagggagaacaattctacaccaagctgctgtttggagcatccttcatcagggagagccctgaccctttacaggctcatctgactaggtcaggcccatggaggataacctccctcacttaaagccaactgattagggactttgattacatcctcaaagcccctttacagcaggacctagattagtgtttattgagtacctgggagaaggtgtgcggaagctgcaaaatgcctgctttgttttgggaggctgaggagggcagatcacatgaggccaggagtttgagaccagcctgatcaacatggcaaaaccttgtctctactaaaaatacaaaaattaaccaggtgtggtagtgcacatctgtaatctcagctactcggaaggctgaggcaggagaattgcttgaacctgggaggtggaggttcaagtggcttgaactccacctgggaggtggagtgcagtggcttgatctcggctcactgcactccagcctgggtgaacctatctgacaggattctagccattgagaagatggggcacctcttccttagcaaagggaggctaaggagatcccatcctgagtttcccatggtcagaagtaagtgtgtctctatgggactcctggggcttgtggacatggtgtaggatggggagaacctcaggattaaccagcactcttgggggtcccctgctctggctttttggggccaccagagccagagctacagtggcagttgatgggaatagccctcagtgaccagtggggcttcagcaggtaattacccggcaaaagctgggaactgacagggtaattattagcttctaattgcagggcaaactcaggccgggatccttctctccaaagcagagggcattactatttgcatagcaattaattactttgggagctacggaatttaattacccactagtccacaggagccaataattaaattactctcagaaacagggtatttatttcccagttagtgtgagcaggtagctcttcctttggggggtgtgcctgggtgatgacccctaaaccgattgctggtccttggcctgagcaggcaaagagtggtgaccacggtgcccagcagggagtgcccgcaccttgatgaggacggacacccaagcatacacagatacaggcccttgtagggcatgcagacacatgataccatgtgctagccatgactcatggactggcgtttggatgtacagtaactcattgtaagtggggcacacacactcagcgagaattacacacatggtgaggaacaggcaaagaggccaaagagggaattttggctctatcattttgccactattgttttgcctaacttgcatcaaaatgtgtttgtggtactatgtactttggtcaacaggctgtggttctgagcccatatggaatccatcttcatccctgatgcctctcaaaatggggtttgggttgggagggcctcaggacagagtaggcgctagggaggggctggcactgtctattttgaacatcaattgatttttttgttttttgagagggactctcactttgttgcccaggctggagtgcagttgtgcaatcttggctcactgcaacctccatctccctaattgaagcaattctcatgcctcagcttcccgagtagctaggattacaggcacccacccaccacacccagctacttttttttgtttgtttttggtagagagacagggtttcaccatgttggccaggctggtctcgaactcctgacctcaagtgatcttcccacctcagcctcccaacatgctgggattacaggcgtgagccaccatgcctggccacataacttgattttttaaaatcctgaaagtttaatgtttttgcatcaaaatggccatgccaaaatgtcatatatgcctgagagacaggagttgatagaagaccctgaggtctggaggaacctagagacttccaaatagaaagcagccccttgaagcagagctgtgttgggtccagcatttactctccctcttcatagaaaacagggtcccagaaggaggcatgaagggatggggtgtgtctgggttagcttgcccagtgtcaggacctccagtcctgaaggagaaagcccagagctgggtggtgtctgccaggtccgctctccccgaagtccactcctcgccttccttggcgttgcttcccattggctgcctgggggcagtggtcagaggtaactgaggcaatgtggttttcacctctatctacttagagagtatgggaagtccctggccctggagctggggattctagtgttagaggcagccttgctgcttggtgggttgcccattcctctgggctggtgggcccaggtctttgtgcactgctcccaataaggaagggcagaagaatggggcccgcttcccttgttctccactcccttcatcctgaaggtgtctcaggcaggtcaagtgggcactggttattctgtggttatcttccttcctccttttccccaggtgactatggaacccctcgcatgtgcaggtccagagccaggccaccgcacagccccactgccccatcccaactgatgtcagctcccagcccctgaccccttggaattcccctccaaagcctagagctgagtccctgtcgccatccttccagcttagccttgggcccttcccaggtgggatcctgtagatgcttctaatgaagttctctctgactctgtttggggcacccaccacccgtggaaaggagcggcggccgccccggcccaggctgctgacagcagcaatccatctccatcacagtaatggcgtccccattaatcggccataaactaataaagcaatcactttccacccctcacccccccgccccaacttcattaagtctttagtacattaatatgtcttacttagtgtcagccaagcctctttctctgtttggggtggagcatgctggggtgggcacctcgcccggtgggtgggggcacatgacccctctcctggtctgggtagggggctgctgactcagggcaacccactccccctctccctccttcctctccacccactgtccccttgagggccttgaaaggctgcagagaagaggaagagcgagaggaacaggaaactgtggagcaggagagaggaggaaacgggaaaggaaaaggaaggaggaagacgggatgagctggggaggaaggggggaagctgggaggaagggggagacggaatgggggaggagctgtgcacctccaaattaaatttgtgattcaggcatcagatgggccgacagccagagattaattcaactgatcgagttataaagagcgggaggcctgggtaatcaatcttgcagctgtcaggccgacaggcaggagtattaacctggcgagacggcacgtacccaggactttttcatttcattcaccccaaccatgtccctgaccacctctggtctgtctctccaagtaataataattacggctgttaacgatgacagagacaggatgaggggacgggctcctgcggcagggcttcctctcccggagctcccacccactgctcctctgaccactcccagaaggtagagcaaggaccagctcatggcactctttgagaggtggggaaatcgaggcaggaattccaaaaagaccttcagacaggccagaggtggggctggaaaggtactttgggataaaggacagtgccctagatccctctcaactctcgggaaaagaattgtccttaagtcagccagcttggccccaacacgttcagctgtggccagggaagctggaatcaggaaggtgagacagatcccctcctccgggctattttgcctcagccacaaacctgagctctgtgtggcttgggtggaggtcccatcctgggcacagactcctgggctggggctgctgttcttcctgggcagccttctctcctccttctctctcctcccacctgacagtgtcagtccacacctagggggtgggggtctccctgcagagacttgtggaaacaccaccgtttgagtagagaaggggtggggatgggggagcccccttgaagttgacacctctctcagctctggctaattttcacatccttcaaattctgatatctctttttccctccttgctccagggaaaggaagggagaagacaagagagggagagagaggtaaataggtaagaagatgtgctgggcacctttagggactgctgggagtgagccagggcctcgtcagtcctctgaaattgttatgccagggtgagctgctagtagtgggggccttggagggctgatgtgaactgtgagttctttcttccatgctcagtgagaaccaggcacagggttcgtggaaggggctatggcccctgtgatgccctcagtattccctattatcattttcattattaccaatcagggaccaccccgtcgctacagacagcaatgctgtaacagtgactagtgccagaaactggctaaaggttttctatacattactactttaatgttcgcaaagagccctatgaagcaaattctgtgatcagccccattttacagatgaaaacctgaagttcaaagaggttggaagactcactcaagctctcacagccaggaaatagcaaagccaatactgggcccctagccagagcctcagctcagcataggctaactttcccccaaggccctcaaatgtcactgtcccctctgacccctgcctccaccaaggttcctcagtgttctccgtaggcggattctggatttctccagctgaggtgacctgggcaccagatccttctgggtttgagaagggtggggagggtgatgcttctgtttgtttagagggtggggcggggaacctggtgtcagagaacactcatccggggcaaagggaagagtgggggccccactcggggaggctccccagtgctctgccctcaagtaaccccagggagtaggctctgccccctccccaggccccatggcctcttgggaaaggagagagtgctgacttgcccatgccccccgccttccccagggatggagcaattggaggggtgccatgctgggtgtgtgttggggtgggagtggatcctgacttagaagggcctagaggaaaactctccctgtcacctcctgaccctagctggggctaggctggaggaggactggggacatgggcctgtctgaggcgccaggcgctggaggctggaactaggccagcccctctcccaggctccctaggacccatttcaagtggttgcttccaggatgacgcagccctggggagggggagcaggaacaaggagcctgtttccaagcaaaggttcaagggtttcctttcctgggctcccgcccccttgctcagggcagccacccattctgccctgtcagtcataatgtttcttccttatctgagaccaaagccgatggagggacccaagtccctgtcccatcttgaggtggttcttgtgcttgagtggggatagatggagacccccagcacaaggaaccagaatcctcaagtcttaaggttttgatcagtggggtgactgggagagttaacgtatcatggctcctctctgctcctgcctcgtcccgttccatggagccttcttattcctgcaagatcctgcatcaggggcctcttgcggcattagagatgggggtgttctctggtttctagtcctctcaacccatcaaggtggatgtggattcagatcccgagggctgtcttgtcatgatcaccacaattgtccctcgcagcttctctgcgctttaattctccgtctgtaggtaatggagagaatgctgtctgtgatctctgcctcctctgcctcaggatggggcaaggtgggttgctggggaaaaagagaggagagatcttttcaggcaaatcacatagaacacctgtttctaaacctgttgatccttccgtgcctcagtttctgtgtctgtaaattgggagaaatcacacctacttccttgggttgttgtgatgcccaagtgagatggcagagggggcctagctctgtgtctggcacattgtggtgctgaataaatatttgaaacaatcagccagagtggggaagtgcctggggtgtggtgagggtgtgggcttcagggaagaggctctccttcctcgccctcagtcttctcacctcccagctctctgatctctcactgtgacaagtccaggcagaggccctcaacatgagcaccccagctctgaagattgcttggacgaggctggagaatgctggcgcgctagatagggttgcgtttgagggatgtgtatctccacatccttgatttgagacaggggctatttggacatcagccaggctttgtgtatatgtgagtgtgtgtgtctgcgtgtgcacatgtgtgcatgtgtgtggatgtgtgtgtgggtgagtgggctcaatggctggcaccaaaatacttgctgattaatctttgtcttccgagcgcccagccctagtccccgggaagctccagggcctgagctggtgtccagtgggcctgagggggcagaatcaggcccaggaagatggatttccctgtcccctcaggccccacccagcagggaagcagggaagactgcttcattttgtttaatgggatactgggggggacagtagtcatggggcattaactgctaattgggtccataataaagttaataaagctcttatggtctttgccattaagtgtaattaagggggtgctctgtggcgaggagggggttgttcgcggggaacgggtagtgggctctcactggcaggagcagctgatggggaagctggcaaccatgccaaggccagaagctgcactggcttctggcaccacccacccctggctgggctcccgcgcagctcctctggggattggaggtggtgaagtggacaggaagggaaagggtttactctgtgctgttcatagaagtccagggggaaaatcattaacttcagccccaatgcccacacccttgaagaggctcagaacatggaagaaatgtcatcttcaaggagagatggcacggacaatctctgagctttagggcatggcttgacttgtgtgtgctgaatgactggggacgttgcataaccactctcagcctcggtttcaccttctgtaacatgaggataaaaacagcatggttaggagggttccagagctatgtagtgggagacagctagatgagtgactgtcgtgctgttattctttttgtgagctcttgtttgttttgtaataacacaagaatgtttgatgaagccttcttgtatatacagaagcacagagtgaccctctcatccctctgtcatcgatgtggttgttatttttccagagttttggggatatatttatataatatatgtgtacatgcagaaacacatagttttctttctttttttttcttttttcgttttctttctttctttcttttttcttttttttgagacagggtatcactccatcacctagggtggagtgcagtggcgtgattatggcttacagcagtctcaaattccagggctcaggcaatcctcccaccttagcctcccgagtagatgggaccacacgtgtgtaccaccaaaaccagctaacttttacattttttgtagagatgggggtctccctatgttgcccaggatggtgtcaaactcccaggctcaagcaagccttctgcctcgggctcccaaagtgctgggattacaggtgtgagccactgcgcccagcctacattgttttcttggatggctgtatgatattccatcatatggctacgttttaatcatgttgcttgtgccccagatggaaacctagactgtttctagtctttagctcttacagtactgcaaaaataccttgatatatttctctgagcacaagtgcaggacatatatagacaaattcctcgaagcggaattgttgggtcaactgacatgttcattgaacatttttgatagatattgccagactgcacatgaagatgattgcactgtctacccccggtgtcaaaccggcagaggggctgcctcccaggtgctcagctcagccacctcagttgctctcagacacactcctggacagctcccgggatgggggagtcccaaggagagcacgcaggacagggagcgcagcttcccctgggaggggtgggacaggagggacaggagccagccctcccctctaagcctgagaaagccactaggtaaactcggttgtcagaagggagggagagtttcagtcagggtcaggggttaatgcgatggagctactgggacacactgtgcaaacaaaacaagttaggggaggggaggggccggccctctggccacagggagggagatgggccagtcagcctgcacttggctcttccctgggtagctgccatcgtgggcacaggttctgggctgttgaggaccttgtggccaggctgctgggctctaaggccaagagggcagcattctccttctgaaggccgccccccagagctggcacggtaggcctgctgagctgccttgcccaccttcagggcccctccacaggtaatccccctggagccctgtctgggaggctttggacggtattagaggtgagccgggtggcaggccctggagccaggcccagcttttagagcattcctgagcattaggctccctgtcccagcccagccttgccctcaccccatggagcccctggggcttctctgcttcagctgctgctggcctaattacaggtgtccatgtcagggtcagcagtggagttaattcggggcttgtcttggggtggccggggctcattaatggagtcccaaagagcctagggatgagccaggcaaacaggggattaggggctgaggaagactgctgtgggggaaggctggctaggcagggctgtgagctgggccccggggagggggtcagcttcaagcctgtgtgttcacccacccacccacacaggccctcatgagacccagcagtgctcagacacgcagacacacacagccacgggccagacactcttcagagacacatatggactctcatacacaggctcacacacacagacacacaccattggacttagaactgctccctgagaagccttgaggtgtgcaggaggggtgggggagatgaaccagagatttccctcttcagccagaaactctggcctgcccctgccagccccctcctgtgccctctcccaccctggccagggcattgagcttcccttctccctttccttcagcatgtcctcccaccatggactggaattccgaagcactggtctgtgggtagaatgaaagagccggctcccagccaggatgcagggaggcgggggtggtttctccacacccctcagtccagcctggcctagagggtccctgagcccagctgtcagcccacctcccccataccaaccctgtgcctcatgacagccctggggttctgtggggaggcagagccacactgcacagaggtcaccaaagagaaggaggaggaggaagacaagaaaggagctgacaggagccagggttggggcgggggctgggcagggggaaatcgcttaaccccgaagccgccactagtctttggagcccctgcattgacgggggccagctggagctggctgaggacaaggggcccaagtgtgggaatccagggaggaggcctccccgggcttcctggatcagctgggaagagagaccccagagccttcttctccagcccgccctcctgccgccatccctccctagagtgtggagacaggccccggctccctggctctgttgccagtgggggaatttttccagcattgacctcaccccgaccccaccccaggctggctggctgatgttcctgcactcctagcagcgtggccatggcagcacagggcaggcaggggattcagaaacccaacccttgactctggaagagtcaggttttcccaaggatacctccttccacctgtgcccacttaccaaggcacctccttgactagtatttagaagtgaccccagggataaagtgactcccattacagaaacagccactgctccatcccactaacttcacctgctcatcagtaaaggtgcccacgggtcagactgccacctgtcatcacctcactcttggtcctaggcatcaagccttcccttctgggcccccagtgtcccccatgccatcccaggaccccacacacactccaggcccataattgaatataaaggcccagaagctagtgcaaacagtggcattaatcaccagcaacctggcagcctcctgccatagatcttttccacgcgtagaatagctcatgttaatcactgccgctgatttattgtcttctccgccttgtacataaattattcactgtggctgggctgcgaaggaatcctgtaatgaggccttccatcctcccatctccaaggtgaatcctcagacctccgggtccacctagttgtgttcactggtgggtcaaggcatggagccacaggcatgggattgagaggatgatagggagtggggacccccatgcaagaatatctgtccccccaggagcatatataggacctcttcagctccaggaaacagggctgcggcctcgcctctccagctctggacaggagagacagggcagaatggggcggaggaggctgttgggtggccccagggcttcctaaggctccgggagagtaaagccttccagcctttacctggaagttcctgctcaccacctgagagactctcccgccaatcaaggccaactcttgggagttccccatcaccggaagcaggatgtgggcgtgtccacgggggcagaagacctgcctctcccagctccctgtcctaccctggggtctgtgctgctctctggccacacctctgaaatggcctcagcctcaggaaaaggtggtggcagtagttatggcaatggccaccagatggcagccctgatacccaggacagtagctcagggaggtgggaggctgcatttgggtaaggaaatgcctttgggaaggtgggaatccgccagcggagggtgatggggagtgggtggagagggggtcttgctgacagggagagctcttagcctcaggggaccaaagtacaggacccacttcacacatcaaaccactcatggtgacatcctcaaatgggatggtctcaggagaggaaattggggcccaggtgtatgtgggcaagtgggaccccagagggtgtgggtgctgccagatggacttccctggccctggcccaacacccctgcagcctgactttcaggctgtccttcccaggctctgatccattgcatcccaacccctctctcttggctggggcactctcggaggcagccaagacaggagctactgtgtactgtggtcagctgggggccagcaagccccgccctcaggatctgtttcactgcacacatgcagcactgtgagttgcttagacccagtccatcaagaacacctgtccccgcacaggcccactgtctcctcccactcctgtatgtagagtggagagctgctcagagatacaaatgggtcctaagattcaggagacttgtggctgcaacactgggcttgccagagtgcccctccagcccttcacccctccacaaccccctccccacacaccttacatcacctactgaggcagggcggagcctgcactgggatggtgtagaggatgcagagtatttgccttgttacccagccagtgagctgctttccagcaaagatgcgggctccggtcctttaaataccttgagcctagagggcaaagctggcagaacaaggctctgaaggcctccttttgccccagctgcctagatgggagtcctaggaaaacatctggaactctgtgtctccttggcagttcttgcctaggtgtccttgctgtacatcccaccgctaagctctctggagatatccgctgggattctggagtgcccctcccagaccccaacaggccctctgggttctgatgggaactcccaaccccaggcagggccctatctcctgaaggcaaggtcaagacattcccatcaatgaagaccagtgtttccccaagtgcaagtcctgtgcctacttcagacctactgagctggaaactgtggggaagaggtccagataactgaattgttaccaagcttcctaaagcctgagaacctctgtacgagacacttccttagagccaggctcatgccctcgttagatcagcttcctgagggcagccccagaccaggatgggtgagttgtgaggtttttctagttggcctccgagtattgacttccctgccaccaccgccctggaagtgggcacacctttggcctcctcactgtcctcctgcctggtccccttcccttcccgccagccctctggcccttcccagccagcttgcctggcttcctggacctgctgtcttcatgtctgtcttcacatctgttccaaggctgccccagccccgcttgtttatccttcagggggtccaagtgggtgtttcaacttcaattatgctctgactacagccaccacagataccaaaacaaacgtcctgggcgtcagaggtggtggaggctcagacaggctggtgccagggggcctgataaaggggggtctgcttgggcttggaggtgatgagagctgctcctagtgatagggccctggggagcaggggctcgtgggtaactggcctcctcaggtaggcccaggccacagaggggacagtgtcttggtcttagtacctctctctctgtctcccagcttctctccagtctcatgtaacagaagccttttttttttttttcagtggggacgtgacttgtaaaagccttccttcttcccagctgctggctaagtctggcctcacctccagaggacaaagatcttgactcctcaacccaggccggcctattgagatctttttaaatcccctctcagaccttgtggtcagtgtctgaggatggtagcagaagtcagggatcctggacccagctctgttggattgtccctgtgacttggagtgtggtctttgcacaagctgtgctttggtttcccctctctaggtcaattagcagaacacatttcccagtctgattgcccacaagggagaaaaattcaaaccttccaggctccctggagtccctggagaatacaacgaggtgtctcagggagcaatgggaagcaggacgtggtgcctgctaatgagtgggccctgatttccgtctggagcatcagaggatggaatgccaggcatccatgactagagagaggccccagctcccattgatctctgtggcaggaaccaggagacccagcagaggccatgctcagcagcccctccagctgcgcttctccttagtgggaaggagccctcttactcactgcaccctctctgaattctcccccagtacctgcttttgcccctacccttgccttctgcttttcccaaatggccacctcagcttatctgcccattggctgatctctgcaatgatcacatctgggaacacctttaataacaatgataacagggccaggcacgatggctcacacctataaccccagcactttgggaagccgaggcgggtggatcacttgagtccaggaattcgagaccagcttggtcaacatggtgaaaccccatctctattaaaaatacaaacattagccaggcatggtggcaggcacctgtaatcccagctactcgggaggctgaagcgggagaatcgcttgaacccgagaggcagaggttgcagtgagctgagatggtgccactgcattctagcctgagtgacagagcaagactccatctcaaaaaataaaataaaataaaaataatgacaatagggccaggggcggtgactcacacctgtaatcccagcacttcaggaggctgagtggggaggatcacttgagcccaggcggttgaagctacagtgagctatgactgtgccatggcactccagcctggaaatcagaatgagaccttgtctctaattatatatatatatatatatatatatatatatatatatatatatatatatatatatatatatatatatataatgataatagcaaggaaaacaaaaaacagctcctatttatcgaacacttcccatgtgatgtgccagatgcttttgcgatttgatctttctgtcctacaaggcagacggatataacagccccactttatagatgagggagctgagaggttaagtaaatgttccaaagctgcactagctccactagcaagtggcagaactggattcaaacccaattagttctgacttctgagcccaaggtttttgctccaggcttcggatgtgctgtagagagcggggtttactttgtgttggctccatcagccccttgaaagctcagggtcatggcttctgtagggggctctctctctttagtactcagggttgaagagacccttgggccactcagggggccccagagtcctgctggagacccagggaagctgtctcagtcccaaatgaacctggtcatgtgtcagctccctgtccacacggctgagggcaaactttctcagagctcagctctggctctgctgcaggatgtgagttggggggttctggttctctgagttcttgaggagggtctggatgagggtggggtttctattctgatctctgttctggttcctcttactcattcaaccctggctgctgcccaaacacaggcagcctctgccctggggctggagccacaatgtggcaggtggagggatgggaggtggactattggagccagacagctgcttcctatccctgccatgcacatgcacacacacagtgaggaaggggcagggcacgtgagctctggaaggagggagggccaccaggggctcattagggtgagtatgggcacatttgtgtctttgtgagtgtgcacgctggagattgggagtgtgctcgtctgtggctgtgtgtgggtgtgtgcctgtgaggtggggtccaggctgagtatgagagtgtaaacatgtgggtctttgaaataatgagtatgacagagcagtgcactagtgtgaccatgtggggtgtgactgcttacaagtgtatgattgtgtgagcgcacaaacacgcatgggaaagacagttgctgtctcttagaggaaaaatcccagaactccaacggccaacgtctgctctgctgttgaccagctctgtggctttgagcacatgacttctctgagtctacatgtcgctacctgcaaatggggaggaaactgtctcacagggtaatcatgaggacgaggtgcaggtgtgggtggagcactttgtcatctgtcaaatgtaggtccctgggaaggtcaataagcaatctccatcctctgcctctctcccccacttgcacccccacaacatgctcaggccccagccaagtgccaagctggggtgggtggtgtcccagagctgcaggctacatggccagaggtccaggctcaggaggactggttagggatggtgagagtgagcaggtgtggtgccatacctgtctactccagcttcacatgtttgacccaaggctgccctgccccaccggcaccagcccatcagcactcattattctcctctggatctgaggggattctcctctatctcaccccagcccagcatgctgtggcttctgctgcctcctccctctggggaggtgaaggcccccccagtaggaggctctcacttcaggttccccttctgaccttctgaaggccattccccactaagatcccagggtcttcagccctgtttcacttccattcccagcctcccctgagcttcctcaaatgattctggggcacctagtccatgcacctacatttggaaatcatctacttagcacagtggttctcaaccgtggctgcacatcagacaggaatcacccagggaagacttgaaagatcctgatgctgaggctgcccccagaccagaatttctgggttggtactcaggcattattacaggtttaggcacggaatggtgggtcatgcctgtaatcccaacactttgggaggccaaggcaggaggactacttgaggccaggagttcaagaccagcctgggcaacatggcgagaccgcctctctacctaaaaaagaaaaaaagaaaaaaagaaaaaagaaaaaaaaattgttgggcatggtggtgcacaccagcagtcctagctacttgggaggctgaggcaggagattacttgagcccaagagtttgaggctaccgttagctataatcacgccactgcactccagatagtctctaaaaaagcaaataaaatgacaaaataaaataaatataggtttaaagctctcccaggtgattctaatgtgcagccaagcttgagaaccactgctgatgtttcccaagcatccttgctgagaagaatcacttgggacgcttcaagtattgaagtgtattcaggtattgaaatgtattgtgttaaatacacagcttcccaggctccctcccctggaaattgtcattgggtgagtctaagatagggccctgtaatttgcatttttaataaataccacagatgattctaattattagggaattttggagctactagcctagagctgtgtttctcaaactttaatgcgcatccaaatcacgaggggatcttgttaaaatgcagattccggttgactagttctggggtgagagcctgaggagttatagaagttctggccaatcggagcataaattaagagatggtgaataataagacaagaccagagaagaaggcagggaccttataaactgtgacaaggagctcaaacttgatgccatggcaatgaggagccaccagagggttttaaacagagggaaagcttgttcagatacatattttagaaaggtgtattattgtggccatgtgggagatgatggatcatgcatcagaggatcagacatcagccaggaggctgttgccacattccaggtgaaaggtggtggcctgggctaatgaggtgggtgcagagggagagaagttagtagtcttgtggaagactcagtgatcagttgggtggaggctgagggggaagatgagggaggctccagagtaacccctgagctggctactgacttggcaactggtgaagaggcgtgcccatcttggttggctctgaagcttccttccacatctactgactctatggtctgatcattgtttggcttagcttcttgtgggaccagggtgggagagaggctacaggaagctgcctgaaatgcgttatggaactggtgccttggagagcccttctccttgactttgagtgactctggaggctccctgtcagcagttgccaaggcttagaggctgctttggggattcggtcttctgcataccttggctctccatttttttcctctctggctcccttccagagaaggaagcccagatgaagagaaatctgcatccaaatggcacccttgctcttggatcccatctggtgactctccttgtgaaccctaagtgccccctaaagacctcccgcaggccatttctcctgacatctctgcttggcacaccagtcccatcctgaccttgaccacagacccctccccacattgagctctgtctacccactccaaggacacttggcctgttctcctgtttggggaccttatttttcccttttgtcagctaaatgttggctcagaatcccctaaccaagtaactgctttgcagttcccaggctgctctgtcacatctctctctggtatagctctttctacggtgcaagtgtgcagtaagactgagattcaagtcacactcactaggctgggagggccattctgtaatcaattgccatcatcttgagcatctggtgagagctaatagtatgttgggcaccaaactaaggactttatatgtattatctcagtgtatgttcacatctccaagagatagattgtgcagtggtgcgatctcggctcacccgcaacctccccctcccaggctcaagccattctcctgctcagcctcctgagaagctgggattacaggcacactccactactgcctggctaatttttgtatttttaatagagatggggtttcgctatgttggccaggatgatctcaaactcctgacctcaaatgatctacctgccccagcctcccaaagtgctgggattccaggcgtgagccactgtgactggccaggttctcctattcttattttacagatgaagaaataggcaaagatgttaaataacttgcccaaggtcactcagctaggaattgggactggagcctcgtgcatcttcaccactgaactgcactgcctgtcatagtcctcatcagcaaccaaggctcagttaagtcctctgcctaggatcagcctcactggatttttcccagagaaaatgtcaggccagggctaaggctcatacccagaaagctgagggagggagcagatggtaaccccagggggattttgccacagtggagttagggataggaggtcaaaaggactgcagttgagtcttgctctgcctcttgttatctgagtgaacgtggccaagtctgacctctctgaacttcagtttcctcatctgtgacatggggatggcagtagaagctacctctcagaggttatgaggaacaaatgaggaaatgtgcaaggcaggattgtatcaactgcaaagagctgcctgatgtaagtgactgttagtgccagcagtcactcaatatttatcatgaattactaggaccgaatccaggtgctgtgagtacagccatgagcccctgggcctggacttgtccctaagatgacaaattgcaagtcaaacaagaatacagtcaccttgccactctccgccttccatgggccttttgtgatctttctgaagctatgacttgggccctggccatctttccttacctgtgtaaactgaaggtctttagccctctaacagtctagacagcccccaattttaacattccaggggtggaatgggaggcgggtccttgtgacatttgctaaagcagaattgctgccaaaaaggggcctctttcttcatgcaatgaataaaaatcttagtgcctcgtgtttgtgtatgtcaagactcactgctgaaacttttgttaattcatttattcaaatgaaccacatttatttaaatttactttaaatttcaaaagtaaactaaaaatgcattcttgttgtaagaaatacagatgaaataatccttccaattccagaatcatctgcagaggtcactgctgtggtcaattcactgtgtatccttctagatcatttcctacgcatttacctacatgtatatattattcaaggagaaacatacgatttttttgttgggtttttacctttgtacctgagtatttttgtttttctgcaatttgcttttccagtgagcggtggctcacgcttgtaatcccagcactttgggaggccgacgcaggcggatcatggggtctggagtttgagaccagcctggccaacacagtgaaacaccgtctctactaaaaatacaaaaattagctaggtatggtagcgggtgcctgtaatcctagctactcgggaggctgaggcaggagaatcacttgaacctgggaggtggaggttgcagtgagctgagatcgtgccactgcgctccagcctgggtgacagagctagactccatctcaaaaaaaaatgtatctatctatctatatatatggcttggaatgaaaatatggcatgcacattttcccatatcagaacatggaggtctacctcattatttttaattgcttcaccttaagtattccatagatgggggtgccactgtttattcacccattcccactggtggactgttaggttgcttctgatttttcattgttgtaaatttgcttagtgaactctctggtatgtggttctgtgggcagacatggctattttgttaggataatggatatctagaaatagagttggtcaaatgaagatgggtattgttaattttaatagaaactgccaaaatacctatcaagaagactgaaccaattcagggcacttccaagagaggatgagaagaccaacttacgtacacactctctcccatgctggatactgtcagtacgttgaatttttgctaatccaatggatgaagctaaaacaaatcttatgtctattttaatttgtagttctcaaattatgattgcatttctctcatgttgagcatattttcctaagttcattggacattgtgtttttatttctgtaagtcacctcttcatatactttgcccattttatttttatttttatctttggagacaaagtctcactctgtcatgcatgctagaatgcagtgggcgatccgggctcactgcaacccctgcctcccaagttcaagagcttctcctgcctcagcctcccgagtagcttgggttaaaggtgcctgccaccacacccagctaatttttgtatttttagtagagacagggtttcgccatgttggccaggctggtcttgaactcctgactttaggtgatccacctgcctcagcttcccaaagtgctgggatttcaggggtgagccaccgtgcccagttgcctattttaaaaactggggtttcaaaaatatttttcttattaatgtgttggaaattcttaattctggttattaatatgtgttgtattttggctgagtgcagtgtctcatgcttgtaatcctagtactttgggaggccgaggaaggaggattgcttgaggccaggagtttgagaccagcctgggcaacatgcaagactcccatctttacacaatataaaataaacaatttagccaagcatggtggcatgtgtgcctgtagtcccagctactctggagactgaggtgggaggattgcttgagcccaggagttcgaggctgcagtgagctatgatcttgccactgccctccagcctgggtgacagaccaaacacacacacacacaattttattttaatttaatttctttttctttagagatggtgtctcctcctcttgcccatgctggagtacagtggcatcatcagggttcactgcagccttgacctcctgggctaaagcaatcctcccatgtcacccttcaagtagcggggactacagtcacgctgggcatctttccagtacaccctgtgtcatcatataaatgatccgtttccttagcaagcaacctcttcccaactacaatgtccattggagggccaggcacggtggctcacgcctgtaatcccagcactttgggaggctgaggtgggcagatcacctgaggctgggagttcgagaccagcctagccaatatggtgaaagtccatctctactaaaaatacaaaaaaattagatgggtgtggtggcacacgcctgtagtcccagctactcaagaggctgaggcaggagaatcacttgaacccaggaagtggaggttgcagtgagccgagatcatgccactgcactccagcctgcacaacaagagcgaaactccatctcaaaaataaaacaaaataaatataaaataaaataaaataaaataaaataaaataaaataaaataaaatgtcagctgggggacagggactgtgtcctcctcatttttgtctcccttgcaccaacacagagccagcacccctgggtgaatgcgcatacaccttcccgtgccaggcacatgcccacacttccctatgctcaggctggtgtgtggggggggtgtctctgggtaagcacgtgcatgacaagtgttgagactgcacatcgacatagcccacatgcttgcgtctcagtgtggccatatgcatgcagctagcacacctgtgcttgtgggcatgggaatacacatgtgtctgcctttcttcccttgacagttttctgccctctacttccttgggtcagaaaaagcaggaactttttctcttggcaggaggaatatttattaacagggataaagtgaggatactgcaatccttgtagtttctcctggggaagcctcattctttctgaggcctctgcccgccttctttgctctcttctcccctcctttttctatttcacatctttttccttccccacttcgggaggaagctcatctaagctcagcctttgctgacaaggccatttgggcccattagttgcctctaatgagtgactgccttctcggccccttcccccacagcaactgggaggcagggatcaattagctgctgccgtaaacacacacacacacacacaaacacacacacacacccttacatgtgtatttatgcttccacatgtatatgtacacgtcacatactatatatgatcataaatacactcatagcaaatacacatacatcttctcttcttgaccagtaatatctcctaggggtctctactctgctccttgctctgttcaccaagaagaacacccatggccaaccccacactccccagctcaaacccagattcccacgattcgaaatgaagttcaactctcatgttttacaggtggccaaattgaagctcagagtagggaggtgacttgtccaaaatccctcagtcagttagaagccaagctgagcttatgctcagtcctatgccctctgatgcccagtgcagtgctactgcatccgagagagaagcggggtgtcccatgcaggcccaccttgatcacaacagagctgtggcgcttcaaaggtagcatgtctaggttagggtgtgcaggcatgatccttaaggtgatagggactggggaggctctgccatgaaccaaggagggagagggtgggctttcagggaggcctgccttgtcccctgggttggcctggcctggaaattgtggagagaggagtccaatctcagtctccctctggcttctgcaagtctcaccgtggctgtctctccctccaccgagtactgacctcaggaatccctgattcctggcaagctccctcttggccagataggaagggggcacctcactgagtaccctgttccaaagtgtcctctgggggaagataggttccatcctggccttggccctggcctgttctccagattccacactaggacgggaggtgtgaggactgggtccaggcctgaggcacgcaagacccagcaaagtcctgcatgaccagcctaggccacctgggtcagaatgccgtggcaccactgtggccagccacttggagacattcgtaacaaatacacatacatcctcagcagctgggtttatggctgagtcttagcaattttgtctcctaaggtcccagccctgccagggacccaggccctgaatggaagagctgaggacgggtctgagcggcccttggggaaacttacccaggaggggtcacagcaggggcaggggcttccagagccccctttcaccccagaagctggaaatgatactcttcttgcccccgctcagtccctctcccagaggcggatgttgttggggggctgcagttctcatctacaggcccctcttctccctgggagccccagaccccgcctcctctccctatcctgagtccctggctggagctactgtggagactgaggcctgttacctgccactctccatagccctcaaggccgcagtgaagcctgccgggggcttgagggggcatcctgggagcccatcccttggctgatctgggtctcagtcaagtccccaggcctgctccctggcctccccctcagcagggcttagctcagcaagtcctcccttagattaagtttccaaagggaatgtccttttccagcgcggccctcgccctaccctgaaaggctcagagcagcagagtcttggctctaggggtgttgagccagcaggtgccaacaggggatggaggaggcaatgggccctggggcaagggcagtgggggacatgggctccaggtcgggaagacttgggctgaaatcctaacttccatttagtacctgagtggccttggagagctatgccacttttttcctagagagcttgttaaaatacagtaccgggccggcgcggtggctcacgcctgtaatcccagtattttgggggccgaggcaggcggatcacctgatgtcaggagtccaagaccagcctggccaacatggcgaaaccccatctctactaaaagtacaaaaattagccgggtgtggtggcacatgcctgtaatcccagctactcgggaggctgaggcaggagaatggcttgaaccctggaggcggaggttgcagtgagccaagatcacaccactgcactccagcctgtggatggagcgagactccatctcaaaaaaaaataaaaataaaacgcagtaccccactcttaagagttttgttttttttttttttttgagatggagtcttgctcttcgaccaggctggaatgcagtggcacgatctcggctcactgcaacctctgcctcctgagttcaagcaagtctctgcctcagcctcctgagtgagtagctgggattacaggtgcctgccaccacgcccggctgatttttgtattttttagtagagatggggtttcaccatcttggccaggctggtcttgaactcctgacctcgtgatccacctgcctcaggctcccaaagtgctggaattacaggcataagccaccgtgcccggccagagatttcttaatgtgtaaaatgaggagaacaaggggttctccacaaagacttcctcgcaagaatgagaagccatgtataatctctattactgtttacttacgtgtgcactgacaatttttggaagggcatacctccagaaatgggaataacaggaggaaggagggagccttttacttttcactttattctcttttgtcctgttttaattttactatgaagcatgctttatttttatttaaagaaaggaagggaaagaaaagaaaagatgaaccgctcccagccaaatagctgagccccagttgagtcagtaaacgtagtcttaattgttatctgttaaatagttaacaacccatccttcactgggcattgtttctgggtgtgaaagtgatttgtaaataaattgctgtataaatgttagttatgataaacaactaggtaatgatgtatttctatgcacaattatgtatgtgaggtggcctgtcctaaatatgagtggctgtgtatatccttcaggggaattatgcaaatattgtaaagcggtggtgaagagcacgctgtcagtagccatgctgcctgggtttgaatcctgaattcagtatctactggagatatgatcttgggcaagttacttagcctctttgtgtctcagtcattctgtctttaatatggggacaattaggccaggtgtctcacacctgtaatcctagcactttgggaggctgaggcaggaggacagcttgagcccaggagtttgagaccagcctggacaagatagtgagaccccatctccacagaacaaaaataaataaataaataaaaacaatggggataattagccaggcatggtggggcaccactgcactccagtctgggtgacagagcaagctgcccgcctctctaaaataaaaaaataaaaaataaaaaaataaaatggggataatacctactccataggattgctgtgaaggttaaagtgaactaagtcatgtaaaactcttagaacatcccccagcacatggtaggtgttcaacaaatgttttttattttgtgtatctacgtgagcatgttaatgtttctcatccctttaacaggaggagcaggtggccagacacggtggctcacgcctgtaaccccagtactttgggaatccaagtggggaggatcacttgaagccaggagttaataataataataataataataataataataataataataaaaggaggaacattgtctgacccttcccccattagaggggctttgtggctctgtccatcctttcagtctgtttgtagacacttaactttggtaactgcgagcatctggagtgcttgaggaagctgggcttgctcagagctcccatcctaacagggagccctgggagtggaggagagacacacatctagcttgcatcccaccatcgatgcttccaggacacttctgggggtggcaatatacccattgtgcccctgggtcactcagataaaatatcagctgagccaggagggaaccactgagggtgggggtggagaaaagtaggtcactctcagaggccatccaagagccaggggcagggaggggcaaggcgggggcgggagcagtttataagggaggctctgcaagctt

SEQ ID NO: 67 - DNA, 179666 bp, Homo sapiens
gaattctgcagaggagtgggcaaaagaatatggaggaaccaatttattaaccccatagaagccccaaggtttccagtgcctgtgggactccattcagcctggactctgcaagactggcttctctccctccatgtaaagtcgagcagggggatgggattgtctgggtgggagatgggctgaagaaacagatctttggaaggcctggagtctttgcttgcactaaatgagcagaaccttcagttccagggaggtgcccctagccatccctgagccttccgccctggggtgggttgtactgtcccctccacacagcagcctgatgtcctggcttgtcttggggtgtcacctccagaagaagccaagcacaaacgttcacagagatccactgagctcctgagctgccaagggacacctgcatggaggtgccaggccatgcgctggagacagcccgtaagtgagaaaaactcgcttccctccagcctcactgtgcccaggccgctctgtgccctgcggcaagctggtggggggcggggggagggcttgttagtaaatgacccagaagcgccccaccccacaccccaccacaaggacttgtccgggccgggccgggctagatgccgagatgtaattcaccagatttgtgaaaagacgagaaatctgctctcattttgaagcgcagccccgccggcatccaggaggccgaatataaacctcttccggagggcagggacatcttgcaccgtcgccctccaaatctggccctctagggtgtggaagggcgcggcaggggtgcagggaaaaacacacagcccgtagccatctgtttggctctgacgagtccccagactcgagcctccagtcagctcggactccagaccagggctccgcgaggggtggtgcgactctaaccccacggtcgccacagcagctggagaattcggccaaacctgactctttctccaggggcgagggctccgccagaccgcgtggacaaggaaccggccccgccgcgctttcctggactgcggaggcggcctgagtggtggtgtccccgtccctggcagagaggggctgtctcttgattcctgagcttcagggccacatgtctcaggcgggttgagcctcgatgatgtctgccgtggggttcgcttgtggacgatcccttcctgggaccccagacccgggccacggcctccaggacgcctgggtcttgcaccccttgcttttcccgacgggctcccggagtctcatttctagaatgaggtgggagacctcgtgactacgcggaggccgccccagggctccgagggcaccgcacagggcaccaggcccttcccagctcaacccgggcccgtcgcggtagtgaattggcgcctgacgattgcgcggcagaggctggcgagcagcgctgggctgaagccgacccggcaccgcgcggcgcccggatccggagctgccagcagcagaagggcaggcgctaggaaaagcgtgaaaagggctgggtcctttgggtcaggatttgccctgcgaccggaggatggggcgcacgattccaaggcgcggacttcgaaggcgagaacctggaaggggaaacacacactccccctgccatccccctggagttctcttgcccagctcgcagcctccctgaaggatcggggcaagggcaaggccacgagagctcaggtgctgttaatttccgttgaggagaagcaccctggggtccctgtcacttggaaattccctgtggcagtgctgtaagcttcatcacagtcggccctgcaactccctctgcacatctttggaatctccaggagttatggggcggggcgaggagctaacccagccctggctcctcctccccagggagccgaaacttctatacttctctgactttatggtccttggaggcagggtaggggttcaggggactgattcctttggatttctgggcgactggtctggcaagtcaataaccaccccagttgtcctgacaaacgggtctgctttgtgatcagagtccataaaatgggcctgtaggaaacagtgtcccctccaaccaatacggagccagaagccctctcctctgtataaggtttagagagtgcttctccaccctggactgcagggaatactctcctcccttgagtctttgattttctgcagtccctcagtgtgtggagtctgagtccagctaacccgagaagaaaaatgcactgattccagggatattcggtagtttacaggatcaataggaaggctgaggaattaaggaacatcagtttcaggaaacacaggaatgcttcgttaaggcactgctgctagcaccacatgctgctagactccggcatgaacatcactgagagtaatttcccaacttttcctccatcttcacttcactccctcaagattcaaaactcatggagtatcatttaacgacactaagagtaggacatgtgtccaggcactagttgtcagagatgggagggaagagcatagtcccttagacttccatattaaaagctaaaactgttccaccaatatttaccctgtttgaggacagtctccctatcaggaagtgttcagatgctaggttaaaaaagggtggggggacccactcgaggggacccacccctttggctgcccaatattcacatatgcctttcttcctaaatttacaggcttttcctccacaaaatgctcccacctaacatgttactgtcactcatgacagaaaatatattcaactttcctgacaatccaaagcctcatagctctaagttcaatacctttgttctcttccttctctagttctgttggaatctggtctcaatattgtgcaacttgtggattagactaaattgtaaagctaataatcatcacacataataatatagtagtggccaggcatggtggctcatgcttgtaatcccagcactttgggaggctgaggcaggcggatcatttgaggacaggagttcgagaccagcctggtgaacatggtgaaatcctgtctctacttaaaataaaaaaaaaaaattaaccgaatgtggtggcagttgcctgtaatcccagctactcgggaggctgaggcaggagaattgcttgaacccaggaggcggaggttgcagtgagctgagatcatgccattgcaatccagcctgggcaacaagagtgaaactccatctcaaaaaaaaaatagtaataataataataataataatacaattacaagggaataagaatggaagaaaatgcatgaagttaaaatatagactgtctaatatgacaacaggtcaggacgtaaaaaccattgtctttttttttgcatatttcgtattcatgacattcctcctcccttttccattctgtttcttttgccttcaggcagcacctgggctggtttgggttctttatcctggagagagccaagcctttgttcctgagggatctgagcccttgatggtcctgcctagaaagggctgtcgtggtcttccattaacttttacccctggacataacagcactacaagggaccccaagggagccctgtgattccatgaatactcctttttgccccattgtataggaaaacattctacttgaacttgctaccgctctagccaattccatagtctcctttaaccttgctcatccattgacaggagcaaccagaagtgaccaggtaagaatttatgctcccatttcagtgaaaacattgtttctcttggtgggaactttcttctcttggggactctaactctaatatagtagaaacaagagtcacagaaagtgagggtgtcactggggacttgtagaaggtattgccctctctttttggggtcatacaatcaggctatgggggaaatagcagcaaatattaagtaccagctcatagcatatgtttcatcctgaagtactgcaccacactaccgtaaaggacaaaccaggctgttctaataacacagaatacagtggctcaaacaagatataaattattttttctcttgcatctaggaaagacagatagctctgctctgtgaaggcatcgggaggcccaggctagtgaggaagctttgccattctccgcagccaccttccaaacttgtgtcaatccttgacagaggaaggaaagggggcagcaactccaaggcaagctctttaagaagatgactgcaaagttgtgcatatttcacttacattcctttgagaagagctagctgcaagggaggctgggaaatgtaggctctaggtgaatctagtggatattagcccattgttaaaactgcaaaatgtattcttgtcaacagcaatgttgtgtggaaaactagacaattataaggccttgaatgaatgtattagctgaagcttgacgctcagaaaaggcatatacaagcctaccaccagatacctcattggtgccgctggcgttatggtatagaggcaccagtgaggtatcttgtggtaagtttctacacagtaggggccttgaagctgatcccagttgctggcaaattggttaattttgcagtaagcttagacttgggagatgttgagtttatgcacagctttctttcttcttgatcttgggcccatttatttaagagcacattgagcaggacttgcagtgcccgggaaggagactgactgagatccagagtaggttatcttgtccacttgattttgaaaaaccatttatttatttattttttgagatgaggtctcactcttcacctaggctggagtgcagtggcaggatcatggctcactgcagcctcaacctcctgggcttaagcaatcctcccacctcagcctcccaagtagctgggactacagttgcacaccaccacacccgccttttttttctggtagagataaagtttgccatgttgccccaactcctgggctcaagtgatctgcccaccttggcctcccaaagtgctaggattacaagcctgagccactgtgcctggctgaaaaaccttttaaatcaggtatttttggtgatcattttcataaaacacaaatatttttacaatctatgtccatcccaaaagattattctttatactttttcccaccatgtcctttacccagacctgtggcctgcagtgaacagtctactaaagcactttttaggggttctgttattgccttgaccaaagtatttttcaagttttttgagaaggagacatcttctgggatcctttccagagacattgtggctgggtgaagtggcccatgataaatcctctccagtgttcctgtcttcagaaattttcagccaggcatggtggctcatgcctgtaatcccagcactttgggaagtcgaggtaggtggatcacaaggtcaggagttcaagaccagcctggccaacatggtgaaaccccatctctactaaaaatacaaaaatctgcctggcatggtggtgcatatctctaatccaatctactcgggaggctgaggcaggagaattgcttgaacccaggaggcggaggttgcagtgagctgagatcgcgccactgcactccagcctgggggacaagactccgtttctgaaaaaaataaaaaacaaaaaacaaacaaacaaacaaaaacttttcaggttcctttcagggtatactgtttctgacattgtaactttagatcaggctgattttaatgatgtaagggcacttatcaaagactctgaagttggtgttttagtttgagcacatgggagtccaggtttctttcatttatctgctccttcaaacagaaccacctccagatgctagaaccaatcttagactctttggcaggtgctcctacatatgaaattcagtgaaaattaaactttgtcgccttccccgttcctgttttaaagacctgaattgttttgatatgggggacttttcttctcaggcttgcttttccagttggcacgctgggatttggtaagtctgaagaacatgttgggttggagggtggggcatgaggataaatgatgtccccttgcaagggcactccagaaaaagtcacagccttatcagacaagcgaagagcattgtccgacatggggagaagttgcataagcttgtaagggaagctcagtgacaggggggcctgagttagtctgaatcttctggacatcccttatatatccccagcccaactctcgaggtcctgcttttttctaatccatgttctaatttgataggactgtgatttgtctaacattaagagccattagggtcagatttcaagattggttttcatttacgtcagccctgatgctacaagagataaggtctagtttcagccatgattgaaagtccatgggtttaattcattactttgagctaatgtagagtttgagcttgttatccaatttctataagctgtcctatagcattagaagcagcactctaatccaagatggtctcccaaagcgtggtcctcagtggacatgtcgttttattttacctatttatttatttagagacaaagtctagctctctcaaccaggctggggtgcagtggagtgcagtagcgtgattacagctcagtaaatccttgaactcctgggctcaagggatcctcctgcctcagccttgtgtctgtagcctgggactacaggcatgcgccactacacccagctaattttttagaaaattttatttgtagaaacagagtctcaccatcttgcccaggctggtctcagactcctgggctcagactcctgcctcagcctcccgggatgctgggattaaaggcacccagccaggttttcatcctatggaataagctaccaaattcccattcttgaatcccagtagacctacagccctaactaagccaaataaccaattccaatttcccccatttctctgataatctttcacctggtatcgtttttctggtataatttttatgctagttagaattcttggcagtaagcacaaaaagtattaatcttggcttacctaaagataaaagagaaagggagttttggggaaagattttaagtagctcatagaatctaaatgccaaagaatcgctgtgcagaactgggaaggcagcaaatacagccaaggtcaaatcacaagaccatcctggctaggagtctccactggtgtctctgccactgagcactcagtgttgctggcactgtgatcccaaccccattgcccccatgttgaataatatttttggctgtccctgtgtttttgagtcatcctgggcaggatcacgcattggctcaacttgggtcatgtgtccataagctgctgctgatggggtggagagaggaaaccctgggccttttccttctgtggtggccgatgagattctccctccctccaagacacacaacgcgggagattcttcctggatggtaagggtgtttagatgtggagcggccacacacacacacacacacacacacacacacacacacacacacacagctgttcactacagttggggacttcctggctttcctttctttctccatacagcctagaacccctcacctgtcctttcatccacctcatgccccaatagaccccggtggagccacatcaccacctcacgttttctcttggtcaagtcacagagcactgctggagaaattcacacaggggcaggacaggtaaacccatggggtccagcttttgttgaacctcaccagggcttagaaacccttttaagtcaaatatcataatattaactctaaaaaccaagaacctttttgtacatggctaaaattcagaatagtaacttaatagcatctagtatccagcccacattcaaacctgttccccaaatcttgtgaaagagatctttctgtaaggcaaatataattatatcacttcattcattaaagtattatataaatattgccggactcagtggctcacacctataatcccatctctttgggaggccaaggcaggcggatcacttgaggtcaagggttcaagatcagcctggccaacatggtgaaaccctgtatctactaaaaaaaaaaaaaaaaaaaaaagaaaaacacaaaaatatagctgggcctggtggtgggtgcctgtaattccagctacttgggaggctgaggcaggagaatcacttgggaggctgaggcaggagaatcgcttcaccaggagatgaagtttgcagtgaacggagattgtgccactgcactccagcatgggtaacagagcaagactccatctcaaaaaaattattataatatataaatactgtaaaatatgcaaatgcaaacagtacaaagtggtttggagtcaaaacagggatcaccctttttccgctctcccttttattctcccctcttctttctggttcaggctgcctcccaagaagtgccaattgtttttttgtttgtttgtttgtggtttttttgacatggagtctggctctgtcgcccaggctggagtgcagtggcgcgatcttggctcactgccgcctctgcctcctggattctaagcgattctcctgccttagcctcctgcacagctggggttacagatgcccactaccatgcccagctaattttgtatttttagtagagacggggtttcatcatgttgaccaggctggtctcaaactcctgacctcaaggtgagctaccctcctcagcctcccaaattgttgggattacaggtgtgagccaccgtacccggccccagttgttaatttcatgcatttttctcccagtcatctcccagacattcacatgcatgtacatatgcaggtataaccttaacacagagtacaaagggatcaccctatacacagtctcatgtgacttgtgcctttcatttgatgacctatctttcatgtctttccatgtgagtaaagataaaaatcctttggtggcccctgtcttcctctctcacctcgagttctgtgtctacccaagtgcactgtaccctctcataactccttggccatgtacatgtcatttcctctgtctggaatagcttctcttttatgggacccatgaattcttactcatctgctgtaaaagctttcctgtgcttggggccaaattaggctttcttcccagctcccaaaatgcccattcctctcatcatacttatcatggagttgttagttagtttcaagagacagggtctcattttattgcccaggctgaagtgcagtgatgggatcatagctcactgtagccttgaactcctgggctcaagcgatcctcccgcctcagcctcctgagtagctgggtctacaggcacacaccaccacacccagctaattaaaaaaattttttttgtagagacaggatcttgcaatgttgcccaggctggttttgaattcctggcctcaagtgatccttctgcctcagcctctcaaagtgggaaggattacaggtgtgagccaccacacctggcctcttcatggaggtttttttgttttgtttttttttgtgtttttttgttgaggtggagtctcactctgtcccccaggctggagtgtagtggtgcgatcatggctcactgcaagttccacctcccgagttcacgccattctcctgcctcagcctcccgagtagctagggctacaggcgcccgccaccacgcccggctaattcatcatggagttttatgagtgctcttttttttttcctgtttgccattgaaatatgaatgcttatttacttgtcttcttctcccactaaacttcaagcttctggaggccacccgccgagttataaccagctttgtcccagcgtctacctcagggcaaagtcagagtggttcttaatcaaggatttttgtggtggctcacgcctgtaatctcatcacttcaggaggctgaggtgggaggatcacttgagctcaggagttcgagaccagcctgggccatgtagcgagatcccatctctacaaaaaaaatttttttaaatagccaagcatggtggcacatgcctgtagtcccaactacttgggaggctgaggtgggaggatcacttgagctcaggaggtcaaggctgcaatgagctgtgactacaccactgcactccagcctgggtgacagagtaagatcctgtctctcaaataataataaataaataaatagttgttactgggctccttctatcatccacagagatcaaggtcatcttggggggttagaaatgtagggacatagccctcctcacattatttggtcatcaggacaccaggagacaagacttggaaaaaacctgaagtctgagattctccaaagctgactgacattaagggagatcctctgagctaaaatgagccaagactctctccactgggacctgttggatgaggaaaggaatgttgacaagtaaagtgagggacaaggataataatgaccccaagcccaccagcctggccttggcatttcaggggcaggcagtgagaattactgaacactagttttacctggaaaacaaggtcacattaaaaaaattatatagagagaaattttttgttttccaactgctccctgcagagcaaggctaccctataggcagtgtgcccagagttgccacacggtcatatttgggccaaaacaggtaagacacctctacggtagatggggtagggaagctccttcctcttgagacagtcaggctggggctggggaagatgggggtggtggtgggtgtggctagctgggctgagttgatggaattctggaaaggaggatagatagaacctccactattgcttggaatgtgcaggaaataccgtgaattggtccactcagcattcatccaaccttcttctggtatgcattcctgtactgcaggggctagaaagctaaaaattacattccccagacttccttgcagctagagtgccagatgtgacttttaggttgcactcataagacatatttatgcaaggcttagattcagggctcagttaactggagagaggagtacagcacgaagcatcatttaatacatggtaacataccccttcctgtctagctacatggtctctgctgccttcactgaaaccctcactgatacatggggtagctccttagccacctcctcctcctttcatggggtattttccaggtttgtctgcagtggcttctttttgctgctcttgagtgtggaagttccctcctctatggggagagctctgggaagcctcaatttggtttttgtctggctcagccaccctcacgactcccacatctgtgttcaccttcattcctgccatgttccatccaagctgtggacatctggtcacagagacttccttgactgagggatgccctgtccttgcaagtctgggtccacgtggggagttgtgacggaagtactgtatttttgctaagttcttttttttggtacagatggggtcttgctacattgcccaggctgctcttcaacacctggcctcaagggatcctcttaccttggcctcccaaagtgatgggattacaggcatgagccaccacactcagtcctatttttgctaagttctgagagtcagtatggtgggtggaagtcaggccgacttcactcagctggcctgggtccactcctaactcttctgcctagtgactgtctggccttggacaagtgacttgcctttctgtgcctcagtttcctcatcagtaaaatagtgaccgtaaataataataacataatgatagaattatataaatatgtaataataataataaaacggtgcagattgttgtaaaagttggtattgcatgtaggttcttgctatcagggtagccacagacttcgatgggtctggtgagggaatgtctcaggattttcccccgtttctgttcctggggtctgaccggaggatccccaggcctcccaagtagtgaattatcctccttaccccctcatttctacactctcagattttccttgtctggaacattttaagcaaactgatgctttgacaaatacttcctgaatgcctactacgtgccaggcattgtactgagtaccaaggatgcaattcaaattaataaaatcaagcttttgtccacctgccagccaccatattacacgaagatgctggaagggtttcatggatttggacggtatgatggtgtaaccgaaaacagttatatgacatgaataaaactcattttgggggatccctggggagataccttaaagagatgggaagtcatcctccagagtgacccaaactgacatacgacaggtctgtatgtccacccatggggcatgttatgtctcacctacagaggggcagtagatagagaaagcaacagtggcttaaaatgcaaaccccaaaccaaaagttgtaagggaagctgcgctgctttgcaggtgctgatttgctatctagcagcttttcaagggaacttctatgtgtggagctccagggtgattgacaccaggattagggttctggtgaaggccactagtgatgaataagatttggtcttccaagaattcgggaaaggaacacccttccattatctcctgctgcatagcaaatcactctaaaagttagcagcttaaaacaacaaacatttattttctcacagtgtctgtgagtcaggaatcttggggccgcctagctgggtgtctctgcctccagatctctcaaggatatgatcaaggtttcaactgggactgcagtttcatctaaggcttgactaaggaagcatctacttccaagttcatttacatggttgctagcaggattcagtttctcagtttctcactggccgtgagctggtggcctcacccagttccttgccatgtgaatctcccaatagggcagctcacaacatggcaaatgcttcagagcatgtactcaagagaggctgagaaaacaagcaagatagaagtcctgtctttaagtcacctaatctccaaagtcacatcttatcacttctgccattcattctcagcaagtctctgggtacagcccacgctcgagtggaggagatttcacaagggcttgggaattccacagcaaccaggggtcacggggggtcatctcagagactgcctaccacacccctcacctatgggagccccagcagcaggggcaactccttcctttccccatctccacccccactttctcccctaggactctgcccaggcaagccacagcctggctgcctttcccgagtgaggatccaggacagcctcagaagcacattagtctcagaagacagagacccagaactcagaagccccgcctcatggaatgcatagatgtactgggtctggccattgtccttagctaacagacatgctaggtatggaggagaacctggggccagactagagcctggggacattgtctgtcttagtgaggaaggagacaggactcaactctggaggcagggcttggacactggaccaaattgaggactagctaaaacagggtcagggcagaagcacctttccataagacacacccaccagtgttgccatggcaacacccagaagttaccacctctttctgtagcaaccacccagtgacccagaagttaacattctttttctagaaatttctgcagaactcaccacttaatttgcatatagttaaaagcggggacaaatatgactgcagagctgcctctgagctgccactctgggcacactgcctatggggtagccatggtctgcaaggggcagtacctctcctgctgctgtacgttgccatctcaataacagttgctgtctaatgctatctaacactactggctcacccttgaattctttgctctgcaaagccaagaaccctcctaggctaagccccaagtttggggttcacatgccttgcatcactagggctggtcagtgggacaaggccacaccagaccataaatccaactcacggtctttcccaaatgggcagaggctgcagggttggccctcctgaagggctggccctgccccacttggctgagtttaagacccccttgccttggtgctggtaagagcatcactgtcttacttgcaaagaggagggtgtctgggaacttccagaggcctgtggagctggaaaatactaacagaatggtcttggtaattttctctggaggtagcctcatcacattttggtggacccatttctccatctgtattcctcccttcatttttgtttttgtttttcagattctcatttctctgactcctcttgattttacactctaaagctgagggcacagggtaccccccaaattgggcctccactctctagtcagggatggtgggatttgggtggacttttcacctctgctttcaagatcttaggtaaagggggggtcttgaggccagcagaggcaggcaacctgggccttcccacactgcacccacagagatccacagaatgcacccccccatgctgcacctgttgctagcatctctgaacgggccttccagaagctacccaagaggacgctgacaggacagaagatggctgcacagagcaagagacggggagggcacagggcagtatgaagaacagcgtggtctatgtgagtcccagcacccaaggtcagagcccttccctgggcccactctccatctctgccaagtgcacactcctgcagggaggggctgtgctattcatctctgtgtcctcagagcctgcatctacgaatgggcaaaaaaatgagcaaaccaacaaggtttagcacatacgaggctttggtccagatatacatgcatgtgtgtcaaaggacctgtgtaaaaacatattcatttggagcattcgttgtaaagattagaaacaacttaatatttataaagatatttgccaagattggaaacaatttaaatgtctatgagtagaggactgggaaaattcatgaagataaatccatcagtgtgatcgtgtgcagccatgaaaaggatgagtccacactgatgtgaacaaactctgagatactgttgatgtgctggcaatgtggctcatgcctgtgttgatgcttccaacactttgggaggctgaggcaggaggatagcttgagcccaggagttcaagaccagcctgggcaacttggtaaaccactgtctctacaaaaaatacaaaaactaaatgggcatggtggtgcacacctgtaatcccagctactcaggaggttgaggtgggaggatcacctgagcccgggagttgtcgaggctgaagtgagctgtgattgtgcctctgcactcctgcctgggcaacagagtgaggctctgtctcgaaaaaaaaaaaaaaaaaaaaaaaagaatgagatgcagaacagggtgtgttggtatgttggtggggggagaatatgtatgtctgtttgtatagaatatctctgcagggacacccaagaaaatgacggcattttctgggaggaaaatagggtgcctaagagagggggtggaaggaaggcttactcattactgttttgaatggcttgaattttgaattgcatgaatatattatttattcaaaaaagcttaagagcacacatttggaactgcagacttggactgccatcccagccctgccacatccatcttcctctgtaacgatgactgctggacgtcttcccagcgccctgagaggatgcagaagttgcttctgtagcacttggggagctggagttttgttggtactgctgccatctccaccagatgatgaatggggagaaacctctggctgggagaggccaaggtcactcattaaaacctcacagaaggtaacacactgagagacagacagtgtgacccctgaccccactgacgttggccccaagtcagccagcaggttcacacaccctctcagggttcacttgctgggtgatgttatccaatggaccctctttcctgacttcagtgaccacacccaagacctgcagggactccagacagttatgtcataaaattcaccacacagggcacagaattcccccatgtttccactctctctatatcttaccagtaagggaagggcagaaatatgaaggaatataacctgtagtcatttggtattttccaagggaaactgcttgtgattgtgaggttagtgatctttgcagacattctctctaaagtgagtgtagccttgggcaatgcatgctctgggctattcatttaggtgcccctgtaaccaagctctgcatgcaggaatgctctctcattcatcatttattcatttgacaaacattcattcagccccttctctctgctaggtatgtaaaggagagccaagctgcctgaagaaacgagggtccataggtgaagacaattaaataaactcatcagactaaagtgcaacacgtgctggagagacagccaacctttgtagaagtgcaaagcacttgacccaggggctggggtcagcgggacgtctgggaggaagtaagctagcttcagctagcacctgacagtggagagtggaaggcaagcgccggtgaaaaggagctgttgtgaaggtgggatgtaaatggcttagccagggcccaacacattgtgtgtgctccatcggttcccagtgttcagaggaaggaattcccccagatgcctgagttcagggctgctatcaccctgaatggccacaagggggagctcgtgccctgtaattgtgtgtttcagcgcctgtgccgtgtgccgcaaggtaccagttgtttccactaaagatcggttacttgcatcttacaaagttgttaggaagcgtctcccggacatttgcagcccctgctaagcgtagtgtgttccagagcctaagtggctctgatagccttgtcctagtgttttctcgtaaagccgaggattctttcctctaaattctcgggaatagagccaattacccaagtagccaccgatcatgtccttttaatccttcctggttcttcccattccttctgggcatccacagggcccatcccctagagcagcaccaatggggttggagcactggctactgacacgtctggaccctccaggccagaaaggcttcatttctctgcacttgctaacccccagccaagcccctagtcctttccaagatgggataaaggggcattctccctcaaatgtctttcctgagttaggaatgtgctcttgtcattttgaaccccatgatctctgccccagtggcttccagaaaggatctgatggccacgtgctttggagtgagacagaccttttgtcccgtcctcactctgttgttgaccttgtgtaagccacataacctccatggctgtcatccatgaaatataaagattaaaagatctaccatcttacttgatgggatggttgaaaggaccagtgtcccaggaaaaaaaaaaatactcacaaacgaccttattcctttcctcccctcacccatggaagatctttaagtgcatactgaggctgacatacaggtaactccgaaaaggagagggatctgtttcctgacagatggcttcaagccaaagagataaacctgggttcaggcagggctggcaggaagtcaggcactccctttctaactctctccctagaggagtctggctgaggttgagaactgacaaggtcagaaaagggacaggggagggatttccagtggggaagcacagacattggagggcttctccagtcatttactgggtcaccatctgccccctcaaggaagcaggatcaagacctcccgtgtgcccagctccgtacatggcagatagagggcagcctcctgggccaagagtgaccagggccttcatcttcttggcatgggttccatcaggaacacgttacaaccaactgatgatttatccacctttagaaggggactgaggccatcccaaaggtgccctatatgaactgcagtttgcccctcagtaaaaattacttcactgagttgcaagcagtgcatggtggcacacacctgtagtctcggctactagggaggctgaggcgggacggtcacttgagcccagaagatcaagtccagcatgggcaacatggtaagatcccttctcaaaaataaaaaataaattaaaatttttaaaaaatgaatattttcattatcagacagatcaagaaacagaacatcaaagttgtagtgagctatgataatgctactgcactgcagcctgggtgacagagtgagaccctgtttagaaagagagcgagaggaaggaaggaagggagggaggaagggagggaggaaggaagggagggagggagagaggaaggaaggaagggagggaggaaggaagggagggagggaggaaggaaggaagggagggagggagggagggagggaaggaaaacattatctgcaccccaggatctctctgtatatcccttccccatcagcccctcctttctccctacatacaattatgatcttcacttatggtgaagttttccttgtttttctttatagttttactctttgcggaagcattctttttgaatatagtgtgtttgtatgttttcaaaattcctacaagaggaattatactacatatattcttttatgacttcctcctttcctttgacattgtgggatgattttattttttttattgtggaaaattagacaccacataagcttaccatgtgaaccttttttctcccagctttactgaggaataattgacaaataaaaattgtatatgtttaaggtgtacaacttgaagttttgatatatgtatatgtcaactgaagaatgaagaggttcagacatttggaaaggagtgctttatttctcatagagcattgcagcctgccagccgttctgacaggctgggaagtgtagcctctggccagaagccagaaacaggcacttcaagggtcaaggatgggaagaataagacaagaatttatgctgagtagggtggccaaatatacatattcaataagctctgggaggagtcatgaatatttacgaaaagagaaacatgtgcatgtgcaattgagcttcatggatcccatgttcaaaaaaaccggcatgatcccagggtggagtttcagctctctgatgtcaaaagatgaagcagaggacatgaaaaccctcactgtttcctccgcagactggccagaaccactctgtggtcagtggtctctgatcaggaagggatattggttggttattgtgtcagaccacagaaagtgaggggcagcgtcaggcagttagttgatatcagctggcggagtcttccaaacaggctggtttctgtttaacccttaaggaagaaaacctaatgctgattagtgagggaaggggtgtaacaaagtgtatctgacctccccgcctctcatgaaaaggaactcagtttttaagctttctctggggtccccttggccaacagggggttggccaagaggaggtctgcaggatttcatttctatttctcatatacattgtaaaataatcaccacaatcaagtttattaacatatctatcacctggcatagttaccatgtgtgagtgatgaggatacttaagatctagccccttagcacatttcaagtatacaatacagtattgttaagaatagtcacgttgctgtcattagatctccagaacttattcatcttgcaaaactcaaactttgtatcccttgaccaacattttcccatttcccccacccccagccccttgtaaccacccttctactctactgccatgaatttgactattttaaattccacatgtaggtgagatcatagcatatttttatttctgtgcttgaattatttcattagtataatgtcccccaggttcatccatgttgtcacaaatgataggctctccttctggtttaaagttaaataacattcatatatatatgtatattatattatatatatgtatatataacattttttaaaatcccatttgaaccatttttagttgtacaatttggtagcattaagtatattcacaatgttgtacaatttagtggcattaagtatattcacaatgttgtacaatcatcactatccatttccagaacttttccattatcccaaacagatactctgtacccattaaacaataattccccattctcccctcccccacctcctagtaagttccattctactttctgtcattatgaatttgcctattctaggtacctcataaaagtggaaccatgcaatgtttgtctttttgtgtctttgggaagtgtttatttcacttaatacaatgttgtcaaggttcatccatggtgtagcatgtgtcagaatttccttccttttttgggggtgggacggagtctcactttgtcaccaaggttggagtgcagtggtactatcttggctcactgcaacctccacctccagagttcaagctattctcctgcctcagcctcctgagtagctggaattacaggtgcccatcaccatgctcggctaatttttgtatttttagtagggatggggtttcatcatgttagccaggctggtcttgaactcctgaccccaagcgatctgcctgccttggcatcccaaagtgctgggattacaggcatgagccgccatgcccagtcataatttccttcctttttcaggctgaatatattccattgtatgtgtataacattttgtttgtccattcatctgttgatggacatttgagctgtttccacccttcggctattgtgaataatgctgctatgaacattggagtacacacatctatttgagtcactgctttcaattcttttggatatttatctagaagtgaaattgctggatctaatggtaattctatgtttaactttttgaggaactgcctaacttttcaaagtagctgcaccattttacattcccaccagcaatgctttctctacatccttgccaatacttattttctgttttgttttgttttaaatatagtagccatcttagttggtccaagggttatgggttattattaagctgattaacattgtttcccccaataaccaagcttgtctagcttaaaaaaaaaagtaaatatagtagtcatcctaataggtgtaaagttgtcaacattgtgttttaatattctcctatgttgtgtgtagttgccattcatttcttttcattaattgtataatattccattgaatatactatgtttattcattttattattgataaacatttccagtttggggttcagagtcctaatacacacaagcacatgcttctctaggatatgtaatgaggggaagaatcgcaggtcatggagtgaatatcttcagatcctttagctgatgccaaattattttcctaagcaataaatgagagttcccattgcttcatatccttgccaacacttgatgttgtcatactttttattgcatgagtataatattaatcatgttgggtttttttagtactagcctaattggtgggtgtgtcatgacatctcattatagctttattttgcactttccaggttattttttgagatcgagtagcttttcattgcttaattggacctggaattcctgaggctagctctatgtctggcctttgaaatcacatgagccaatcagttctcactttcatttaagccagtttgagttggatttctgtctcttgctacagaaagaattctgaatatacaaagattctggattgggtgcaccggaagatgaagccagaagttgtttcagccttgaagctggtaatcctctctgggaagaacggggatgttttcaatggactggaaggttgagtgctgctaggtcaggctcaggctctaagagtggcctctacccaagaacgtgctgctgttggggatgctgccctcacactgcagaaggtgacacccagatacccccttgccaggatccctgcagccagatccttctcctgatgccaccaggactggatgggtcctcagtcctgaactgaactgtgggtgagtgggtagagatggggaagatgtgagacacctcgtcttcctcttgctacacacatcttattggctgcaagtgtgaaatggcttttgatacatttatttgttcgtttgtttgctttttggagacagggtctttcagtgttgtccaggcttggagtgcattggcaattatagctcattgcaaccttgaactcctgggctcaaatgatcctccagcctcagtctcccaagtagcgggaactaaatgtgcatgccagcgcactgggctaattgttttatttttttgtagagatggggtcttgctttgttgaccaggctggtctcgaactcctgagctcaaatgatcctcctgcctcagcctcccaaggcgagattacagacatgagccaccacacccagccaggtgtgagtcttttcctgctagctgccttggaacccaataggtctggtagaagatgcagcttttgtgtgtggtgtctgttttggctgggctcatataaaaccttccttactatgtgacccagcaatcccattactgggtatataaccaaaggaatataaatcattctattataaagatacatgcacacgtatgcttattgcagcactattcacaatagcaaagacatggaatcaacccaaatagccaccaatgatagactggataaagaaaatgtggtacatatacaccatggaatactatgcagccataaagaggaatgagatcatgtctcttcgagggtcatggatgaagctggaagccatcatcctcagcaagctaacacaggatcagaaaaccaaatgctgcatgttctcactcataagtgggagctgaacaatgaaaacacatggacgggggagaggaacaacacatactggggcttgttgggggtgggaggagggagagcataaggataaatagctaatgcatgcagggcttaatacctaggtgatgggttgacaggtgcagcaaaccaccatggaacacgtttacctatgtaacaaacctgcacattctgcacatgtatcccagtacttaaaataaaataaaacttaaaaaaacccttcccttgctttctggcatgtgtattatccttccctgtacctccatcatcgctcatattccccctttcctccatagacacctactatcttgtatttggcatatgtccttgggtgtgcagttgtgttccacatcatgatggttcagtcaacaacagatcacatatacagtggaagtctcataagattattatgtttagacataattagatacacaaatagtaaccactgtgttaccattgcctacagtatttggcacagtcacacacggtacatgttcgtagcctagttgccataggatataccatatagtctaggtgtgtaggaggctatgccctctgggtttctgtgggtatactctatgatgcttgcacaatgacaaaatcacctaatgatgcatttctcaaaatgtatccctgtcactaagtgatgcaggattgtatatgaatctttgaaaaatataatgtgtattgtatatggaggcattttagatctctttctattccttactttttcaatactttttaagatttacccatattaatatggatacctcaaatccattgtttctaaactgctgcctatttactccgcagaataaatctatcaagttttgcttacccattctgatgatgaatacttatgatgcctctaattctctgctgtggctaacagcactgcagtgaaggaacatcatacatgtcccctcatggacctcagtttgtgttgctctgagctttataactaggaggagccatgggtatccacgtatttaatgtcacacttgggatactccgcaatctacactcctaccagcatgtatgaggtctcccatttcccacacccttgccaacacttattattacccaaccttagaacctgtgccaatcttatgaattcagaatgctattgtacagcttaaatttgacattttttctttctttacttttctttttttttttgagatggagcttcactctcgttgcccaggctggagtgcagtggcacaatctcggctcattgcaacctccgcctcccggctccaagcgattctcctgcctcagcctcctgaatagctgggattataggcacctgccaccacacccagtcaaattcaacactttctgattataagtgagcttgagcatcacttcatgtgttagtcttttgttctcttcagtaaattgttggttcatttcctttccacatttttctcttaagttctctgtctttttgttgttgatttgcaggagtgtcctgtatattctagctatcagtcccttgtcagttttggacactgcaaaaatcttctccctgtctgtatctattatctgttaaatatatatagtataagagaggaacaaaatcctgaaatttgatgcagtcaaatccatcaatttttaaaaatcttatatttgtattttttttttttttttttttgagacagagtcgtgctctgccacccaggctggagtgtagtggcaagatcatagctcactgcaacctccacctcctgggttcaagtgattctcgtgcctcagcctccagaatagctgggattacaggtatgcgtcaccacgcccagctgagtttttttgttttttttttttctgtattttttgtagagacgggacctcgctatattgcccaggttgatcttgaattcctgggctcaagcaatcctcctgcctcagcctcccgagtcactgggagtacagacgtgagtcactgcaccaggtcctatcactatggtaactttacatttatctggattcctttttttttttttttttagacggagtctcgctctgtcatccagcctggagtgcagtggcaagatcgtggctcgctgcaacctccacctcctgggttcaaatgattctcctgcctcagcctcccaagtagctgggattacaggcatgcaccaccactcccagctaatttttttgtatctttagtagagacagggtttcaccatgttgaccaggctggtctcaaactcctgacctcaggtgatccacccgccttggcctcccaaagtgctgggattacaggcgtgagccaccgagcctggactatattattttttattactttttttagtatatccttatctctggaagggtatgtcctctctcttatacttccttatctttttaaaacttatttatttatgaacacttattcttcaatttacattttagaataagtttgctgaattcctaaaaaaaatcttctgcaatttggttgaaattgaatcaaatttacttatttaggaagaactgttaactttacaatgttaagttatcccatccgtgtctgtttgttgaagtcttccttgaagtcattaagagattacaatttttttctgcataaaggatctatgcattcttttctaaatcagcccctacatactttacattttctgttgttttcatggaagtatactttttaaaaaattaatttattattattattattattattacttttttttttttttgaggcagggtccagactggagtgcagtggcgggatcacggctcaccacaacctcctcctcccagcgcaggctcaagtgatcctcccgcctcaacctcctgagtagctaggactacaggcatgcaccaccacgcaggctaattttttgtatttttggtagaggtcgggttttgccatgttggtcaggctggtctcgaactcctgagctcaagtgaccctccttccttggcctcccaaagtgctgagattacatgtgtgagcccccaggcccgcctcatggaggtatattatttatagctgatgaacactgtggtaagaactgtcaaatttgtaagttgacaacctcgctgaatttgcttcttagttttaattttcccccagatatttattttgaaaaccttcagaaaaattgaaagaataatacaataaacacctgtttcgcttccacctatattcaacactttaacattttgccacattctccctcctgcctatatacccacattcatatataaagtaagtttaagccgtgcacagtggctcatgcctgtaatcccagcactttgggaggcagaggcggatggatcacttcagctcaggagttcaagaccagctttggcaatacagcaaaaccccatctgtactgaaaaacaaaacaaaacaaacaaacaaaaaaaaacaaaaattagccgggcgtgggggcacgcgcctgtagtcccagctacttggagggctgaggcaggaggattgctcgaacctgggaggtcgaggctgcagtgagtcaagatggagccactactctccagcctgggcaacagagcaagaccctgtctcaaaaataaatagtttatactcatgacactttacccctaaatatgtcactatgcacctcttagaaataaggaacttatacatagccacaatgccattattacttctaagaaaattcaccataattccataatattatctagtctgttttctgttttctctggttctaccaaaaattcttttacagctttttttttttgagacagagtctctgtctctaggctggagtgcagtggctcaatctcagctcactgcaatctctgcctccccggttcaagcaattctcctgcctcagcctcccaagtagctgagactacaggctcataccaccacgcccagctattttttgtatttttagtagagatgggctttcaccatattggccaggatggtctcaatctcttgacctcgtgatccaccctcctcggccccccaaagtgctgggattacaggcatgaaccactatgcccggctcccctttatttttttaagagactcagtgtcactctgtcacccaggctggaatgcagaggtgtaaccatagctcactgcagccttaaacctcaaactcccatcctccggcccatcttgatcaaaaaaaaaaaaaaaaaattctgaggctgggtgtggtggctcatgcctataatcccagcattttgggaggccaaggcaggtggatcacctttttgagtccccagtgtctattgttccatctttttgtccatatgtatccagggtttagctcccacttataagtgagaacatgcagtatttggttttctgtgtctgcattaattcacttaggataatggcctctagctgcatccatcttgctgcaaagaacatcatttgattcttttatatgatcatgatatatttttaaatgcgatattggatttggtttgcacttacatatagtttttgtatctgtgtttataagtaaaatgagtctgtcttttctttatcttatactacccttatcagttttagaatcaaggttatactcgtgttgtaaaattagttgagtaatgtttttccttttttgttgttgctgtcacctctgttatttagtgtgtatccacttacacatgggtctttttccaggctctttattctgtcccactagattatttacatctctaatctataccacagtgtattaactggttttactatttttgtaatctttactgtgattgtacttgtttcccctactttgttttttatttagtttacttgcttttttcttagtttattggcatgttcttttttcttgttcagtctttcagacattccatatcttgtcaatctattcaaagaagcaggtattagttttattaaccttttacattttttgttgtaattttcaatttgattgattttctcttatctttattattttcttcatttgtgtatgtttctgctacttttttggcttcttgcattaaatactcagctcgtttgttactattctttatattttctgataaatatacttgaagccgaaattttcctctaagtcctgtttgattttgtttgtttgttttttgagacagcatctcgctgtgtcacacaagctggagtgcagtggcgccatctcagttcactgaaacctctgcctcccaggttcaagcgattctcctgcctcagcctcccaaggggctggaattacaggtgcccaccaccacatccagctaatttttagtaaagacagggtttcaccgtattggccaggctggtcttgaactcctggcctcaagtgatccacccaccttggcctcgcaaagtgttgggaatacaggcatgagccaccgtgcccaacccttaaaatctttttgatctgacatgaaagctgcaacaatggctttttttggttaatattttggtttatctttttttttttttgtctatttgcaacctttctgtatccccttttaaaataatactatattttaattcaatacattttttaatgtaagagattattttttctttttatttataaatttaacccatttacacttatttcatttgctgttatagtcagtctcctatcaaccatcttatttcctattttcaatatctaatttttccctttattcttctttcatacttttattgcataaatagaattttcttttgttggtttgaaaattatacattttatttttattcttctgggtgtcactcctagcttattataaccatgtttatgtatatttatcctcatcaattttgagcttatttatagctatatctttctaaccaaaaaagcaagtgctcacctcccactggacttcagtccactcacttccacacacacagttctatcatgttgtttcatctagaatttcaatgctaatgatgaatacagggtttttttagacttacttatactaccatatatgtttctaagtactttagtcacccttcattcccatatcttgtagtgtcgtctgagatttaattctcttcttgctaatgaacttcctccaaaagtgttttcctttcttattagtttctctttctttctttttttttttttgagatggagtctcgctctgttacccaggctggagtgcattggcttactgcagactccgcctcccaggttcaagtgattcttgtgcttcagcctcctgagtagctgggattacaggtgcacaccaccacacccgtatttttagtagagacagggtttcactatgttggccaggctgctcttgaactcctggcctcaagagatccacccacttcagcctcccaaggtgctgggattataggcgtgagccaccatgcccagcccgaaagtgtttttcaaagagggtctttaggtagtaaatcttctgagaacttgaaagcttgagaacatctttctttctagttttgtaccagaattatagtttagctggatataaaaattctagttctaaagttctttttcttgtatcaggcattgctattgaaaaaactaatatcagtatgatacttgttcctaatgaatggcatatggggatttctttttatgtttgttttcttgcttgtatgtcttaattcttgagaagcttttggaatttttgtctctcttaaatttttctttaatgtgttaagtatttttccaaatctatcttgttgatattctgtctgaaatcttacacttttctctaattctgggaaattttaggattcttcggaattctttttttcattattttttaaagcatttccttccaggtttctcatccctcttctcttctggaactcccattttaactatatatcttccatatttaataactttagccttatatctttcatcttcttatctcttcctgataatttctgggagagttcgccatccttatcttctagtttatgaattcattcttagtctgaatctatttcactattcaacttgtatattgccttccttctttcagctattatattttttacacttgttaacttttttatacagtctcatcctatttcaaatttacaatatactttagccaggcatggtggcacctgcctgtagtcccaggtacttgaggctgatgcaagaggatcctttaagcccaggagtttgaggcttcagtgagctatgactgtgccactgcattcctgcctgtatgacagagagaaaccctttctgtataaaaaaaattagataataatttttttaaaatgtgtaacattctccattatttcctagaagaattttattttgattattttattttatttacttatttatttttcagagatgggggcttggtctgtcactcaggctggattgcagtggtgcaatctcagcttactgcagcctcaacttcccaggctcaagtgatcctcccacctcagccccaggtggctaggactacaggggtgtgccaccacacccggctaatttttttaaaatttttttgtagtgacaggttttcaccatgttgcccaggcaggtctcaaactccttagctcaggcaatctgcccgccttggtagcccaaagtgctgggattacaggcgtgagccaccgtgctcagcctataaggattattttaaattcttgttctcactggtccattaattccgcttcctctcatataggttcttcattttcggggtcctcttttaaaaggattacattatttggatgtattatttttctttctgagctcatattactctggatgtgtcattctcttggctggtgataggtatctggggagagagttactatctgggtctaattctgccacaccctcaacctcctctcctatcccttccctcccagtttacttaagcagaagaggatgtgcctttggatgaacctgttgggtctccaggttctgctgctcctgaaataccacttcccaaggctgactcctcccttatgtaggcacaaagtggaggaattagcaggaggaggggatgtcaagtggtgaactacagggtctgggtcctcgtggtggttttgtattgtgtcgccttggttaagttgagactacttttcccagaatacccttccctgcatggttctgggttggagttggcctaaggaaatttgctcaagatttggaagttagaagtaaagcaagtctgaaggttttatgcttctgaaggttgtcatggctacaggcagtgagagagcaatgcaaaggttccagagttccaactgttttggtttgtttgtttgtttgttttgagacagggttttactctgttgcccaggctggggtgcaggggcatgaacatggctcactgcacccttgaccttctgggctcaagcgatcctcttgcctcaggcttctgtttagctggggccacaggcgggcaccaaaatgcctggctaatttttttgtttttattttggtagagacgaggtctcactttgttgcccatgctgttctcaaacttctcggctcaagtgatcctcccacctcggcctcccaaagtgctgtgttacaggcataagccactgcacctggtctctacttcgttcttactcttcttcccgactctgtgatcagctctttttcctcactgacatctcttatcaccagcagaggcctaccactagacaccaggtgagaactcacagaagtagaatctatgaagaagcaacaatcttctgttgactttttacagtggctccctttctctcttccactgcaggaagcaagataaacttatcttcctcattttccagcaagctccagcttgtctcccctccacccccaaccagtgctttccaagggccgataagtgattttcccaccatcctacaactccctttgtgacctctacttctccgtctcctccaacaattgtgtaaaatctcattcctataataatcattcattccatgatatttgcagtggttctacttccctggttgagccctggtagatacggttcctgagaacttcatggagcagtttctgcaccaaacctgccctctctacctctggacctctacgtggaaaagagaagtacatctctgtcttgggtcatccactgttattttggtctgccttcctggagccaggccgccactggtcttgaacccctatcctcctctagaccattatgggagacagaaagaacttctaccttatctgacacattgcattttttagtttctaacaggaacttgccttatagcttaagtaaatcccacttcctctacctcactttttacttggctgtattttactcactcttcggtttttcctgacgtctagataagtctgatccttttattgtgccagcagtctcccaataccctgggcagaacacccatcacttaggaaatatttgctccatgactgtctcccctactagactagaccctgactcttttttccttgtttttgtttttgtttttttgagatatagtttcactctgtcacccaagctggagtgcagtggcacaatcttggctcactgcaacctccacctctcaggttcaagcaattcttgtgcctcagcctcctgagtagctgggattacaggcaagtgccaccacacccagctattttttgtatttttagtacagatggggttttgctatgtgggccaggctggtcttgaactcctgacctcaggtgatcctcctgcctcagctcccaaagtgctgggattacaggtgtgaaccactgcgcccagcaaccctgactcgtttgttgttgttgtgttttgttttgttttgttttgtttttgagacggaatctcactctttctcccaggcttgtgtgcagtggcacaatcttggctcactgcaacctctgcctcccgggttcaagcgattctcctgcctcggcctcccgagtagctgggattgcaggtatgtgctaccacacccggctaatttttgtatttttagtagagacggcattttaccatgttgaccaggctggtcttgaacacctgacctcagtggatctgcccaccttggcctcccaaagtgctgggattacaggcataagccaccgcacctggccccaaccctgactcttattcctgttctcctcccagcccataacacagaactgacacacagcaattcattgaatgaatgaaccttttttaaggtagctacagagaagataaaccttttggtgggtttggctgagattggtctgtacagcagctctaaattccttgagcagggcctggcttgtccatgtcttatgctctttcattttaaagccttgagctactttctaaacattgggtgcctcatagccagttactgcacattaagaggatatggtatgtgtgctccagacatcaaggccaccagacccaccccgctatgtgtgacatgtggaacacagcattgggacatacccaacctttgctatcttctctaagaactgcctaccaaacacctttcctgcccaggctggagtgcagtggcatgatctcggctcactgcaacctccgccttccggtttcaagtgattctcctgcctcagcctcctgaggagtgggcccagcctggggtcaccgctatcctgtggaatacttatatgagtgttaggaaaaagtgtactttctcagcatactttattgccatctgctaaagtggtttcattatgaatacaggtatttacagtgtctctcatgtgaatgggacccttggagttatccactgcacagcctgcataaccaaatgtggatactgccctgccagcctcccattagccttattagcgtcatgtgaccttgccttccttggaagccaggctgattggaccagcagtggagatcccactcaagctggccaatcagattggttctcccaggaatttgaagttgggataagcaactccagcttgtcatcattgcactggaagaaaatgttgaatagtggctgacatgtttcagttaggtttcctgattgcaagcaacagaaaccaatattaatgtaaatggataacttaagcaaaatggaatgtattggaagtagtctctgaaagccagagaaccagggggccagaaaggaggaggagcaatggaacagactcacaccagaatagtcagaatagtctggtcaggcccccactgctgggtgaatgacctccatccatttctccctcttctgtgtctttcctgtgggactcatagtcttgggcaagagcatctgaccagtcaaacttcactcaggtgcccaaacctggatatatggcgatggtgagaggagtctgcctgtatttttctcccttcactcaaaaaactttttttccatttataaacatatttagaacacataaaactagacaactttagctaggcatggtggctcatgcctgtaatcccagcactttgggaggccaaggctggtgatcacctgaggtcaggagttcaagaccagcctggccaaaatggtgaaaccccgtctctactaaaaatacaaaaattagccaggcatggtggcgcgtgcctgtaatcccagctactcaggatgctgaggcaggagaatcacttgaacctgggaggcggaggttgcagcgagccaatgtcatgctccccatgctgagatcatgccactgcaccccagcctgggcattagagcaagatcttgtctctcttttttttttttagacggagtttcgctcttttgcccaggctggagagcagtggcatgatcttggctcactgcaatctccgccttccggtttcaagtgattctcctgcctcagcctcctgaggaggctgcaaggcagtttgaaagtttcttgcaaaattagatgtactcttaccacataattcagcaattgtactccttgggtttttgttttgttttgttttgttttgtttgtagagctctcagcctgctgaagatctagatgtttatgatgatggcttatttatttatttaacaggttttttttttttttttgagacggagtctcactctgtcacccgtgctggagtacagtggcacaatctcggctcactgcaacctctgcctcctgggttcaagcaattctcctgcctcagcctcccaagtagctgggattacaggcacatgccatcatatctggctaatttttgtctttttagtagagacggggttttgccatgttggccaggctggtcttgaactcctgacctcaggtgatccacccgccttggccttccaaagtgctgggattacaggcatgagccgccacacccggcctgtttaacagacttttaaagagtaattttaggttctcagcaaaactgagcagaaagtacagagttccctcacattcctgtcccctccagcattcccactatcaacattcagtaccatggtggtacatttgttacagtgaatgaatctacattagcacaccattatcactgaaagtcaagaattttcatcaaggtcactcttggcattgcacattctatggatttggacaaatgtgtaatgaaaggtatacatcattatagtatcatgcggagtattttcactgccttaaacatcctctgtgctctattcatcccttcaaccctcctaatccctggtgatcccaggtgaccactgatcttcttactgtcttcgtggtcttgccttttctaaaatgtcatatggttggaatcatataggatgcagtccttttcagatcaccttctctcatttagtgatatgaatatgtttccttcatgtcttttcatgtcttgatagtgtgtttctttttactgccaagtagtagtccattgtctggaggtttatttatctattcacctactgaaaaacatcttcattacttctaagttttggcaattatgaataaagctgttataaacatccatgtgtagattttttgtatggacataaattttcaactcattcgggtaaataccaaggagtacaactgctgcattgaatggtaagagtatgtttagttttgcaagaaactgccaaactgtctttcaaagtagccaaaccattttgcattcccactagcaatgaatgagagttcctgttgctccgtatcctcgccagcatttggtattatcaaaaggagaagctttctcctttctccatgtgagacggcctctgtcaaattctttcctctaaagcagcttctacggctagatgtggtggctcatatctgttatcccagcgctttgggaggccgaggcgggtggatcacttgaggccaggagttcaagaccagcctggccaacatggcaaaaccccatctctactaaaaatacaaaagattagctgggcatgcaggtgcatgcctgtaatcccagctactcaggaggctgaggcaggagaatagcttgaagccaggaggtggaggttgcagtgagccctaaccctgccactgcactccagcctgaatgacagagtgagactgtctcaaaaaataaaataaaataaaatatcttctgcataaattttttgcatttatgtaagcaaaatgtgtgggggaattatgatagaccttcatagagtcattgtactctatctttgttacctcatattcatttaaatattcttgtttttcttcatcagtgacaactccccacattccaccaataatcttgccaatttccatcaatttcaggtccgtattggaagccttgactctggcccagacatttctgctgtacctcatgtagggtaagagtggcttatctttgagggttttggaatagtaatactagaggatgccatgacccgggctgttggtgcaggggttccctcccagcctgtagctgtaggtgagatgcctgtgtggagtgcatcccacaaacagtggtgtgctgggcacttgtgctgcaggagctgagggggtggggggtagggcacaagatggtctttttcacattttgaaaaattaagttttcatttccttaagaacaaatctgattagggaggttggtggatcacttgagcccaggagtttgagacgagcttgagcaacatggtgaaactccatctctacaaaaaatacaaaaattagctaagcatggtagtgagacaggattctttcccttgaccttgacccccttcatgggcaggaactggagtggctcctttcacttagcctgcagtccatggatggctaagtgttaacagctcagtgaagggtcagggtgacagcctcctgcacctgccctttttgacagccaagttctggctcggtgtccgggaagaatcaggtcacacgaattgtttgaaagatgatgaatgcagaaagctttattgagcagtggaagtggctcctgatggaaggggagctggaaaagaagaaggtgatctttccctgaagccacactgtctgaagttagctgtgtctatctgtagtctccgatgctcagttgcttgctcctctgcttgccactcagccacttacatccccaaggctcagcagcttgcatccccaacaatatgcatcagccacttgtgttgctcttttcttctgccagctggtctggtttttatgggcacaggataggggcatggcaggccaaaaaggcaatcatttggatggaaaagcggggtcagctgttttcacttagggccgaggtttgaggcttgagggtgcagtttaggtgggagcccagctgttctgtatcagtagcacacttgtagtcccagttattcaggaggctaaggtgggaggatcacctgagcccaggaggtcaaggctacagtgagccatgatcacacctctgcactccagcctgggtgacagagcaagactctgtcaaaaaaagcaaaaaaagataaaatcttaaacaccatggaaaggaagagcattcacagctccagctttgttcccatccctctggttctgtggaggcaggaaaatgcctggatttaccatcccacacaggtcacatccagtgtgagagggtcaggtctccccgcattaatatattgtcttattttctgtgttcttgatactctggcatctgaggcctagctgaatggagatggagtgcccctactcagcctagctgattcttagagagagccagggactcacctagctggggagtatgcctttcatatgcaaatgaaccaatccagagcccatactgttcaccacctcttctgtctgactcttacaatctatcgggcaataatcctctcccttagtcattccagggccaggtagcaggcaactgtcagaggcatttgaaccagagaaactccatcttgaatgggggctgagtaaaataaggctgaggcctcctggactacattctcagtaggattcttagtcacaggatgagagaggaggttggcacaagacacaggtcacaaagaccttgctgataaaacagcatgtggtaaagaagccagccacatcccaccaaaaccaagatggccatgaaagtgacctctggacatcctcactgcccattatatgctaattataatgcattagcttgctaaaagacactcccaccagcaccatgacaatttacaaatgccatagcaacgtcaggaagttcccctatatggtctaaaaaggagaagaaacctcagttctgggagttgtccacccctttcctggaaaattcatgaataatccaccccttgtttagcgtataatgaagaaataaccataaaaatagccagtgagcagcccatgctggtgttctgcctatgcactggctttcatgcacgtccgtgtaaagagaccaccaagaggctctgtgtgagcaacaagacggtttatttcacttgggtgcaagtgggctgagtccaaaaagagactcagcaaagggtggtgggattatcattagttcttataggtttgggataggcagtgaagttaggagcaattttttgcaggcaggggttggatcttacaaagtacattctcaagggcggggagaatattacaaagtaccttcttaagggtggggagggtgtatcctacaaagtaccttcacaagggcaggggaatatcacaaagtacattattgcaagggtggggaaggtgtattgtcacaaagttaattgatcagttagggtggggcaggaacaaatcacaatggtggaatgtcaccagttaaggcaggaactggctattttcacttattttgtggatcttcagttgcttcaggccatctggatgtatatgtgcaggtcacaggggatatgatggcttagcttgggctcagaggcctgacactcctatcttcttatattaatatgaaaaacaaaacaaaatagtggtgaagtgttagggcagcaaaaattttgggggtggtatggagagataatgggcgatgtttctcagggctgctttgaggggattaggggcagcgtggcaacctacagtgggagagattaaactgaagaaagattttggggataaggggtgatattgtgtggttgtcaggagcatttgttgtatagaatgattggtgatggcctgggtgcagttttgtatgaattgagaaactaaacagaaaacacaaggtctgaataaaagaaggagaaaagtaggtattaaaggtctaagaattgggagtacccaggacatccaattagagagtgtccaagagagtttagcataattatttgcttggttgctgagtttttgggctctgtccttgagtttttttatgttgtcatataccaggccagatttaggtaaaaacaacactcttcatttaaaaacatagagtcctcctttttttttttttttttttttagcagtgagtaagtcgaggccttggtggttttggaggaaagagaaatgcaaagccagcaactgtttgttaaagaaggattagaaacggcttgcagagagtgagtgaggctgatagtgttgtggagatagctggggagaggtagagagtggcataagaacaggaaagagaataagagtgagtataaaagtaaagaatagtacttcatcagggtgaaagtattggagggtgccctgccagcaaagatcatctacccactccaagagggagttaaagtggcagtttggggatagtaccagaagatgtccattatgatggtttggaggaaaaatgtaaaccggcagtgtaaacaggggcaaggcatttatgagtagttgagaatggtgaataagagtatgactagacagaagacagtagggatgacaagtttttggggcacagtccaagtattgggggtgactgtgtaaagccctgttgcaaaaagtagggtaaggacgaatagacctaatagaatgaagggatgtattaggctcgtaagggttattactgttcttcagaaatgcgagtgagcttaagggaagtaggggagagaacttgtgacttccaggaggaagaggagagatcaggctgtctgtctgatggacacagctttattctggatcagtgaacctaatggggagggtcctgcaggcagacggcagttggggtactatagatgactaagtagggtccagtccatcaagcttgtagagtttaaggggtcagattcttaacaagaactgatcgtccagctagggtgtctttatatggctgggaatccggagtaggcaagagaagattagcagcctggtgaatttcctgtctagcctgctgaaggacaggaaaatagtcgcctagagggctggtgtctgggatgaggctggggccgagcaagaaggtgcatccatataaaagttcaaatggactgtaccctgtagcatctggaggacaggctctaattctgagaagggcaagaggtaaaagtactgtccagtcctttttaagttggaggctgagcttggtgaggtgtgtctttaaaagaccattagtccattctacctttcctgaagattgaggatggtaaagggtattaaggttccactgaataccaagagcctgagaaactgcttgggtgatttgactataaaggctggtctgttatcagactgtacagaggtgggaaggccaaaccaaggaattatgtctgacagaagggaagaaatgtcggaggtggccttctcagaccctgtgaagtgaaagtgtctatccatccaatgaaagcgtctactcagaccaagaggtattttagtttcctgactcgaagcaggtgagtaaagtcaatttgccagtcctgggcgggggcaaatccccgagcttgatgtggagggaagggagggggcctgaacaatccctgaggagtagtagaatagcagatggaacactgagaagtgatttccttgaggatagatttccacgatggaaagaaaatgagaggttctaagagataggctagcggtttgtaacctacatggaagaggctatgaaatgacgacagaatagaatgggcctgtgaggctggaaggagatattttccttggtccaagaaccatttgccttgtgtgggaagatattgataggtggaagtttcagtgggagagtaggtgggagtgaccaatgagaaggagaaaaactggccatgagggacagaagttggaacgccagcagcttctttagctaccttgtcagcataagcattgccctgagagatgggatctgacgccttttgatgacccttggagtgaatgactccagcttcctttggaagtaaagcggcctagagaagagtttttattaaagaggcattaatgatggagaacccttgcatagtgaggaaacctctttcaacacatatgacagcatggtggtgcaagatatgggaggcatatttagagtcaatataaatattgatgcatagtccttttgcaagagtgaaggcccaagttaaggaaatgagttcagcttgctgagaggtagtggaggtgggcagagaagtagcctcaatgagatatggaatatactatagcatagcctgcctttgctggtgagtggcaatcaggcctggtggaactgccatcaataaaccaaatgtgattagggtgaggaacaggaaagaatgaaatatgcagaaatggagtgaatgtcagggggatcagagagatacagtcatgggggtaaggtgtggtatctggaataatgtgggggccagcctaaaacagtaaggtcaaattgtttggacagaaaggctacagggtgtggtcctggctcttgtgtaagaattccaactgcacagccctgcacttcagctgtgtgtaatgaaaaagggttgggatgagttagggagagctagtatgggagcagctgctagggctgtttttaaggaatgtaaagaggagtggggaaagaatttaggatctatggggtcaactaggtttccttttgtgagtttatataatggtttaatcagatggcaaaacaaggtatccaaaggcgaaagtatccgaccacgaccaggaaggaaaggagttgttgttttgtagaaggggttggggtttgagagaccagccagacatgattggcagggagagcatgcgtgttttcatgaagaattatgctgaggtaggtaatggatggggaagaaatttgagctttggagggggataactgatgtcctttggagaataaatgttgaaggagcaggagggtatcttgttgagaagactcaaaggagggactacagagtagaaagtcatcaatgtattgaataaggtgggaagcagagaggtggaaagaaagtaaatcatgagaaagggcttggctgaagtaatgagggctgtcccagaagccttgtggcagtaaagcccaggtaagttgctgggactgatgggtttcagggtcagtccaggtaaaagcaaagaggggctgggacaaggggtgcacgggaatcatgaaaaaagtgtctttaagatcaagaatggaatagtgagttgtggagggaggtattgaggacaaaagagtgtacaggttgggcaccacagggtggataggcaaaacaatttggttaataaggcacagatcctgaaccaacctgtaagacttgtccggtttttggacaggtaagatgggggaattgtaaggagagtttgtaggctttagtagcccatgctgtagcaggcgagtgataacaggcttcaatccccttaaagcctgttgtgggatgggatactggtgttgagcagggtaagggtgattaggttttaatgggatagtaatgggcatgtgatcagttgccaggacgggagtagaggtgtccccatacctgtgggttaaggtggcaggatacaagagaaagacatgaaggaggctttgggttgtgaagaagggcagcaatgaaatgtggctgtagtccaggaatagtcagggaagcagataatttggttaagatgtctcggcctaataagggaactgggcaggtggggataactaaaaaggagtgtttaaaagaatgttgtctggccggctgctgtggctcacgcctgtaatcccaacactttgggaggccgaggcagttggatcacgaggtcaggagatggagaccatcctggctaacacggtgaaaccccgtctctactaaaaatacaaaaaaaaaaaaaaaaataggcatggtggtgggcgcctgtagtcccagctactcgggaggctgaggcaggagaatggcatgagcctaggaggcggagcttgcagtgagccaagaccccgccactgcactccaacctgggcaacagagcgagactccgtctcaaaaaaaaaaaaaaaaaagaatgttgtccaagttggcactagagttggagagttttaagaggtttagcagcctggccgtcaatacccacagcagttatggaggcaaggaaataggcccttgaaaagaaggtaatgtggagtgggtagcctccatattgattaagaaggggatggacttaccttccactgtaagagttatccaaagcgtctgtgatggtccaggaggctcctggcctcatgatctgcccaccccggcctcccaaagtgctgggattacaggcatgagtcactgtgccccgcacaaattatcttttcaacagcaatcatctcctgatctgttagcctcactatacctgaataaaaacagaatcccaggtacagttaacaatagtcttccatcggaaattgggtgctgttaggaaggggtatagatgctgagtcacttcaaaatgacaactatctactgcacaatgcagacagaggcaaatgaagccagtcaggagtatgggggtagggtagacaggagaatggcaggcaactgggaaagcttgaaagagagttgaggagagcaactccagtttatcactgtcaagctcctagatctaggcccttagaaggtccacttctaactctgcaacttcgagactgtgacaagaccctgtttccttccaggaagcaccccgctttttgttaagcaagtctaagtttttgctccttgcagcccatgattcctccttataacagggaattttgcaacccacatagatgcacctcagactatacaaacgcctttatccagcctatggcccaatggttatctgtccaggcacctcctgcctttccccttccctctccttccccagcctgaccgcctctgggcttaggatcccaggccagtgccttcctagcccggatgctcccttcttttctggtccagctacctcccacctcgccttccttgacctcaggtggggtttcccttctgcagagcagggatggaggccggggtcctcccagcagagaagccctgtgttcctcctctcttgcctgagcagccccacccccaaggctggcagaggctggccctgaagctcctgatcgtctccctccggtctgactgccttacctttttagcctaaatcccagcccctccttttaggaactgtcatcatgtttaatcctgcctgggggagaccccctccaccttcctaaatggaaggtattccattacatgctaaagtgcagtttaagtagctgtaaggaagtgtgacagaaagtctgtcagagtggggctggacttgccaaaacttggtgtgatgtggggactctgtcaacgtgctcctagggaaacctgagctgagctgaggctggggctggcaggatgttcaaggtaagaggcaggaagtggtgtgggggaggggcagccaaagcgctggacccccaggtggcctgagaaggactcccagtgggtgggggccggggacttcttcctcgtcattgtgctgccagacaaaggcagatgggtcaccaggacacccagactgcattagggtggccaggttgggcccaactcttgttggaacaggagtgggggtagaaggtgggtagggaggaggaggttggacaggatttcctccaagtgtttcagcctgaggccagaggcatccggacctggagaggaaaggctctccctccagaggagagaagttggtggttcctggaggagaaaactggcgccttggcagctggagggcccaggcctggacaccaacaatattgaacagcatgaactgtgcccgaagacggccaatggagcaaatactggcaatggcccagccagagtccatagacctttcctggccacttcttggtgcccctctctcccacatgccctggtttaatctacacatgcccaatctttattctttttctttctttttttttttttttttgagacggcgtcttgccttgtcgccaaggttggagtgcagtggcatgatctcggctcactgcaacctccgcctccaggattcaagtgattctcttgcctcagcctcccgagtagctgggattacaggcatccgccaccacacccagctaatttttgtatttttaatagagattgggtttcaccaggttggccacgctggtctcgaattcctgacctcaggtgatccacccgcctcggcctcccaaagtgctgggattacaggcgtgagccaccgcacccggtgatgcccaatctttagatgaaacctcctctctgtctggcccagggctgggtggtcacagagtcaaggctcagtctgcattatttccttggcctctcccccggcatcttctgcacctcactctgcactccccgatccctccaggtgagcccaggacctgccacactgtgccagcctcgcccaagccaccccccagccaggacgcggtctttcctgactcagcaggctgaggcacctgaggctttcattttaattatgaaccacttcaaagcctttctggaagcaggtgagagacaaaagtgtaaacaagtgaatgagtgagtcatccggccctccctgcctggatattcctgtcatccatcctgcctctctctcacccacagtctctgcaataaccaacctgggttctctcctaatgtggggattgtcctggagcccaggccttccaaggctcctccgcccgccaacatcacctacctcatcttcctcttcagcacatccccaacattgtctaagcggtaactcacctgagcaaagcacttgacacggattcattcatttactcctcacaacaacctgatgaggtaggtactattatgtccattttacaggtggcaaaaacaaggcctagagaggtgaagtaacttatctgtctaaggttacacaggttggtagtgggcccaaggttcaaattccagcagtcaggctgggcgcggtggctcatccctgtaatcctagcactttgggaagctggggcgggtggattgcctgaggccaggatttcaagaccagcctgaccaatatggcaaaaccccatctctactaaaaatgcaaaaattagtcaggcgcggtggcaggtgctgtggtcccagctacttgggaggctgagacagaagaactgcttgaacccaggaggcagaggttgcagtgagctgagattgtgccactgcactctaccctggacgacagagcaagactccatctcaaaaaaaaaaaaaaattccagcagtctgtttccagaatcactcccccgcccccacttcccctcccctccccttctcttcccatttcttttcttttcttgagacagggtcttgctctgttgcccaggctggagtacagtggcccaatcacagctcactgcagccttgacctcttgggctcaagcaagcctcccacctcagcctcccaccccaagtagctagaacaaaaagcatgcaccaccatgcccagctgattttttaattttttttttttttgtagaatgaggtctcaccatgttgcccaggctggtccaaactcctgggcttaagcaatcctcccaccttggcttcccaaagtggtgggattacaaggcaggagccactgcttccagcctgggtcagtagttttaaaaacatttgtatttatttctatcattacagagatggggtctcactatgttacccaggcaggtcttaagctcctcggctcaagtgatccacctgctttgacctcccaaagtactgggattacaggtgtgagccaccacgcctggctgagagtccgtacttttttgtgtgtgtgtgtgacagagtctcactctgtcacccaggctggagtacagtggcgcgatcttggctgactgaaacctccgccacccgggttcaagtgattctcctgcctcagccttccgagtagctgggagtacaggcgtgtgcaacaatgcccaactaatttttgtattttcagtagagatggggtttcaccatgttggccaggctgatctcaaactcctgacctcaggtgatccgcccgcctcggcctcccaaagtgctgggattacaggcatgagccaccatgcccggcctcaattccacctttctaactggctcccaggtgctgttgatactgccggtcccagcaaaagtccatactttcaagcactacctatcaccctccctctctcctctttttcccttacagaattctcaactacacgtacacatacactcacacacctgtgcaaactgcattctcaggatctcttccaagtgcagttgccctgtagctctgagttctggctccgctccaattatgcacacttacttgcttgacaaagctcaacccataacaagcacatactctccctatactccctcttctccaaggtcaggagaagagagagcctctcagctctgggtgtgggtgtgtgtgtgtgtgtgtgtgtgtgtgtgtgtgtgtgtgtgtgtgtgtgtgttgggggagagggcaggataatcgaggtgacttcttggtgagacctctgctctggatatcagtttttggaagattcatggcggggactagagggaaggctggaggatggggagttgcaaagctgaccctgcagcccatttctctccatccaactgtgaccagagcctcagcctcacatttagggaggggagcaaggggtggagtgtgcagtgggggagatgttggtgggtgaacatctcatcacatcccaggtcccatagctggagagtcatcgctgcagcaagctcttgagtcagacaagcctgagtctgaatctcactgctttgtggtcttgggctagttcttgacctttctgagccttaattacttaaagtggaaagtgagataatggcagctaattctagatgttgagtcaactccattttgcaaccactacagtagtgattgattctgaaaagaatcatcaatggatgctaaaactattgggcaaaaatttgctggggaatggacagtctcaaagtatttttccacagagcactgattaacttcaaaggggaaaaacaataacctttacaatggatagatctggcaggaaccatgttaaccaagtgatcaaaggtagcatcaccaataatggggcaaaccgacatcctgtgcttccccattgatgcgccgagaaggacacagcattgctcatgcagcatccttgtcaaaaatgcgtaaacggaatctaatcatgagaaaactgccagacagccaaactcttcagaaatgtcaatataatgaaaggcaacaaagattgagaataactttaccaggttaaagaaaactaaaaagatatgacaactgactgcaacgcagaatcctggaccagaccctggatctggtcaaaagaaaaatgctttaaacgacagtattgggacaaagggtaaaatttgaatgtggatcatgtaatagatgaataatatattgtatcaatgatatgtccgtgacttggtaattgttctgaggaaatgtaagagaatatatttattatttattatttttttttttgagaccaagtcttgctctatcacccaggctggaatgcaatggcgcaatctcagctcactgcaacctccacctcccaggttcaagcgattctcttgcctcagcctcctgagtagctgggattacaggcgctcaccatcacatgcccagctaatttttgtatttttagtagagatggggttttaccatgttggccaggctggtcttgaactcctgaccttaggtgatccactcaccttggcctcccaaagtgttgggattacaggcttgagccaccaagcccggcctgagaatgtatttattcttaagagatatgggccggccaggtgtggtggcttatgccttgaaatcccaacacttagggaggttgaggcgggaggaggttgagcccaggaagtcaagaatcaggagttggagaccagcctggacaacaaagtaagacctcgtatccacaaaataaaaaattaaaaaattagctgggtgtgatagcatgtgcctgtggtctcagctacacagcaggctaaggcaggaggatcgcttgagcccagcaagtcaaggctgcagtgagccgtgattgcaccactgcactccagcctggatgacagagcaagaccctcaaaaacaaacaaacaaacaaacaaaacttaaatatatggtaaaaagtattcacagataaagggttatgatgtctgaaacttaaacttatattcaaatgatggctcatacacaaaaactaaaatgattacatctatgcatgaaatgcatgtgtttttataaagaagagagaataaaatgtagtaaaatattcattatcagtgaaaaggtatttgagagtttattatactattcttttagcttttcagtgcgttaaaattttttcaaaataagaaggttgttaaaagggagttcctgaattcacacaagtggtacgtccatcctggcacttactagaccttaactgaggccagttcccacctctgcaggactgtaggtcccgggagcagtacaccccaggctgcccagtgagacaggggtcaagttccttccccatcctaggcctctattgaaatctccaagcttcagcctcctttgtagccactctcgggatctcccggccagagctgagaggtggggaataggaagggatggtgggggaaaggaaaacagtccttcctctttcctcactcccaagaatgggatctttgaagagtccagacagatttgtccaatgtatcaggtgatttgtgctgagggattctgtggacagaagaggtactgattgagaagcaggaatgccccgctttactctcctgcctcttggcaatggctgcgcctccgagcccaggagggtgttctacccagagccacggaggcatcactcagccctgggaaagcaagcctgagtgtcaacattctggcagagagaagtgctagatgcttatttgaagatgtctgaacagacttgtttgagagacagctggagttgtgaagtaatcctggcgtctccccatgtctcggttttgaaggcaggctttgcctgcaggcctctgacctctaacgtccttctattcttgttagcaattgacaaaactttgcttaagacagaagtcaacacagagaggggctcatcattgctactagaagggctagtaagaccctccctccatggggcagaagccagctcagtttgggatcctccaggccaaatgcctgggctggtaatgtcgtagcgggtgcacaccatttcaactccatacagtgacctcttctggctccagtggcccctgggagccaaggcctccagccccaatgggcagtgccaacccatgacgggggagtggcaggctctggctcagagtcctgctttgggaatcctcccccagagtggagcaggctccggagcccatcggctgaggccaggcagaatgagtcctagcaggacactaaagttccagggagaacaagaacataaaggaggccaaagggctgtcagcagaataattcaggtctgcaaagccaggcctgggagtaagagctgatcaggaccacagaagaggagcctccagagccattaactgccaccttcctcacctggcttccctgctagtttctctgccacagccccagcccctgacaggggtgtcacactacagaccaagcacagcggccaggaccctcccgaccagctccgttctttgagaaagtccccccaccacaacgtgggcacggaggggctgctgatcaccgtattcttgcacccctggctcagggaagatcagcccagggaggggtccctgactcagaccggctgatcagctccttaacggggattttacatacaggccataggaggcggagggtctttcttgaccctaaagtcactagttgaggtgacagaatcctcgagttgtcagtcttcccatgtcccacacgaaggtccaacatgaggaaatgaggccggcacagcgaaaggagccgagccccagtgacatggttggtgttctggacccagttgttccagaagccctccctgctctgttcgtatcacttatgggagctaagccatttctgcctttccccttgggctactttgagttaaacttctgtctcttctttaaaggccggggagagggcactgattaatgtgctgtgtgagcctccttctcctccagtcacggtcggtgtgagcaggagtggatacttgacccaaaggggaaccaagacatagggcagaatcaacctctctctctcgccctcttcccctctttattattattattattattatttagatggattcttgctctgtcactcaggctggagtgcagtggcatgatctcagctcactgcaacctccacctcctgggttcaagcgattttcttccctcagcctcccgagtagctgggattacaggtgcctgccaccacgcctggctagtttttgtatttttagtagagatggggtttcaccgtgttggacaggctggtctcgaactcctgacctcaggtgatctgcccatctcggcctcccaaagtgctaggattacaggcatgagccaccacgcccggcctctccctcatatttcaactgagagggagggattacagtctgatggctggaactgaaggttgtatagattcaggactaggacaacaatttggttggggactcactagtggaaaaaaagaagaaagctagcctgctgagatagataggagagacgagaaccatatgagcaaattgagagagagagagagacagaattttcctaattcctgagccccagtgtgcttcctgcccttctttctgtgacattctctgaacccgtataatataccctgtcttaggcttttctggaggtataactgatagaaacccacccaggctaacttacgcaaaaagggtagtctattttttttttttgagattgagtttagctcttgtcacccagagtggggtgcagtggcacaatctcagctcactgcaacctccgcttcccaggttcaagagattctcctgcctcagcctcccgagtagctgggattacaggcacctgctgccacatctggctaatttttatatttttagtagagacggggtttcaccatgttgtccaggctggtcttgaactcctgaccttaggtgatccacccgcctcagcctctcaaagtgctgggattacaggcatgagccaccacacccggctttaaaagggtagtccttataaggatggcaggtgtctcctggaaccctgggacaggtggcacacctgggtctcaggatgacctgaaagccaggcagaccttctctaaatgggcctatggtctcaagtatcttatttgagaccaatttccttcaattctccatgtgcatgaggctaaacatggctgtcaatagccccagattatgcaagttcaagtggccacagagatgtccggccacagagatgtctagcccttgtccgaatgcccaggagaaagactctggcaggcccagtctgggtcagtacctacctgctccaaccagccaggtctggtggagtgggggtcccattgtctgctacagcccacctccagggaagggtcaaagaggagtcctcaaggaagacatataaatggcaaacaggcgtatgaaaaggtattcagtcactgatcatcagagaaatgcaaatcaaaactataacgtgatatcatctcaccccagtgaaaatggcttttatccaaaagacaggcaataacaaatgctgacgaggatgtggagaaaagggaacccttgtatgctgttggttggaatgtaaagtaatacaaccactatggagaacagtttggaagttcctcaaaaaactaaaaatagagctaccatatgacacagcaatcccactgctgggtatatacccaaaagaaagaaaatcagcttatcaaagagatatcttcactgccatgtttattgcagtactattcacaatagccaggatttggaaacaacctaagtgtccatcaacagacaaatagataaagaaaatgtggtacttatacacagcggagtactattcagccatgaaaaagaatgagatcctgttggctgggcgcagtggctcatgcctgtaatcctagcattttgggaggctgaggcgggcagatcacttgaggtcaggagtttgagaccagcctcgtcaatacagtgaaaccctgtctctactgaaaatacaaaaattagccagacatggtcgcatgcacttgtaatcccagctacttgggaggctgaggcaggagtatcacttgaacctgggaggtggaggttgcagtgagctgagatcatgacactgcaattcagcctgaatgacagagcaacactccatctcaaaaaaaaaaaaaaaaagatcctgtcatttgcaacaacatggatggaactggtgatcattatgttaggtgaaataagccaggcacagaaagacaaacttctggccagacgtggtggctcacacctgtattcctagaacttcaggaggccgaggcgggcagatcacttgaggacagaagttcaaaaccagcctggccaacatggtgaaaccccgtctctattaaaaatacaaaaaattaaccgggcgtggtggtgcatgcctatagtcccagctacttgggaggctgaggcaggaaaatcacttgaacctgagaggcagaggttacagtgagccgagattgtgccactgcactccagcctgggcaacagagcgagactccatctcacaaaaaaaaaaaaaaagacaaacttctcatcttctcacttatttgtgggagctaaaaattaaaacaattgaactcatggagacagacagtggagcaatagtcaccagaggctgggaagagtagtggttgagggaggcaggaaatgattaatgggtacaaaaacatattagttataatagaaagaatgactaagacctagtatttgatagcacaacagagtgactacagtcaacaataatttattatacacttaaaaaactaaaagaatataagtggattatttataagacaaagaaaagataaatgcttgaggtgatggataccccatttaccctaatgtaattattacccattgtatgcctgtgtcaaaatacctcatgtaccctgtaaatatatacacccactaggtacccacaaaaattgaaaataaaaatctttttctaaaaagaggaatcctctgcagctgttatatcaagctactttgggtaggatcccattccctgccactgaacagagctgactgaagcaattgccggtagctttggggtacctgttgcccctctctctgttggaattgtgtgcctcaagagtatctccagctggatagaagggccaattcttctcagaggccgagaatattcttccacgctgtatcccctgcaaacaactagaattcacggtgatgccaaccgactgtccctctcttcacccacctcctgccaccattgctgagagagaattggccagtgtcacagtatctgacccaccatgcattctgtggagggtggcaaagaatcctacggaaagttccaagggctgactcctatctgacagatgtatgacgttgatcgcaacttatcctttcagggaagacgaatatcaatatttcaccaggcctggacaatcctggaaccctgcacgcttgacactgaaggcagaattctggaagttgaacatagtgctacagatttcactggggctggaaggtcgtgctgcagaggtgggcgggtcagtgagagtcttaggcacctcttcaccttctgcacttaggactcaaaagacatggagtccacccagaggccagagttttctttcttgagcatcacgtctgcttggcagagcccctgtggaatctctctaagttctcattcctcctcatttggcaacaggcattcctagatctggggtggggacaggggctgcctcacagagcacaggcagcttgaaggctaaaagtgggaaagacgggatgtttcccattcaatgttgctatgctaaaatgaaaggatgtctggcttgttaaagcagaggcacatatatatactacctgtattgaacaggtgtttgggtgtttgtccctttcaaatctcatgtttaaatgtaatccccaggccgggcatggtggctcatgcctgtaatcccagcactttgggaggccgaggcgggcagatcacttgagctcaggagttcaagaccagcctggccaacatggtgaaatcccatctactaaaaatgtaaaaattagccaggcatggtggctttcatgcgcgcccatgtgaagagaccaccaaacaggctttgtgtgagcaataaaacttttaatcacctgggtgcaggcgggctgagtctgaaaagggagtcagcgaagggagacaggggtggggccgttttataagatttgggtaggtaaaggaaaattacagtcaaagggggtttgctctctggcgggcaggagtgggggtcgcaaaatgctcagtaggggagtttttgagccaggatgagccaggaaaaggactttcacaaggtaatgtcatcacctaaggcaaggaccggccattttcacttatttttgtggtggaatgtcatcagttaaggcagggcagggtattttcacttcttttgtgattcttcagttacttcaggccatctgggcgtatacatgcaagtcacgggggatgccacggcttggcttgggctcagaggcctaacagtggcacacgcctgtagtctcagctacttgggaggttgaggcaggagaattgcttgagcccgggaggcagaggttgcagtgagccaagattgtgccactgcactttagcctgcgcaacagagctagactccatctcaaaaagtaaatgaataaaagtaagtaagtaaatgtaatccccagtgttggaggtggggcctggtgagaggtgtttgggtcatgggggcggatccttcatgaatagcttggtgctgtcctcacaataatgagtgagttctcactctgagttcacgtgagatctggttgttgaaaagggtatggtggccaggcacagtggctcacatttttaatcccagcactttgggaggccaaggcaggaggatgacttgagcctaggagtttgagaccagcctgggcaacatggcaagactccgtctctgtaaaaaatgaaaaaattactggtcatggtggtgttagcctgtggtcccagctactcaggaggctgatgggggaggatcacttgagtctggaaggtggagactgcagtgaggtatgactgtgccactgtactccagcctggggacagccctgtctcagaaaaaaaaaggggtgtgtgtggcacccactccgtcccccactgactttctcaccatgtgataggccagcctcctattctccttctgccgtgattagaagcttcctgaggcctcaccagaagctgagcagatattggtgccatgcttcttgcacagcctgcagaaccatgaacaattaaatgtcttttcttcataagttacccagcctcagatatttctttatatcaatacaagaacagactaacacaaagggataattcagaatttaaaatgaatacaaaaaaaatacaaacagtaagccttcttcatacctgagtagtgtctcctcacacattcagcacagccctgttcccttccccagcacttttttttttttttttttgagacagaatgtcactttgttgcccaggctggagtgcagtggcaccatcacagctcactgcagccttgacttcctgggctctaatcatcctcccacctcagcctcccaggtagctgggactacaggtgtgtgtgtgccatcatgccaagctaattttttattttttgtagagaagaggtctcaccatgttgcccagtctggtctccagctcttgggctcaagtcatcctcccacctctgcctcacaaactgctgggattgcaggtgtgagctgccacacctggttccccatcgctctaatctaacactaatgttctccttcaactcgagtaaaatacaatttcctgaatcatcctgagtgacctccagttgtcctcactgctcattacatgctaattataatgcattagcatcctaaaagacactcccaccagcaccatgacagtttacaaatgccatggcaatgtctggaagttaccctatatggtctaaaaaggagaggaaccctcaggtccaggaattgcccatccctttccaggaagactcatgaataatccaccacttgtttagcatataatcaagaaataaccgtaaaaaacagaagcccccatcctggctaacacggtgaaacaccatctctactaaaaaaatacaaaaaaaatagccaggcgtggtggcaggcgcctgtagtcccagctactctggaggctgaggcaggagaatggctgaacccgagagatggagttttcagtgagccaagatcgcaccactgcactccagcctgggcgacagagcgagactcgtctcaaaaataaaacaaaaaaaccagaagccctcagggctgctctgcctatggagtaaccattctcttattcttttactttcctaataaacttgctttcactttctggattcacctcaaattctttcttgtgcaagatccaaaaaccctctcttggggtctgggtagggacccctttcgggtaacataaccatgagaaaaccacagaaaaatccagattgagggacgttctacagaattcctgacctgtactcctctaaactgttaagggaataaaaaacagggaaagcctgagaaactgtcacagacacagactaagacgatgtgatgaccaaatgtaatgtggcatcctggatagaatcctgaaacagaaaagggatgttagtggaaaaacatcctttagagaaaggatgttagtgaaatctgattaaataaagtggcaagtttagttagtagcaatgtactgatgttgtttgcttgttgtgacaaatgtaccatggtgacgtcgatgttaacaacagaggctcctgagtgagggtacatgacagctctctgtactatctgcaactttgctataagctttaaactattctaaaagaaaagggttacttaaaataaaaagggaggtcaggtgcagtggctcacacctgtaatcccaacactttgggaggcaaggcgggtggatcacttgagctcaggagtttgagaccagcctggccaacatggcaaaaccccgtctctactaaaaatacaaaaattagctgggcgtggtggtctcagctacttgggaggctgaggcaggagaatcgcttgaacccaggaggaggaggttgcagtgagatggcgccactgcattccagcctgggcgacagagcaagaccttgtctcaaaaaaaaaattaaataaaaaggtaaaaaaataaaagaaaatgaaaaggtaaggcaggggcatgggggagggcaggaggatctggctttggtttggaaggggaaggaaagttgggaaggcagaagccccagcggagcttttcctttttcttttctttttctttctttattttattttatttttttttttgagatggagtttccctcttgttgcccaggctggagcacaatggtgcgatctcggctccctgcaacctccgcctcccagtttcaagcgattctcctgcctcagcctcctgagtagctgggattacagatgcctgccaccacgcccaactaattttttgtattttggattttcaccatgttggccaggctggtcttgaactcttgacctcaggtgatccacccacctcagcctcccaaagtgttgggattacaggtgtgagccaccgcgcctggccgtctttttctttttttagagatagggtcttgctgtgttgctcaggctggtttccaactcctggctgaagccatcctcctgcctcagcctcccaagtagctgtgattacaggcctggggaaccactgagccctgctcaaagctgcaggtcttgaacaaaacaggcatccctgccccccgcatccctgaggaagtgtcttcctatgaatgagactcatacctgtggatagaggagaggtctagcgccgaacttctccaacttcaatgcaggcaagaagctctcaggaaaatctcattaacatgtggatactgactcaacaggcctaggtgggcccagcaattccacttttcttttctttttttattttttgagacagagtctcgctctgtctgtcgcccaggttggagtgaagtaggacaatctaggctcactgcaactttcgtctcccgggtttaagtgattctcctgcctcatccttatgagtagctgggattacaggtgtgcgccaccacgcccggctaatttttgtatttttagtagagatagggtttcaccatgttggtcaggctggtctcaaactcctgacctcatgatctgcctgccttggcctcccaaagtcctgggattacaggcatgagccaccgcgccaggccgcaattccactttttctaactggctcccaggggctgctgatactgccggtcccaggaccacactctgagttgcaaaaaactggggagttggatgtcaccactcccctgggggtaggggaagagatgctgaaaggaaaggctgccaccctgaagtcgcacatgccctaccttgcccagctcccggcgagcggcccgaaggagagcagagcacaggctccacagcctcagagaacaggctcgattctggtctcccactgccaactgtcatctgcgatcagcctcaggtaaacctaggtccacgccgagccttggtctgctctcgccacctgggactccctgagggccctacagtgttactctccatcttcatcctcttgggctcagaccaggacaaaaaaaataatgcacattttgtctccacacagaagtccacagacctgcactcaggcaggtgcctcaccccgcaccccagtctcttgcctccgtctgtacaatgggcatcggaactcccagtacctacatctccaggttgttctggggactgaaggagggaatcagaggcaaggggctctgcactctgtgcaactgcttgttgaaatgactgaggcacctgccaaaatagtttcaaatgctttatgaggattgtattttgctttttaaattatttatttattattatttatttttgagaagcagggtctcactctgtcacccaggctggagtgcagtggcacaaccatagctcactgcagccccaaactcctgggctcaagtgatcctcctgcctcagcctcccaagtagctggaaccacagaccatgcaccatcatgcctggctatttttttatttttgtaaagataaggtctcacgatgttctccaggctggtatcaaactttgagcctcaagagatcctcccaccttgacttcccaaaatgttgggattacaggcatgagccaccacgcctggctataagcacagttgtaggagcttaaaaatcaaattaaggtggtttcttcacagcagatgtgaggaaaagagaaggaagtctatgctgttgacctctgttgggtcatagatacattaggagtctgataaaagctatgccaccaccacgcagaaaaacacacttaagcccaggtgcagtggctcacgcctgtaatccctgcaccttgggaggctgaggcaggcagatcacccgaggtcaggagttcaagaccagcctggccaacatggagaaaccctgtctctactaaaaatataaaaattagccaggcttggtggcacacatctgtaatcccagttccctggaggctgaggcaggagaattgcttgaacccgggaggtggaatttgcaatgaccccgagatcgtgccactgcactccagcctgagctacagagcaagactctgtttcaaaaaaaaaaaaaagttcgggcgcagtggctcacgcctgtaatcccagcactttgggaggccaaggcaggtggatcacgaggtcaggagatcgagaccatcctgactaacacggtgaaaccccgtctctactaaaaatacaaaaaattagccaggcatggtggtgggcacctgtagtcccagctactcgggaggctgaggcaagagaatggcgtgaacccagaaggcggagcttgcagtgagccgagatcgcgccactgcaccccagcctgggtgacagagcgagactccgtctcaagaaaaaaaaaagaaaaaagaaaacacacttaagcatatagtcacacaactctgctcccaattgcagaggactctggacactggcttgagcatgccaggtctagaggctcctgtaagcttaaagatacaaggaaaacacaagcagacagcaggggaagatggtgggtggggctgatgttcccagttctcagtgtcagcaacactgcccctgtgcccacagtcctgagctccatcagaggccactcggaatgcactctgtgcaccaccctccatctgcctgcatgcaggctcccccagccagggcatccttttcagctgcttctctgggagcctcaggaatctcagctattgcagccgaggcagagcagccttggtccactgtcactgcctgggacttcctgagtgccctacagggttattctgagccttcatcctattgagctcaggccaggacaaaaaaataatgcacattttgtctcagcacagaagtccacctaccttcactgggatctcagaagaagcagaaggaaataagaagatcctggccgggtgctgtggttcccacctgtggtctcagcactgtgggagtgctatagtcctagctacttggaggctgaggcaggaggatcacttgaggccaggagttcaagaccagcctgggcaacatagtgagaccccatctttatttataaaaaaaacaaaaacccaagaagatccaaaggcataaaaatggtccattgcacccaggacctctccctgaccgcagatccttggcacaagctggcagccctggtcttggtttttcctctcccagctccttgtccctgtctcaggcccctccttcttaaatgagacctttattgcttttttcctcatagtctctgccactcctccctctgtccctgtcctcaggagctgtaaaaccatgccccaaagagttaaggaagccaatgacagaaattctttttttttttttttttttgagacggagtctctctctgtcgcccaggctggagtgcagtggtgcaatcttggctcaccgcaacctcctcctcctgggttcaagcagttctcctgtctcagcctcccaagtagctaggactacaggtgtgtgccaccacgcccggctaattttttttgtatttttagtagacacagggttttcctttgttggtcaggctggtctcgaactcctgacctcaggtgatccacccgcctcggcctcccaaagtgctgggattataggcatgagccaccgcgcctggctaacagaaattcttgagtttgcagaatggaggttaaaaaaagaaacaactaccggccgggcgtggtggctcacgccatgcctgtaatcctagcaccttaggaggctgaggtgggtggatcacctgaggtcaggagttcaagaccagcctggccaacatggtgaaaccccgtctctactaaaaatacaaaaattagtcaggcatggtggcacacgcctgtaatcccagctactcaggaggctgaggcaggagaatcacttgaacccggcagagattgcagtgagctgagatcacgccattgcactccagcctgggcaacaagagagaaactccatctcaaaaaaaaaaaaaaaaaaggaaaagaaacaactgaaactccctctgcttatgagatcaaaagaactggctaacactggttggaaccaacatggacaactggagtctgcgcaggatgaacttgctgatggcaccgactgaatttccactgcatgtttcatactaactccccttgaatttgcacatgcgacccatgagatcccaggaagagataactgcgcatgcccagggactttccagatctcccctttcctttcaccaatgatctgctcatctcagaatccaccccctgaaccttttctaataaaaatactgctttgaagccaagacgaggagacagatttgagcttcacactcatgtctgcttgtgagtcaacttgcaataaaagcctttcttttctcaaaacctggcacattgagcagacagccccctttggctcataacaattgtatatgagaatgatgcagctgccccggggaagagagaagaaactgctaatttcccaccagtatccattccttccttgttttgttagtatgcctgagttttggttgggcacatgatcacatgactaaagtttacactccccagcctcccttgcagcttattgagtcaatacaaccaaattctgattgatggttaggacgaggtcagatgtatgccacttctgggttatgaccttaaaggaatgggtgtgtgctccctttgccctttccttcttcccactgagtgggaggcagacatgatggcagaagctagagcagccactttgagcccaccagtgggagttaccatgagccccaaacaatgactgactatgactgactgtagtaggtgctcaataaataattttggagggtcctaactcacttaatcctcacaataatcctatgaagtccaaccaagtttacaggtaaggaacctgagacacaggttgagtaattgctataaggtcaccaagggcaagatttgattccaggcaaccaggttccagagtccatgcttttagtgatgacaacatatagaacagagatctatacactgaactgttatgtgaaaaagaatagacacctatccctgttagtctatgtattgggggacctctttgtcacagcagcttaaatataccttaacataccctctgtgtcaccccagaggcaaacataggtctccccctctccacactccccctagggccagtaaccaagcaggcaggctcctgggaggcttctgagagggctccctaggggatgaagtttcctaattggttcaatttgttttcactccagactctatattcctaaaaatcagaaaagtcttcatcccacttgggtctccagctgctgaagtaccatgcacactcacaagccctccctttcctccaacctagcaacacaaagacatgggtacacacacactacaccccaatgagaaaacagcccttcgtctccaaagggtagtgttttctctgagttctttaaattaactaacatttcaatagttttgcggtttacaagctatcgccatggaaaaagggcctggtaaagtaaccaagaaatgttattaagtgaaaaaagtgaatttcagaataggacacatgctctgttcttatttctacacatatatgcacacatctatatgtttgcaaaaatgcagctctgtctgtggaagtagtggctgctcataaccaccgtgggagatggaaccggtcttagtatcacccgcctttacagatgaggaaactggcttagcgaggctgaggaacagctagaaggagtgagacccgtgctttgctcccctgccccacagttcaaagccctgctctttctattagacctatctcctgtcattctaagtccatgtcactctagcttattgtccccatagtctgcccagctcactgctccctgccccatctttggaagaaaaccagggatgtggagggggcatctctgggagggctattctgggaggcctcactgtctgcttatgatcagtaacgctaggtattccaaggcagtaggtctcacccccagggacaaagaaatcccaatagctggagaccatgacagaaatgtactacagctcagcctgtgtatttttaacacgttccccagaacttgatgtgagtttctcagtgactgaaactgatattaagtaagcccaatttttttttttttgagacagagtttccctcttgtcacccaggctggagtgcagtagcacaatctcagctcactgcaacctccgtctcccaagttcaagcaattctcctgcttcagcctcccgagtagctgggattacaggtgcccaccaccatgcccggctaatttttgtatttttagttgagacggggtttcaccatgttggccaggctggtctcgaacgcctgacctcaggtgatccacccgcctcagcctcccaaagtgctgggattacaggcataagctactgtgcctggccccaatttctttttgaagaaggtaattggcatgggtattttccttctttcttccccccacagagatcagttacatatctttggtgggaaaggtgagctgggaagaaaagcccactcagtgtggagccctggggagctgcaaataagagaccctcacatgcccacaaggatgagctctctgagggaggggactgccctgcctggactccaatctcgggatcattcccccttctgtctccagagctcactgctcaggccaggagaaggtttccctgggcttaccaacacctctacatctggcactgaaattcttgaatagtcaccagcatttggactaaaatgtgccttttgcaaagcaccctgtgaagacattagctcatctgaccctgagtgcacccccctgagacagggaatattatggtcaactcacagatgatgaaactgaggcttcgagagatgaagtgacttgccaaagtcccacagctaggaagttacagacttaagcccaggatatctgatcccacatatcaggtggatttcctcatttggaagtcacgctggggaggagtagatgggaaggggagagattctgcagttctcccagaagagtctgggaaagggaaagaaggagaaagaaggagtaggctgcttcataaagggaagattctcaggccccactgattctatttcagtggctatgaagtgaggacctgaaatctgtgttttcaagctcagactagccagccgggcccatcaacagctctcccttgctgccctcccatcctgggggaagggaagagggacacgaggtatcctggctctagtgcagtgactccagggaccccaagatgtccattctgggaggacactctgccagggaaaactacttaagaccccaagagaaaaaggatggaaacagatggaagggggacagaggatctccttcacctctttccccacctaaggcttggggctcaggattctcattttcctgctacttacagtaagtggaaattcccaatacttgtggctaatctgtgtctaggggggattcccgctctctggacatggcaggtgggcaagaggggattggggacagagttctgggagacttataaacaatcacagagcattgcctcgaatgaaaggctgtcaccagatctcaggtcgcaagggacttttgaagcccagtacccctcctgtcacacagtaagacacagtactcccctttctctaaggacagtctcaaaatcgaggacaaagacctaaagcgaccttaacagactgcctcctcccacacctgcccaggggttcttcccactctgatccttgcttctcctaaacgttcagggctggagaaggtcctgcagttgggtgggagcaggtctcaggagtgggtcttgggtgagtgtggctctgcagggtcaggagttcagtgtcaagacatggtggcagcctgagcctgtgtaagggagtgtttggtgcaccacagagtcagtacatgtgtatgtcaggcatgtgagggccctcatggggcatagaacttcctgctgcactcactacctattaggttttctgccaggatgtcaccagaagctcagggatctctggcccttctagaagtgccaggcagggctgtcgccacctcttaccactttttatctactctgaacaattcgcgcaagacccatggactgagcctgggttggcactcactcttcccctgacctttccatctgcagtgtgctagctggggaacgtggcccgtccgtcaggcctgatgatcacactgtagagaaagaaatttatttttatttatgcattgttacatttatttatttatttatttatttagagacagcatcttacgccgtcacccaggctggagtgcagtggcgtgatctcggctcactgcaacctttgcctcccagatttgagtgatcttcctgcctcagcctccagaggagctgggactacaggcatgcgccaccacacccagctaattttcgtatttttagtagaggcaatttctccttgttagccaggctggtctcgaactcctgacctcaggtgatctgccggtctcagcctctcaaagtgctgggattacaagcatgagccactgtgcctggcctatgtatttatttttttgagacggagttttgctcttgtcacgcaggctggagtgcaatggcatgatctcagctcactgcaacctctgccttcctgattcaagtgattctcctgcctcagcctcccgaggagctggaattacaggcgcccaccaccacgtccggctaatttttgtatttttagtagagacagggtttcaccattttggccaggctggtctcgaactcctgacctcaggtgatccaccctcctcggcctcccaaagtgctgggattacaagcataagccaccgcgaccggcaatttctgcattgttacttttaagtgacaagtaaacattgtatatatttatgctgtgaaatatgatgtatatactgtggtgcaggggaagaaatttctaacctcccaggtatcctatcagctgggaggaagctgaccccacagcaggagggaaagaggtaagattagcacagaactcacagtgcgggtggaactcagcaacactgagtctcccttccctgtgcaatcccatgaagatcggaggaacccttgtgcgcctttgggaaagggacttcctccctataggcaggagggtagctgagatgaccgcgagccagttagaggaatttcgctgcctccagccccgcagcccgccgcagtgccaaataacagacggcagagggcgctcctacctaacctttcccatgccgcggagggtgcgaggaccggaactttgcgagccgagaaagttctgatttttttccgcagtgttctgatctttgcccgcagtgtaccggggattgagctgggggccgggctcgggtaggaatagggatgagaggggctcataagtagaccccccccccttttttttttgagacggagtgtcactctgccgccaggctggaatgcagtgtggcgcgatctcggctcactgcaacctctgcctcctgggattacaggcgtgagccaccgcacacggccagagaaccccccctttttttttttgctccccgccagcagagacatggggtggtcccttcctcaaccccacgccaaacccaaaccctgaaacagtgtcccgcacatctgccgggtccaagtgagagtcccctagccacacccctgcaattccttgcggccctctactaaaggctccgttccaagaagtgagggtgagaggtcgggcgcggtagctcacacctgtaatgcggcagctttgggaggccgtgagttatgatcatgtcactggactccagcctgagtcagagtgacagacagagacccctgtctctatttttaaaaagaagtccgggcacggtggctcacgcccgtaatcccagcattttgggaggccgaggtgggaggatcgcttgagcccaggagttcaagaccagcctgagctatatagtgagacctcgtctatactaaaagttaaaaaaaaatagccaagcgtagtggtgcgcgtctgagtagtaccagctactcaggaggctgagatgggaggatcgcttgagcctgggaggtggagactgcagtgagccgaaatagcgccattgcactccagtctgggcgatacagtctcaataatagtaataataataataataataaagtgggggtgaagcgtgttcactcaggagcttgtagtttgggagtgggaccgcgtcaggatggctatccgggctccggatgggtggggaaaggggtggcttaagggcgggcactgctgctgagcgtcaagtaccgctaggtggcgctcgaagcccgcgtcacagagaagcggggcctttcgaacacctgtgctcaagagggggcgggcttggagacccgagagggctgcaggaagaaagagcctggaccctaggatcctccctgaaacagcgggatggcctgggtacatggggccattgggcagccatcgttctccggaggcttaaaaggggcgaggtgaagaggggggcaaaagcgtggcaggcgctgcgagggagagaggaggcatcccccggccttccccaggacctggaggggtgggagactgtcgtcggcacacctgcctctctgaatttatggattccgttctgaggctgctaggagaagaattcggggtcttagaggccacatttggcccaggagtcaaacatacaagggcacgctcatctgtttttctcccaggatacgcgggtctgtgtatgagcagctgctctgagcttgcgactgggagggcagagggtgtagactcccgcgtcccggggctcccttcctcgctcttccttcggacacccacagcagctgctcctggggaatctgcccccaagtttcgaggaactgccccccagcgcccaggaggaaaggggaatggggctgtaaacgtgtctaattcagacccgttatccagatcggaattagtttctcgcggacacctccgcgccgcgggccattctctgcctggggcctttcttggaccgatccatagggcctcgactggcttccacggcgcttgcaaattagagactctgatgcctcaaatttgtggggtcctgcctccagctcatccccctctcccgaggcttggcctaaaggcaccatccctgccactcctcaccccctgaattcagtcgggggcctgtgtggagggaaaggaaaacctggagagaccaagtggctgcactgccaccgcgcaggcatggatcctgcctggccgccgtctgggaactcgagatccgaggaggggcaaaagccgccggcgccggggtcaggcctggtggacccgagctccttggtgagacctggacccaccgtcttctccttcaaaagcacagggtggcagcggggaaaggatacgttcccattgaaggggcgatggaaaactggaatcagagactgaaggaggcggggcatgggaccccggaagatgcctcccagacgttccaggcctgcttgcccggctccggaggtcttagcagcatcctcggaggttgccaaacacctgggaagggggtaggtggagcttgaaaggactctgggtctctctttgggaatgcaaagtcccctcaactctcctggccctcccatccgccccccacccgcgccagcgtgtggtagccccgagcctagcacgctgagatgtgggaaggtgtgggtctgcccagtgggtggccccgacagaacgaatccgaggtcctgggaggaattgggagacgtgaagagttgggtatctgccgccccaaggtggggccatccgcttggcagtttcggctctgcgggcggcgcggcctcgcgcggaatctagccagcccctgagagtccccgccccctccccgaggcccaaggtattagtgctgcttgatcagacctcatttcctgcgaaaatggaaacatatccagggtccttaataaagtgaatgacgaggcttcggtgtaattgggcttccgtttggtggctatttccttaaactgagagtggaaaaaaatgtaaactcacagcgctcagatgtaattatatgattatcaaaaggagtgcaggatggattagccgagcaacgacctagagtctgagaaacgggcaggcacaaacgcttactcagaccaagggacccagaagtcccggacttccacaccagccccgcatccaagcgcgcgcctttgaaaccttcggcctctcctgccagccagagacccgccctgccgttgccatcgggacacgcgggatctttatttatacgctggggtgggtcttttccttcctcgcagaggaggagcgtcctctaaggcaaggggggtgggtgctggctacgagtcccctgaccgcctgcccggcccgcgtgcgctggctgcatatttctatgcataatccaattttctccgtgactatctagttaaactctttaacaacagctacataattagaatttggattcccattaattttccttgggcctcgaaccatttgcagctcacactggtaattaatgcgatacatcactaactttacccagcgcaggccggcccggctcaggtcgctcggccagcgcctggcgccctcgagcgggaccctgactcctgaccctgcttcccaggtgggagccgttttcctccttccaaagccagatgcctcgggcccgcgaaccaaaagccttctttccaggaaatttcacaattaaaaatatttatcgggagcagatttacgtttctgggtttccagtctcggggcgtctgggtaggctattaagagtaattagcatcttttgcgcatgcagatttacttcgctcattgccacataactcatccctaaaagccggcgcaggcgaaagcaggcgccgccggcggagccgctgccacagctaccgccgctgcccgcccgagcccccctcccctcctgcgctgcccgctcccagtctctccggcccgaattgtccgctccaggccccagacgctgaacacggaacgaaaaggcttccatcctggagacctggagacgagtgacgccagagcgacctcgtgcggttggggaaggcccagactaggctctccaggctggggccgcgccgtctggaccccaggcattgcgaccacgcatgtgtgtgcaccaccgagtgggcgcttgtgtgtgtgcacgctcacgtgcgcgcgagtgcacaggagtatggttgctagtgcgcgttcctgagagggcgaaggggcgcgtggaaaacgagctgatcaccatcctccccttccctgcagcccaccggttcccaggacgacgctcaaacgtcagtcctaggccacccacctagggcactgagtttcagagggagactcgggcccctaccttgcctcgaattcccttctacagagccagttccatccagccaaacggcctggagcactcagcgcccagccgggggaactgggaggcccaacacccggctgcagccgagcgcatggctggcctggtaccggtgagaggccgccagagaaagcgcaggcggagccgggggtcactgaacagagactttcagggtcgctggggggcggctggagacgatgaggccacgcgactgaagggattggggggtgaggagtggtggtgggggcggacaaagggacaacgtggcggtggacgaaccagggccagagagggccgctgtggctcccgctcttcgggccgaagcacccaccacgggttcgttattaacgcgctgggaagtccgcaatccgcccaactttcttctctttaatgagcctagaagaggctgccctgaaggggtttgttcattaaagatgtagctggaggaatattgtctcattaattatctggttttaattacactcctaccctttgaatccagagatgggaaaagttgatttggtggcgccgcccccttgagcttaaagggtcggcctggctaggggaccaggaggggctgcatggggactgcttgctcccgggagggtgtgggcaggagtctggtgtatatccggccaagaatccctttgcgacgtgtctccatgcctgggtgtgtgtgtatggacctccgtgtgtctgcgtgtgtgtgaccacgtgcggctgagaggccatgtagacgtgacttgggtgtctatgtgtgctccctgcctgtgtgtagttctgtgtctgggtgtacatatgggtagctgagtgtgtctatagacaggcccgagcaggggtctaagtgaacagcaatgtgactgggtaactgtgtctgtggtgtctaagacggtggcttcctgcccgtcagctcaagtgacagtgacatctctgggtctctgcatatatccccatgtagatgaatgttgtggggcggggtgggggtccatggctggggcatcccaggagctggactactccaaggacatggctcggtttccagggtccccagagctgggacgccgccgggaaaccatggtcctggaggggagggagttatttgagggggtgcttgtccctgcctcgtcccttgtcaggccccgcgcggcgctaaagcgggggccgttttccctttaaatcgcggacactttgacaggggacattaaggacccggctgctcaggctgagcagatcataaaaccggacaggcaatttctgctcccgccaaatagccgggcaaactcgttctgcatctttggttttaatgcactaaactggcagctaagcagggagcgagcaaaaggggggtgggaagcccccccccccacatacacgggcgcacacaccggcacaggcgcaaacactccttcacacctttggaccccacaccccgccccggccctccaacaccagaggaattatcaactagaatttgattaatatgcaaatcgcaggcaaacagctccatataattctttcagtggagagtaattaatcaccagttaaagcaaattaatacatatatcaattttgtcagaaacatgcttagttcaatcgcccgtaaaattgaagtttgaagtattaagaggctctgcagaaacgccaggactaaaactttcaaattgatcctatttagtaatcaatcaggctctcccctcaggttaatctgcctaatttttcatctcaaatcatacactttactgacacgccatctagcaaacagtcgataaaaagttaacaaaaatgataacgactccagccagagccattgtgcagggcgggtgggcggccgcggctttgattgcatttcggggtggttggggacttggtttttcactggggcaccagtttggaggttccccagacagtggaagcctccctttcccaccaactcttgtctgctactggctgccctctctgcaaatggactcttctcagaacatcagaacacgagcagcatttccactgaagtcacctaaaccagctagcccctgccctactcccatgtttgcataaactgtctggaagccggtgccctgtgtgcttgtggcaactgtgagctgtgactctgtcacttgcctgtattgtatgtataaagtggggatggtgtatatgtttaacagccaaggtttatctgcttaattcttatgtatgctactagctgcccatatttgggcaggtttgctgtgtcttatgtgactgcactgtgttttccaggcatcctgtgtgtctgtgggtcactgtgggtgtgtatcgggtttctgcagtgttggtctgtgtaactgagtgcctgccttgtgtgtgtttggtttgtttctgaggtgtgcctgtgttgggtgtgggcctgtgggcctgtctgggcttacccttcatttccatgtggacatgcagtcccagggagacctcaggcagatggatcaataggccccattatagacatcaggagagaggagacagtccctatagagacccagacacttcaccttgaacagcctctgggagatggaaggggtcacctcttccctaccttggtccgtatcccagctctgggttggcagaggtgtgtgagaaaggggagaagaaggctctcatttcttgttggaggaggctcccaacttggatctccctttctgaagagccttgggcccctgaatttgggaagggttggggtacagacactcagggatgcctccatcccatgtgctcagatgtcacgtccacactcagatccattggttacatggataccctcaggtaactaagctcccttccccacttcatccacccccattcacagacaaatagctacatccagctctccatggggaagcgtgaacatgcccacatgcacacaccaatgcacagcaatccttgcacacacttgcacacatacaaaccagattccaaagtgggcaggactcattcactcccaactctgcttgcagccatgcgcatattgccatttgtaccctccccactttgggcagggctgagcccccacggggaggaggaacttcctttgactgagctgggggaagctaggccttcaagcgctacctggaactggagcagccaagggcaggtctacaggtcactccaaagacaaaggttcagcccggtgaccagcttgaatgggagaaggcaggcagggcagcctggccatcacccaactgcacaacagaggatgcccctacccccgcaacctgttttcaaagaagcagagtccatgcctatatagtgcctattcgacggcctcagctgccctcagaataaacttcaacccaggctgaaagttctccatcccatcttctacttagtcctctcctgagtcctcttcctgtcaggccatgtggtccctgcccccagcattgtaaatgtaaatttcagtagccagcttggctaaaatgtttggagctaggattctggttgtctgcctgtagcttcaattccacatcaatattcattctcccagctatctgctcacaccagctccctgcacacctcacacaccctgggcatcgtttacctgctggttacacccactcagtgacagctttactcttttcctctccattgagcaaatttagtcacacctagctgcacacacactagtttgcaacaatcagttgcaggaacgcagcatcacacacccagtcccacgctccgtttccatcaatcagccgcacatgctcagtttctcagttgcacatacttgatgacacactcaggaacatgcccttgctagtccccatgcagcctgccacacacacacccacagccccaaatctctcccagaactggcagctgttaggagaagacggggtgatttgcagatggcagtcctggacttggaagtgcagatgtggggccccaggaacactcaaggtgggaatgctcctccctccagggtgctggtccccaggaacccccaccttcctttgccccagtcccaggagcctgttctctaggagatgtggcctgtggacacacccgggagtcagattctaggctctccaagacctgtcagtgtctgccagggacctccactccgcacatgtacagtccagggatgcagccagttcccacacacccctttgcacacctacagcctaaccaccactacccagcacaaccagttctactcccctccattcccacccacttcaaagccacatgtacttcactttacaacagcagcctcctactcgctgacccctgtgactccagcccattcagattctctgtcccttcttccacatgctttgtagcccctgaccttactaacctgcccccttatctggctgccctctctatatccccgggctttctgtggtgccctctcagatgcatgtgtttggggagcatatgtattgtccccacaaatcactttctgcgctccaagaggggctagttgttgccggtgggaagccaagcccaggtgcctccgggttcaggtgactggaaaagccagggcagggtgagtggacttccccggacttggcggctcagagggatggagaggtgggggggggggtccccgcggcgacgggaaggggcggagggtaggcgcgcggccccagctcgtccctttcaggggggactcatgcatcaaacttcaattttccggacgattgaattagtgattttttttctcctgaactaaaatacacttaagtctttgggattaattaccacgttctggtccctcagactggagtattacttatcggagctgcgtctgacaccggcccgacacctcgtaaaatagggaactgcgcctctctgcctcaccccgcgccgctcgccaggccaccaagccgggaaaggcggagcgaggggaagccgaacaagcgggatcggccgtccgcgcgcggaggggttcctagactggagagcagaaactacccgcgtcccgggacttggcaagccccgtcgagccccgggacacaacggggaagggagagacaaagccgagccgcctctcctggccagcccggaaccgaaagtgggtccgtagagagcccagagtcctgggggaacagatgggcaaagggctctaggaggtgatggaactcaggcccgaagggcaggcagcccacaggataccaagccttaacgaactacgccagaagaatgggcgtagggcccacagcccctcacacaacccaggccaagctccctcgtacactcagaccaggagaagaaacagacacgcaatacacaagccccgctcccttggagcctacacttgggcgaacacaccactgctgtttgcagtatcccgagacaggcccggcaggcgtgagctaagaggcctcgggcccgaacttgggatttgaggctctctcacatcgccggtcccagcggcagcgcctgaggcacagccaagaccatccgaggtccccgggccgcgcgcaggtagcagacttcttcagaactgggggagctaaagagagagtgggcttagagcccaggcctccctggatcccagatcctcgcctccgcctacagccaagcccctcagcttttgcccagagctgctgacttcctcgccgcctccctgcgcaatgggacctagagataagccccaagcccgggtgctagtccaggcagagtcgggtgctagtccaggcagagtccagtgctagtccgcggcctcaacagagctgtcggctgggctccggaagcccacccggaacctgatggaggcagcgaattcctcagagcagaggacactgcggagaggctcgaatccacttcccacattgtgcgggaccgagcgcgcagggcgctctcgcgtggcctccttagctcgggttcagccgaggctctcacgtacacttcgttaccccttccccccgccgcagctctggtccttccttccactggctctcttctctggcctatggaaacaacgaactacttttcgcctttcaaggcccgggtcccaagccacctcctctgtgaagccgccaacaccctggtagctgcctctcagtgttttgcaactggcacggccctgtccctcggtccgcttctactagcgctgggggtgctgcgagtcttgcccactagactaggagctccttgagggcaggaaccgaatctgattcgtttccattttcccagcccccctgcgcggcctggcgcagaaaagacgcgcaataaacatttgctgaattgaattgcgttttctccttattttattaatccttccccttccttctttcattctttcttttcctccttccttcctccctcgttattttttatttcttggttatattcaattgtcatgtttttcaggctcattaaatccatttagagacaaaagaataaaaggcagaaggggaagggcgggggaggagagagggggaagggaggggagggggcaggccggagaagcaaacaaataacccgctttaactagacgggcggataaatggccccgtttctcctcagccccgacgcgcctgcttagctgcgcgccccgcgggcgccgcagctcgggtgggctcagccctggggccgccgcccccagcccaaagggacccagcggggccaggcccagggccgcgaagcagagagcggccggaggtgccagggccgcttcattgggattcatgagcgtgttgggcgggcggcctggggcttcgggcgcggggcgggggccgagtgggggggtgcgcacggcgggcgcagatgcccgggtgaccgacccgccgtggtccctgcgccgcctttgtgccgaggaggcgcgcgcggggacctaatccatcaaattgtctacaaattgtgaagaaaattcaaaaaccatatggtcgccagcgccggcgcgctctgggctgcggagggccgcggccgtgcccgcaccgggagccgcggggggctgggcccggctattgtcgcctgtcagcggccgcccaggcccattcgtcccggccttcatggtccgcgctccgaattacagacccatccatcctaagagagggcaatttttgtcgcccgggaggaaccagccgcacgcctgccccgctgccctgccgtctccttccttctctgctccttctctctcttctcctctcttcccattctttttttctccctctgtctctgtctccctttctccgtttctctgtttctctctctttttcctctttttctccgtcctgtctctgtggctctccgctttctctctctgcttttggagtgtctttctgtgctcctatttttttttcctgtttctctctgtctcttcgtttcctcctggacacgcacgttcctggctcgggcccgggggccccatcgccgcccgagaccagatgcgcatttctcacatcaattttgcggagaaagagagcccagcggcccggaggcgggaccccactccggtgacagcggctactcgccagcccagcgacaacaaaagcccggagagaaacccgctctgtccaggaaagtgaaagcggcctcagcccccgccccagccggccttggggcgccgcagacccgagagagtccttgcaagatccatacctctgcccccagcggtgtgccggggtgtggaggcagaattggttaatgttgccagaaattcacaccagctcccagacgcttgggcttacagttccaggtgcccacattgaaattcagcctggccttgatgcctttagcctttggcccccgactccccaaggatgaggccctcggggctagaatcgaaacttgggaacccaaggctccaccccgcgtctgactgagtgatacctgcagcgctcccggggctcagccctgttttcggggagtgcagggagaatgcccttgggtctggggtgggatgcaggaaatgcagggcaagaccccctcccaccctttgttcaacacaaattaatgttgtactgtggtgtgcccccacatacacaggcattttctcccagcatttcacggctcgttttttaccccgacctggcgaagcccgcttctctcccgatttagcagctgcctcaggtttatgggcaagaggcgcctcctcctgctgcttccccctcgcccttcactcttaagcctgtcctgaaaatcccccccaaatctccaaggctagggcgaccggcacgaagagcggcaagaagcccagcctgccgctgcttctcggaaacgggcccaccactcagacacggtcgccgccggttctagtaaaatggcaaagactttatttattggagaaagaggccttgggtacagtctagggaggagaggggaagggaggagcagggaaggggcactcgcagcccactcacatccagccaccctcctctggccaagtcgggtaggagtggggtgttcgaagtggcaagagagacccagagctgtggaggaggtgaggtgagggcttgggtcggcctcctctctgtctctgtcacatgcaaaaaaattctaaaaagagtacaaaataattatagggctttgggttctgttttcgatagttggttggttggatttccccctgcattgtccctaagagccggactccaacagtcagtccgaggaaatgcgggagggagggaggaatcttaaaaacagcattagtgggcattaggaggcagaaatggcatcgaaaacagacttttctctcagagggtggggaggaaagatcgattttgaaacttgcaagtcaggacctgactgcccacctcttcccctcccacatgaggaaaaaaggcccgaggaaatagaagtcaactgcaataaggccgagggaggcgaggaaggagcgggccggtgcattcgccacatgcagagaaaaatcaaaacagccggagctgccactcccctagaccgcagggttagtgttccccgccctggtttctgtctcgccctcagcaaacccggcagcccgagagctttgaaaacatcgaaatctccgagatttaaaaaataataataaaagaaaggaaaaatcaggctgcggtgggaagaacccgctatataggtttaaatatttatatagaagccatacagaattgcacggcgagggcttccggggcggcggaggccgctggtggcggccggcccggccggccagcctgggtttattgcttcgagagggaagaggcggctgccaggagccgagtccggggccggggacaggggaggaggcgggagttggcagaggaggtcccagctcccctcggcggtccggtccgggaggcgttgggctttcgagcgctaggagcccagggcggcggaagacccggggcgccgctcaatcgtccacgtcgatctcttcgtcttcctcgtcctccgagcagtcctggctgctggccggctggtccgtgagcggagaggcaggcgagagctgcagggcgccagcgcccggggccttcggggcgcctggggggaggaccggagagccgggcctcgacttggccctgccgcagccgccgccaccgccggctgtggcctccgagttctgctcgagttcggccagcgccacgatgtccatctgcccgctggggcccagtttcttggcggactctacgtcggccttcatctcctccaggtcccgcttgagcttagcgcgccgattctggaaccaggtgatgacttgcgcgttggtgaggcccagctgctgcgcgatttggtcgcgatcggcgggggacaggtacttctggtatagaaagcgcttttccaattcatagatctggtggttggtgaaggccgtgcgcgactttcgccgcttcttaggggtctgccgctgcccaaagatggtcataccgtcgcggcctgggaggaaaggacagtgtaggctcgcgttgggagagaggaagcccaccctggctctcgcccccgtaactccgtaacccacccaggcctgtccggcctgcagtctaccaatgttcccttctcagatttaattcagcctccaggaccagggcaagtcttggctatggcaaaccatctcctgtctttggtctcccagaagtccctaggaaaaattgttttggtctctgccccctacctaagagttggtttgaaagacccaaagtctctaagggtatgagaaagccagacagagacaccctaattgcggtgtgaatgttggttctccatcccttcccaatcacttcaactctaccctacccataaggtccccggcaaaagactctcgattccccacgccgagtagccgggctaagagcgcccaggacactgggaacgcaagggagcccggcaaagcaagcagactgcggaaagagcttggccacccttctcctgccaccccccagctctggcctacccagaggtccctgggaaataaggattgggtcccgtcccacatatcttcactcccataagcagctgctcaggctggaaggccctggcggccggagagggcagaggcgagcagaggcataggggacgaagcgcgcagggcacagggcgcgaggcgctgggtgcaggggaacccagcagctgcgcctaccttcggctgcctgcagaacgctgacctccagccccttaaacgtcttgctggcgagctcctccagcgcgcacagcggcgaggtctgcgagagcagcgcgcggcccgccaggggcaagccgccctgcgcgtgcttgtccgcggcggccagcaggtgcgccgccccgcacagcgagtaacttctccgcacagacggcttgttgaggatgtcctcgatgctgaacggcgtcagtggcttgttggagttggcaggcggaggcaggtggtccagcgggctgcgccgccgctcctcccccggcgccgccttgccgtcctccttggaagtcatctcggccttgttcggggtcccggccggggcggctcgggccgcggggacccagcccgcgggcagctcgggcgccggacggcgcgggcaggcagcggcgggtggaaaggaggccgcactgggcagggcgcgggccgggcgcggggccgattagcgcggcggctgaggaggggagaacagcgcggggccccgggaagagggcgctgacgcgggcgccgctgctgctggggcttccagcaatccggggccggagccggggcgcgctgcgcggggctccagtttcgccaaccccggtgctatttaaaggtgtcaggtggctcggcagtggctcctggccccgggtcctggcggccgcagttggaagagccgaggcgagggcgccgatcccggactgcgagggaggcggagagacggggcaattgactattgctaacaagttagccttgatcgcggtgtaatcaattatctgcagcggcacttctttctctttctctctcctttctccctttttcctctcttctttgcctctgttctctcctcctgttctcgctctccctccctccctctctcttctctcttctctgctccccccttctctctccttctctccctctccctcgccctctctttcactctctgtctgtccaatgcaggcggctgtaagttgggaagctcattaattagcgggccgggggtaggaggagccggctggaattagcctgcctaatgcgcctgtcagtccgggcgctgcgctgcgttcggcccgagctgtttgtaaattacattagctgctcctttattgcacccgaacctcgggcgactgaaaagccaccgcccccaccccaaactgcgagccgcgctcctggcgcacccgcctcccgccggcctagctgcaatgaccgcaccggcccgaaggtctcggtctctccgacccgggatgtggagcccgaaagagtggtgggaaccccagcccgggagggacgcggccgccgctcgggccaggtaggaccaggagcccgggtgggccccgctgccacccagagtggactttgcggagctgagatcaagagcccagcgcctctacctctgaccctcttgcccctcaccccactgcctgggcgacgcgcctggggagagggaatctgaagccctcctgcgctggcccgcaggaggtcagagccggctgcgcagccttgggtgggcgacgcgggaagggggtggaggaccccaggggttgggggagggggctagtcggagagctcagccttctccacgcggagaggcggaggagggaattgttggcggctctggacgcctctccccggcctgattccgaagcggccgccctacctcctccggcaatcttgctcactttcctccggcagccgctccccaggctggctggggccaccaacggcctgatgatgggcgtctgaagagtagccaggccaggtgccggggctaacggggccggctccgtgcctccctgctgcgctccgcccgggccccggccggggccccgctgccggccccgcctagcccagcgcccggcttgagtgcatggccaggccgactccagctgttccggatgcggggcgggggcccggcgggagccaggccgcggctggggctttgctctcaggaactcgcagggaggccaggcttccagttaggctggggctaaagaccttagggcccgggatctgtgaatatcgggagaacatgttgtgtgcattgttacttgaaggtgtttgtgtttttgaatgtgtgtttgtgtgtgtttctccatgcgtatatttgtgtaaatgtgtgtgaacctgtgggtatataggtgtgtttgaactcagctatttctttcatttccctgaggcattccagcagggctgtgccctcaggccttcctgtcttgctaccccattctgtttatgtggggccactggcctccttactaattttccatttctgcccttggagaaaggaggggaggacctagagggggttggagtccagggagaagggctgttcccctcccacacacacacagccctggccctggctttgtttgtaaactcctgggtgggcggtgaggttgggcattgggcagcaccgcttggaccagaaaagggcccagagaggccaaagtgaggatttgtggcccaggccaagggttggaatgggaagattaggatttcttgccccctctcccctcatatctaaccccagagagggagtgagctaagctgggctccggggcgggaagcaggttctttctctggatgcctcagcgtagggggcctctgcacagcagagataggtttcatgatctcaccttcagttgtttgtttggaattgtggctggcagctctctggggtaaaaaggacagtgtagggagaaagggttcttgtttggtgccccagttctgtgaatgttgggaagaacccctaccctctaactcatctttgtcctgcattttcggggtggcagtaagcgagtggggggaagacaaatgctcagaggcaggattggtgagaatgggaatcacagttccctcagagctgcagacccactccagggcagacctgtctctactcttctgcgctgccctgggagccacgaggtgctgctgggcctagcaacagaggagtcagagcctagagaccagcagaggcggaccggtgggagagggcgttggggagctgaatctgggtggcttggaagctctggggccaagaggggtcagtcctctcacttcctgccctcaggatcccatttcagccttttcctgccataaccccaaccccctgacccagagcctcaggcaagtgaggctagcagggaggcagggaggcccctctagatccaggaacaaggacccttggatcccaatagagagaaagagagagagagagagagagagagttcctcccatacttccacacccttcctgtcctcttcagtctttgcatcgcatctggtactagcccacaggataggactttaaggacaagccaatcccctgctgttgcccatctcccagatcctcaagaccagcggagttcagggttactgggaagctgacaggaaggggaacatgaactggggagcagaggggtccctctgcttggcgtgttcttaatgtcttatcctgctggctagtactgagatctttagtcttcagccacaccatgtcaaaaggaacacgacgtctcacaatcatctgctgagttacctccaccaccaacaccaaacctcttcttccctggctgacctgtacctgctgtccaatcctatggcttggctcttttgacctaattggttggcctcttggttaaacacacttgggcacaccatatggctggggtgtggagtgcagtgtgaggtgcagggatgtggggaagtctgtggtatcaccctgtgttttgttgttttgattcacccagatccccttatccaggccacctttggaaaccagcccacctgctacaccaaccttttcccaacaccgtggtcccacccctaccttcgctgctgaaaaaccgcattgtgtgggggtctggaatcttctggactcctgggaccccaatccgcttgcctcttgtacccctcttgcagagcaatgaggtatgttttgggtttgtgtactgacccctacctgcctcctctgccagacctgagggcaggagccttcctctgggtattccagttcatctcggaccttcgaagtcctaggagacaccgggctcccgctgaatatcggttgaatgactttccatagagcaaatggggtatacatgattgtgcaatgtggaggggaatggtttgggcccctcagaggagtttagagattaggaggattccagaaatgagtaacacagggtcagtgggggtagagccagccctgacattctgggctccaatctttctgcccaatcccctactgagcccccatgctggggcaaggcagacactctgggggtctccccacccccagtcagctgggccagcatcttctcacctggagctgaaagcagctgattcccagagtctgctccacagagggaatacctgtcttcagagcataatctatatgctaccatgatcctcaattcctgtttgctgcttaaacagccagggtccaggtttattctttctcagtggatagggaagggatcattctgccaaaaatctgctttccctcagtttagggaatattccagacaaagaagagggaaacagcatttcatgaattgccacaataaggggaccctgcagacccaaacaaaacaggttaaaccttaacacaggagaagaattcgcttaaacccccaaagactccattggattcactctggattgttttggtacccccattcatttccagattatttgtataagcaccagcattgactctcaggccagagttcctttagagaaaagggtctgacactgcttgaaacaagttaacttggccagcagtgcggatcattttactgttgttgttgttgtcccatgaagacctgctactctgacactctgtgtggaattcagagtgtttcttctcctatggaagtggactatgataaacggcctcctgccacccaggctaagtcaggactgcccacttggtttttacattttgccctgggccactgtctgcagtaacagcaacaataaccatgacaataaataccataagcccttaccttgtgcctggctccaggctaagagttttattcatttcatttattactcacaatctttctaggtagctatgctcttaccccgattttacataacaggaaaatgaggcccagagaagttaagtaacccatccaaagtcacacagcctgttttggagtgatcaggattggaacactgtccttttgttttgttttgtttcttattcaagtctgtccccttaattcctgaaccagggggttcttaaccagaggtcccccaagggctctttgaatgggcttcaggggctctgtaaatctcagaaatttatatgtgtacccaggtgggcacatttttctgggagcaatattatataacacccaggattctcaaagcgggtgrggatccagaaaaggtaaaggctggaatcaggccactgtagggaagggaggcaagccactggggaagggggatggaagcggcctcctcccaggcctggggagcagggaggcagctgcttcaaaattcaggctgggctccaagcctgctcctggacctgccctgctttttctggccacacccagctcttaggacctcagctggcaggaagacgtggggcaccatctgagggcaggacactcctttggtcccctccctgattctccccttccctacttcttttgtgagctgaattccttcagagcactgtgacaaggtgaccataccacatgcaccagcctcctccaggcactgtaatcctgcttggaaggagcggggagtgcttgccctttggaagtactgggggacatagacagaccactgagtgacagagacaggaagggaggagaagagacaagttcccagagatgctcaagtcctgggtgcccactctctgcagcctctagaacagccttctcttttggttccaagcttttgctcccctcatccaagggttgggatgatttgtgtcccttcctttcctggcacctcctgctctgtctctagtgctcaactcatttcctgggggaaaccttctctgccctgttcagctcctctgcgctccttagcacattcccctggatgtcactgtcatattgccaagaatgtgttgctttgtctgtctgtcctgcctctctctctccatctgttgtgaacttgggaaggaaggacctgaatcacctctccatgcccctatgccagcccagcatacaccaaggggtccaagcatttgttgagtaaataaactaaataaataaacaagggacaaaaatggagccagacagggaacttagcctgtgcctcagagagaggaccaggggtaggtgtattggttttgccagctgcctgcagatgcgtgcggtgctcctactgctcacaccaatatactcagaggggcccagaagcctcattctctaatgctttttggctatggagtgagtttcctgggttgtggacccagctgtggtggtgtggtctgacttagtaatgaacttccttcatttgctttttttgtttgtttttgagatgaggtctcactatgtcacccaggatggagtgcagtagcacaatctgggctcactgcagcctcgacctgctaggctcaagtgatcctcccacctcagcctcccaagtagctgggaccaaaggagcatgccaccaagcccagctaatttttgtattttttgtagggatggagtttcatgatgttgcccaggctggatttttttttaaataggattaaggccgggcgcagtggctgggcctgtaatcccagcactttgggaggtcgaagagggcagatcacttgaggtcagcagtttgagaccagcctggtgaacatggtgaaaccctgtttctactaaaaatacaaaaattagccgggtgttatggtatgctcctgtagtcccagcttctcggaggttgaggcaggagaactgcttgaacctgggagttggaggttgcagtgagccgagatcgcaccactgcactttagcctgggtgacagagcaagacgctgtcaaaaaaaaaaaaaaaaaaaaaaaaagaaagaaagaaagaaaagaaaaggaaaggaaagaaagaaaataggattgacccccccatcattcgttgggcccagaagcagagaggaagaatggacagaagatgggaggtgatgggcaggcaggagtggcaggaaacagacacccacacgccactccagtagcccaggggtctgtgaagaggataaaggaacctaagtgagcatgtgtgtgtgtgttgggggggggggcgcggtgtggggggagagtctggttctgttcctgatggaggtggcatttgagttgaactttgtaaaaccaggagcatgtaaataggtgcaggagcagggaccatcctggaggcaaagggaacagccgagcacaagcccgaagatgccaccctaagagaggttccagagttccctatagctcctccctctgttgtcctggcggtgagctactgggtaagggtgaaacccttagtctcttgtttatcggcagcaggtctgcagcctagagccaggggctgctggactcctgggatggctatttacttatttatggggtggggtgaggggtggggatgggatgagagaggctgctttcctgggcctacaattggagttcccttctccttgccatccccagaaactccaagagctgaccctctgtcttactaactcaaacggcccagaaacatcaaagtctgaccaaaaaccgttaatggtagtcagctccctccctttcacagaggtctcactactgtcggggggcgccgggcgcaggccgggcatggggcctgagcttaggccaggtggaaaggtggaaggacctagtggggacagacgaagagaccgaggagccgcccgcccggctaaatggacacaggaaaggcctgagtcaggcttctcataataaataaactgcacgtgaataattcagcagtcgcgcgggggccggttgcatcagcgccgccgccgccgcgcggcgcccaattccccgcggaggggagtagccaattaaggcacttgaaaagggagtcgggtggaagatcccccgcccaccagtatcctggatttacccaggtcgagttcagagagcctccccggtcccaaccccctcgggccccatgggtcagggggccgcctgctgggaagtgctacctcagctaagccgctcaggtgtcccgagactccgggcaagggaagacaggcggcgagacggagccagaataagggatgcggacgtctgacctgtggaaaacccagcatctgcagtgcccagccgcacagggaacgtgggcggcgtggttccaagcacagtgaagacgccaggctcggatctgtgctcagagccgggatccctccgggctgcttcgtcctggccaggactttccttgccctgaagtgaggcgccagggaagctgcagggccctccgccctctctgaactcccacgtacttgggcctctcccagcctttcttggacctgtggaagcaattcctgcaggaccagactcccctgtctccccgcggccccctaggtacactccgtaacttccgaaaccttatttcgtttgagcgaaacccggcccctttggctcttcccacttcccacaagtccctgggttcccgatcctgagggattgcattcatcccatctcacacccaccaacgctcaatccctccagttcctccccagccccttcacttccattaattaggtcgactcccttccttcgccgctccctcctgtccccactcagcctccctacacctatgcggcgagcctcgggccaagacctccgccctggctccgccagtcctgcgggggccggcatgcaccagacctcaaaagggatcttcacgggaattccgcatagccagatcccaagcctccagggaggccaccagccctcccccatcttcttcttcctcctccgtctcctttcctcttccctccgcctctacgtatttctttctattcgtttcttttcgtttggtgaggtgccacccgccacagccctgtcccctagggagaggcctggactaactttgccgtcctcgtggccttagcccggactgtgagtctcgagcggcttccgagaggcagctcgggtgtcttcgcagagacagatgaggtgggctggcgattccctagcctcagatggctctgccaccagccagctctgtgatcctgggtaagtctttcaacctctctgagtcttgacgttggtaaaaggcaggagatttagagaaggtgttgggagactaaatcttttcattcgtttgagaaagggagtcgcctgtgttgggacctaaggaggaagtgaggttcttgagaattctagatctgaaatggccgtttgttttaacgagtattttgggagcagctgataactttttatttttatttttattttttacagccgatggggtgccaggcattagaaaccttccctccaatcctcaccatgtctccattttgccaaagaagaaactgaggttaaggtcgcgatgctctggccagcatcacaggtgggattcgaacgcagatggggtttggagcggctcttgtgtttaagccacacagtctgacgttagacgggtgaatccagccctcgcagggcctggagtgacctaagccgagaggagctgggctgaatctccaggcgttcctttctttctgccctaggaaagctttgaaattcttattttcaggtaaacgattttggcagtgcccggagaaagatagaagtaagacctaaagaggaactttccgcatgttatgggagagcccctggggcgaggaggcgagggcagccttccccaggccaagggagcagccatcgctcttggatctgtttttcctcaagcgtctgtcctgtggggcctagtccccaagcggcagtcctggacctaacgggagaaggggctgggggaagagggcgcacccccagcccgggacccacagcagccctagccagtcccccactctctccctctgtaggggcctctctctgagatcgggtcctcctcctgcagggcagcagagtggaagccagggcctgggaccctctggctgggcaaggagggactggagtccggctcccggtgaccccgtccccagtgccagcggtggggtcgcctgtggcggcccggacaggccacgggtccctctccccaagtcccattacgttgtatttatgtttcattttatagtttttttttcctcctcccttattattgtctcactctgggggaggcaaaggatataatatattcatctttattataccaaatctgtgtgaagcatttaataaaacgctgtttccacacagccagggatattagtgtgagctatccttaagttaatgctcctggactgagggcgccgctgccacagcgcctgctgccggcgggtcgcgggaagcgtaggccctggccgccgcgctccccgcgcgggtccaacgccctgggtgcccttctcgcctgcgccttgaagcccccacgcccatcctagcgcgtctctctgtgacctctcggccgccagcctgggaggaggggtttggaagagccgaattcaagcacccttcctctcccctgccacaccctgcatttcgaatccgctgtgggccttggcttgcatctatgaaaatgggaagaattccatcactgcctccctctcagggatcttgagaggccgaagatgccttgaaggtggacaggattttttaaacaggaaagaaaaaatcgagaatttgtaaggtcaggatcaatgagggccagagagaaatagagaggctgcaggagtggtttcaggcaacacagagcgagctggaccccaggcgagcagacagggtgcaactccagtttgggcagaacccaggaggtttcggcatgcctgggcctcaccccagcccacgaagacagctgaacctagtcaggatctcggcctgtcacagttggccctctcataatcctccctctaggtaggaaaatagtctttttaagtccagttttacagctagcaaactgaggctcacaaagatcacgtggcttgtttgaggtgaacaaactaggaagtagtgtagctggtcacactgtcttccagactccatgcccctccccgcccccattctccagggtttttctgtaaaccttacattctgccttctacacacgcgcgcgcgcacacacacacacacacacacacacacacacatccctacctggagatgcccatgggaaggagaaacaccctcattactttctatatccaggcccactgctcagtgtctttcagagcccaccacctggcttcttatagggcccagatctgggcacaccattcttacttaggctgcttgtacctgtgctgtaggggagagggagttggctgtaaccaggcaaagccaggcagaaggagtcatgcaggacaggcttgaagtgggcaggtgagtctccctggctagaatccatactctcctaggaatctcagtcttcctctgcccccatcaccccatccctgggagtgggggctgcacaagctcaacacacatcctgtaggctgctggtcagagctcctttggagacttaagttacttgagaaatctgacagttcccccctggggctggctggggaggaggcacagactgtgtggcagggctaggactagggtgaggcatgtgaggtgccatatttaaggaaggcatctgctctcagctctgtgtgtgatcccttaggttttgtgccgtgggcatctcactcgcctcaccctagtcccagctctactgtgtggtctgggagttagaatcaagtccagtgaactgctgagaggggacagggaggctgatttcagctcatccttgagaatggctttctgaaggatcaaagtggaaacaatggaatgagcttcccccaacacatggagtatgcaagcagggcttagcgcttgctaagaaggaaaataatcacggtcttattgtcatcaccaatattgtcctcatttgaccatcactttgtgtcaagtaaaagctgtcatcacattgtttcatttaatgtatataaatatgttttagctgaatatgggatatcagagtctctgactttggggtcctttccagctccaagagtccattgttgcataagacaaagagcacttctgttgatttttgttggtttgatgcattgtcattatttgtggacttatagtcttatactaatggataagactttgagggcagggactgtgtctaatcacatttttttaaatgattccctctcctgttccatgctgaccacgggcctggggcacatagaagctgttcaataaatgtgtatcaaacaaacacatgagtaaaccagtgtctaaaagctgtctgcctacctggccatctgctttccgggctgtgaccgacagagccactagggtggccactgggggaacaagaaccacctctgcagtcattatcccccttattctacagctgagctgagttcaagtgggcatgtctagagcctcccctgacatcacatgcctagccctttgctagtttgtggataagacaagggccagcccaggttctgcctgtgcagaaggatctcaagactcatactggacaaatctcttaagaaaccattcagatggtgagggaagcctctgcagatcagagcagagaagggcctatagccagagaagcctggctggcaaagctgagactagagctagtccttgaagcatgagaagaattgagtggttggagggaagaaatagacaattcttgccgggtgtggtggctcacatctgtaatcccagcactttgggaggccaaggtttacttaaggccaggagtttgagactggtctggccaacatggtgaaaccccgtctctactaaagatacaaaaattagctgggtgtggtggcacatgcctgtaatcccagctacttgggaggccgaggcaagagaatcacttgaaccagggaggcagaggttgcagtgagccgagatcgcaccactgcactccagcctaggcaacagagtgagactccatctcaaaaaaaaaaaaaaaaaaagaagaagaagaaaagaaatagaccatcctaggttggatggggagcaagagcaacgggacagaggcaggaatggccacaatcattttggggagcaggcaggctagcctggctagagtaccagaagaagacaagtaggaaaaggcatttgtggaatgccttgaatctccaggcccagacccagagaacagaaaatggggttcagaaatcagaatccacatcctagagcctagaaaccaaagcctagaactcagaaagcaggggcaaagttcaggacccagtcttgtctagggcagtcccattagctgctgtaacaggatgccttggggactccaaactcaaggggcatgatcttattgggaaacaaagtggactcttctaattggcttagtccaggaaaccagagatctgacccaagcacaggagcaacttgggtctgcctgagacttgccctccaggactggcatgagcagctgtcttgggtcctcccaaatcacagcctgaagcctggcattatctgcagcccagcaagcaccctgagctggaacaggtgttgcctaccaatatacaccttcacacccctcaatcctcccttttattctctaatacaggtgggatctgagattttaggctagacccagctggggcaggcctctggagggtggagccatggtgcctgcagcagtgccaaacgagccagcgtgtaggcgttactgcgccggcctgtcgcggggcgcaagcctgccaaggagccggagcgctgtgccgcgtggagggtgtcaggggtggtattgtcggcgcacaaatgctcaactttatgtacttttaactagaggtgtaacagatggccccgtttctgtccaagccagggagactggtgcccattccggctgcagccaatcaatcccgtcactctggggggagctacaagctgggctgggaggcctggagccagcaattgcgcaaggctgtctgctcaggctggcccagtgcagcctccgccagccgctcagccatcggcctggggaggtaggaggtcaggcaagtggcagccatgcctggagcctggtcagaggcctacctgggagggagagcctgaaaccactcatcagaccccacatggccaatgagtacatcaaggtgccaactcactccactgtgtcctcattctcctgtggtccttgctcaggacctaactcccagatctctagcttcaagaagctttggatctatagccctgtagtgtcctgtgttatggacagcagacattgctcaggactgggggtgggtagtgatgccattgagaaatagtcacaggactgtgaaaggcttcaagaaatgcccaagacagcctaagaagaagagaaaacagcaggagccagggatcccagagctgagagaaactgtggattaatctattattatatttgtacagtcaacaaacacttagtgaaagcctactgtgagctaagacttttattaagcactgaggacacaatgatgaataagacacaattcctgtccttgagacctttttgggggaagacagacaagtacacgggtaattggagcaatgaactggggcccataaaatctccaaaaagactgcggaagcacagaagaagagcatttaactgcctgagagatccaaggaagattccagtagggggctggttctgagctgggttttaaaagacaggtaggagttttcatgggaggtgagggcgaagggcatcggaaagggaagggatggcatgagcaaagacatggtaagaaaacatggtgaagggaagtgtctgaaaagatgtgagtggaactggggtctgggatttgggagaaggagtggaggggatgaggctgggcaggggagggggcaggcctaaccctgtttcagcaggctggcaacctgacccagcaggtgtcttcccccagttggcccttctgtcaccttctgccccttatcctggtgccacagggaaggaaagtcctagcagggtgtaggcaagtggtccagagtgctccagtcctggcctgccttctgtcctgcgttgagggacagggctgtcaacgaactctcccctaaccgtctacccaatggacttctgagtctcctaaaaacagcatttctgtaggctccccacaaaggctttggaaccttattcattcattcattcttttatttaccaagcattgggcatcagctgtcttcaacgcccaggcaggatactgaggtagacagactattgtgctggacttcgagaagctcaagtccagacatgagaggaagacaggggtctgggcaggggtccttctgtttgcaagaaacagaggttcacttgagtaatcacaagaaaaaggaaggccttttgtattgaaaaacacggcttgtcattggaactgggcccagaaagcacgcagggaccaaagaagctctggggaccaacttctctctcctggtcaggtggaagggaaccccacagggtctctttcttctttatctctttcttcattattattaatgaaattaataattattatcataataagtggaggaagaataattgttaacaaattctgagccagatctattgatttccatgcttatctccattaatcctctttagaacaccgtgcagttagttaatatcattacccccattttacatatgagaacaccgaggctcaaggaggttaggtaagctgctccaggttcaagccaggaagtggcagagtaaggattctcactcaggtcagcctcccaagctccagctcataactgcttctgacccccgtgcagcaccgagagcttcctgggtttcctcataatttctcataaccgtgacttgcatttgaccagccggcctctctgagtctctctctacatcacctctgctaactgctctagtctctcagtatttcatagttcaaattcccaggagaggaaatcggattggcccagctcatcttttaacgccaggacacattgtaaacagctgcccagccaaagagctggctgggagtggagccatgtgcagtcaccaatcagcatctttgaaagagcaaagcacagaaataatacagtaaggaggaaatgcgaatggttacaggaagaaatgtgaggtgcaaaaagaggatgagaggaggcttcatggaggatagtttgtggtttgagtctcgaaataagaataggatttgaggggcagagttggagccaaggagtttctgaaggaggaaacagcatgaacacaggcacaagagtaggattgcatgagtcatgttcaaaggcctctgtataaactaggagagagaggtagaacagagctggaaaggtgggactagaatgccagcacaaggagtctgaactgaattcagtgggggtcatggaaggtctctgagctggagagggatgtgatcaggcacatgctttagttcggataaccatatgcccaaggtagttccagtttatgcctgctgttcctctgacattgtttttttattttaaattattattattttacagatcctcctttcactcctcctggtttgaatactaaagtatatggtcaccctagctttaggggctatgggctgttgctatggtaggaatagcatgagtgggacatagcatgagtgggacaagattggaggcaggagggtcatggatgagggtattgccacagttcaggtaaggaagggcagaaccagagcaggcagagaggacagaacacaaaggggcgtgggcaagagctgaggctagtggaaagttggccagacctggtgggtgaatgggcttgggaaataaggaaggagaagggtgaagtccaatgactcctaggtgttaaacttgattgttctttgttcgtttgtttgtgtgtttgttcgtttgtttgtttaaatacagacagggtctcactatgttgcccaggctgatctcaaactcctgggctcaagcaatcctcctccctcagcctcccaaagtgctgggatgacaggcatgagccaccatggctggccaggcttgattgtttgaaagcaggtggaagtctggaggcagggcttgttagggttaggggatagagatcatgattatgtttacgatgagtctgaggtgctccagggacgttcactcacacatgcccaacaggaagttggacattccagagtggaagtcagaagctgtcagttagagattcttccaagcagatagctcgttgaaaccagggaagtgatgagcttgctggagagagggaatggtagttcaagactggaaacagaatcctgggagatccctatatttaggaagttggaggaaggaaagaagtcagaggagactaaaaaggagtggttgggaagtagggaggaaatgaaggggagtgagtggcttggagatcatggcagttttgggttttttgtgtttttgtttttgtttttgagacacagttttgctctgttgcccaggctggagtgcagtggtgcgatcttggctcactgcaacctccgcctcccaggttcaagcaattcttctgcctcagcctcctgagtagctgggattacaggtgcacaccaccatatctggctaatttttgtattattagtagagacggggtttcaccatgttggccaggctggtctcaaactcctgacttcaagtgatccgcccacctcaatctcccaaatagaagttttttaggagggaattagtatcaaattgtgcagatcaatcagtgaggaagacagagtaataggccagtgggtggttatttggaggtcgcagacgactgtaagagactacagtgtggtggggatattgaatgaagagttgaatggcaaagaactagaggtgattacggcgattactcattcaaaaagtccaggagaggccgggtgtggtggctcatgcctgtagtcccagcactttgggaggccaaggcggaaggatcacttgagttcaggagttggagaccagcctgggcaacatggtgaaaccccgtctctaccaaaaatacaaaaaattagccaggcatggtggcatgtgcctgtagtcccagctacttgggaggctgaggcacaagaatcacttgagcctaggaggtggaggctgcagtgagcccagatggcaccattgcactccagcctgggcgacagagagagaccctgcctgaaaaagttaaaattgaaattaaaaaataaataaataaaaacaaaaagtccaggagaaaggagggagggagaaccaagagtgacaaggtataggagaagatgcttgatggagaaagttctggaaaggcacccgagatgttgagtctttggtaagaagaaggaactcttcctcctcagagacaggagagaagaaaggataagtgatgatccagggagattctgaggtggactggcaggtttggggacaagtagagtggggcacattgtttgaagaatgggctccatatttttggtcaagtaagagggacagtcctctaagagaggagagcagggagttgaaagctcatggaggaagcctgtagtggttgtggaattgtaacagggagtcacttacagatgcagagaaagtgttttccacatggtgacaaggaattagttgaggcagcatgaatgagtcagttttttcacctgctctagagtgcccaggaatgggagccagaaaagtaattgatggtgttgcttagggctggagcagggtgggcaggatggaagcaagcacagggttgaagtggctgatacagaaccagggtaagaagggagaaagtaaagccagaatgggggtgagggactgggagaaagcagacagtttcagggactacagagcaagtcaacaggaatgaatgaggtgagaagataagggattgggctcaaataagagaagttcagatcctgaaattctggagtttccaaggagtgaagggagtgagggtcatgccaattagtggctggacaggaagtgaaagatcctgtccagaatagctcaagaccttcaggtcttcagtaaccccatgctggggggcaaaggaggctggctggggtggctgggcatgaagccaatctcagcatccctagtgacattcgggtttgatttcctttgtattcatgcacgtggtatatgtccctttattaaacacaaagaacattcaaataattaaaataatggcccgtaatcctactcctcagaaattaccaatggtaatatgttgttgaatactctcccagatcttgatacaggtatcctttctaatcaaggcactggcagacttggtgttgtgtgagggccctttgtctttctttgtttctttctttctttctttcttttatttattaatttttttgagacagtgtcgctctattgcccaggctggagtgcagtggcacaatctcagctcactgcaacctctgtctcctgggttcaagtgattctcgtgcctcggcctcttgagtagctgggattacaggtgcctgccaccatgcccggctaatttttgtatttttagtagagacggggtttcaccatgttggccaggctggtctcaaactcctgacctcaagtgatctgcccacctcggcctcccaaagtgctggggttacaggcatgagccactgtgcctgggaggggccttttctcggagatggaggcttctagctgtgtcttcacatggaggaagggctatacatgcttttttaaaaaccaaaatgaggattacattatatagacataatggttttaaaaataaaccattttggaattttggtaattttggaataattttagatatacagaaaacttgcaaagctagtacagggtttccatacatcccttatgcactttcccctaatgttaacatcttacattaccaaggtatatttatcagagttaagaaatcagcattggtatgttattattgactgaacttcagattttatttggctttcggtagttttctcactaatgtccttttcttattccaggatccaatccaggctaccacattgcatttagtatacatactgttctgcaacctgcttgttttactcaacgttacattgtgaatgtctttcaatgatgctaaacattcttccacgccatcattttaatggctacatggtattctgttgatggttgtaccattgccaatccctactgtgggatgtttaggttgtttccaatttttcactcttataaacaaggcaggaatgagccccttgaagttaaatcgtctggactattcctgtttatttccttacaataccgtcctagacattgctagggataagggggtatactttgtggaggctggggatacttcttacccaactttcctcctgaaaggttgtattaatttaccctcatattggcatcaatcatgctttttgttggttttgtttatgacaaggagggatgtgggtgcagaccaactcttaagagtggctgtctctcaatgccaggcttctcgataccacatcctatctctctatcctcaactcttctctaagccacggagtctgtattggcccggactgcagttagcagctggggtaggggttgggtgtggccaggctatggcccctgggctctggggacatctcctaagctgggagctgggaagggggactgggcggctgcctgggctttggtctttttcctggagctgagctggccggagggaagggttgggttgggcagaggctgtaaggagagggggagctctcctctcccctcgtgaaagctgagaggcaggagggcagctccctgagccagccgggggacagcagacggatcgggagaaacgtaacctccccgagatgcatgctccagttcaagcaggaggcattaaggatgaaatatctcccgagcaacaattcatctctaactggtaggagagggactcgctgacatttagctgtgatcagggtctgcacatgcctgtctccagaagcctaacaggagcgtgaccgtctgcgtgtacgagagactgtgtgtgcgcatgtgtgtgtgtgtaacagagtgtgaggaactgtgtgtggctgtaatgaagcaaagggtatacgggtgatgtggtgtgtaaggaaccgcatgtgtgatgggatatgaaggcttatgtgtgactttcgcgaggctgtgtatgcatgtgacagtacgtgtgtgaggatcttcgtgtgattgtgagcatcctcaagtgtatgtgaaagctatgtctgtaatagggtgttggagcctgtgtgtgatgtcgagcagtgtggatgattgtgcgagcgtacgatagggtgttctgcaatactctgtatgaaagcaagattgatcctgaaattgggcttgagaccttatgagattgagcatgcgggatagtagatgtgaaactgacccccagactaagctagccaccgccacctcaggacaccgccagcgcaggagatggctttgagagagttaaaaagaggcaccccttctgtcacaaagacacagacactggtcatgctctcctggagccctcttgtgtggtgcagcctgcgtaactctaagtgaagaccctgtgtggagcccctgctctcttagagtccagtgaaattttctctaccatgacccttattatgatttgactgtctttaacaattttgtgtaaatattcatttaatatatgtatctctctcctgctaggctgtaagctccatggaggctgggaccactggtctaggtctgtctcgttcattgttgtcacaccggctcctagcccggtgcctggggcagagcggttgctccatgaatatttgttggatgactgaatggataagacagggtgcacacatacaagtgtgagtgcacaggcatatagaagtgtggacctgagccagggcgtccgtgtgcattcgctggatgtgtgtgcctgtgagtgagtgtcattgtcattcccagaagacctccctctcctgtttccctttttttttttttttttttttttttcctgagacagtctcactctgttgcccaggctgggatgcagtggcacaatcatggctcactgcccactgggttcaagtgatcctccctcctcccacctcagccccggaatagctgggaacacaggcacatgccaccatgccaggctagtttttttattttatttttttttttttgatggtgtcttgctctgtagcccaggctggagtacagtggagctatctcagctcactgcaacctccgccacctgggttcaagtgattctgcagcctcagcctcccgagtagctgagattacaggcacacgccaccatgtccggctaatttgtgtatttttagtagagacagggtttccctcccaagtagctgagattacaggcacatgccaccatgaccggctaatctctatttttagtagaggcagggtttcgccatgttggccaggctggtcttgaactcctgacctcaggtgatccgcctgcctcagcctctcaaattgctgggattacaggtgtgagccgccatggctggccttttttcttttttgtagagacatggtctcactatgttgcccacactggtctctaactcctggacacaagtgatcctcccaccttgggctcccaaagtgctgggattacagacatgaatcactgtgcccagctcctctcctatttgctaagccctcagccccagataggctacagacagacatggcctggagacaggaggacatttgagaaggagaccagctccctctttgcactgtgtttgggcaagagtggcaggagcagtgagattgggtttactggctggagaaacagcaaggggtcaaatccttccccactccaccctagatgttctcctgattcattgtccaggcctgtttgaggtcctgagaagagttctgggaattgggaggagcagatgaagacagcttcatctgctcctgctgctttaacaaaatagcttaaactgggtaatttagaaacaagggaattttttttgttttgttcttgttgttgctgttgttgttgttgttgttttttaagacacggtcttgctctgtcacccaggctagagtgcagtggtgcaatctcagctcacctgcaacctctgcctcccaggcccaagccatcctcccacctcagcctcctaagtagctgggactacaggtatatgccagcatgcctggctcatttttgtatttttttttaagagacggggtttctctgagatacaggctgcccaggctgatctcaaactcctgggcttaagctatgtgtacaacctctgacttctaaagtgctgggattataggtatgagccaccgcatccagcctggaaatttatttcttacagttctggagtctgggaagtctaagatcaaggcgccaagagattcagtgtctggtaaggtcttgcttcaaagatgatgtcttcttcttttttgtttttgtttttgtgttgagacggagtctcactctgtaacccaggctggagtgcagtagcaagatctcggctcactgcaacctccacctcccaggttcaagcgattcatgtgtctcagcctcccaagcagctgagactacaggcacgcaccaccacacccagctgatttttgtatttttagtagagacagggtttcaccattttggccaggctggtcttgaactcctgacctcaagtgatctgcccacctccacctcccaaaatgctgggattacaggcatgagccagcgcgcccagcctgatgtctccttgctgcatccttatgtcgggggaagggctagagagctcccttcagcctcttttctaaggatagtaatcccactcatgaaggcagagccctcgagtcttaatcacctcccaaaggccacacctcttattaccaccacagtggagattagggttccacatgaatttggaagggacacacttggatagtagctgggccacaggcacctgcgattagacaggccttggcagcacttctcaggagagaacccggtccatgttcttcaggcctgtcccagggccagccctttttttttgctccacactggggttcacgccaccaatccggcttctttttttttttttttttgagacagggtctgactctgtcgcccaggcttgagtgtagtggcgcaatctcagctcactgcagcctctgcctctcgggttcaagcaattctccagccttaccctcccaagtagctggcctgcaccaccatgctaggctaatttttgcttttttttttttttttttttgagacagagtctcactctgttgcccaggctggagtgcaatggcaagatctcggctcactgtaacctctacctcctgggttcaagcgattctcctgcctcagcctcctgagtagctgggattacaggcgtgcaccaccacccccccagctaatttttgtatttttagtagagacggggtttcactatgttggccaggctggtcttgaactcctggcctcaagttatccacccgcctcagcctcccaaagtgttgggattataggcatgagccaccacgcctggcccctgcttgtatatttatgtgatttacgtgggtagacatagcagtttttgtcactaatgccacagcagccctacccctaggcatggcctagtccctaagaaggagggccccgtggccctgcattttgagagaggtgtacacggggggacatagagatgaaaagggtcggtttggggtgggggaacatttggcagggaggtttgcagaagcagagagaaatgacctaagaagcatgaaggggacaggaaagtgagaatgttgggggctgaacaggtttggggcagagcaggaggcaaatggctcagcacagaggcctgacgatgccctcgatgggcggatgggaggaggctagagttcaccagagccccaggtggccatcagcacagctagacccactcctaactcctaaaatctggggtggttcctgaggctcactcatgctggtgctctaggaacagaggcgggaacctgctcagctagggaaatgagctcagagggtttactggagtgatgctctgtcccagtgtggccagagagaccacagggcagttgacagaagagactcaagatggtagttgtccctgtgtgaactgtttccccgctaaatgacagaggagggcgaagtgctctgccaggccccctgctcagactgtgctaatgggactctggttattggggcaaaatccgagggctgcactcacccggccgctgcgctgacccagtggctgcactcaaccggtggctgcactggcctccactttctcagcaaacacttgggcagacacagtgtcctgggggtgcctgtcagaccctagaggccccttccctacccacaggggctctaaactttcaccctcccttcctgcccctacccccatcctttcagagtctgaaaaggcagacagcttgctgtttgctctggaatctgaccttctgagcaggcagtaccctgcctctggcctctgccctctctcctagggccctcagtgctgcttccctgggggttcccagcctgtgcagagaccaacccctccgaggcagaagatatttgctctgctcctagctttgggaaaccacacgtttcatctcccagaagggggatcaagacagggccctaggctcctaggggatgggggaggggtgggcctgctctcttctgtcaccatcccccccaattttcaaagcagtttggctccatatatgactggaaccaattgcaggcaatgtccctgtcagggcatagctgtgctcatccattacctgctggaatctcgcccactgccctctcagggggaccggctcaggaattcagttgacccttgacaagttggaaaggccaagggtatcttttccttcctctcttctcagtaatgacttgatcagactgcaggctccttaaggataagagtcgagtcttattcatctttgggtcaccaagctccagtgctcagcacacggtagtcactaaattaaaaatggaacaaatgaatgaaaggaagagggggaaagggaggactgtatcccttttctctggtgatggaagtggggagaggttgtgcttattaactggtatgtctatggtcattatgtcttctggtggtggcaagcggaagctactagtttccctcccacctggccacctcccagggtcactccatcatccgtttgcccagcattggaggtgaggtagggggtaactactgagcatttgggctgtcctcaaagtgtaagcagccttgtgcacatgccagggagcctccaacccgattttgtctgtagatagtctctgccttgggcagagccttgtgccaggcattgagaaggaatctggcctcaaaacatcaaacaagaatccagttcccttcttcctacttcacccctccatgccatagcactctggtaaaatttattcagatctggggattggagagcaattccttttggattacatgatcaggtcaagagatgcgctttgggatctgaactcaatccagatgcatatactgggtcctttctctccccatgcagggactcaaaccatgtgtaactggaggagttgactgcttgcagaaaacataggtgcctatgcatccctgagaggacaagagagtgactggaggggctttggccagagtccaggggtggggagaggtgacagttcctgctgcctctaacatggtcactaccatcgctaaccttggaggaggtccctctccccaaatgcttcagagcccaagatctcactgtccgtggaagagatgtgggatatccaggtctctctctatagcacaccttccacaaaagagcaacgtatctccattctttctggggataacctttctggaaaatacataagccagaacaagaccattgtgatctccactggacaagccaggaggggagcagagcttatctcctgcccctaacctcttctccttcctgtggcactttccatgcatcaggattttttttttcctttactctctttctctctctttttttttttttatttgagatggagtctcattctgttgcccaggctggagtacagtagcatgatctcgactcaccacaacttccgcctctcaggttcaagcgattctcttgcctcagcctcccgagtagctgggactacaggcatgtgccaccatgcctggctaacttttgtatttttttgcagagacggggtttcactatgttggccaggctggtctcgaactcccgaccttgtgatccgcccgcctcggcctcccaaagtgctgggattacaggcatgagccaccgcacctggccttctttcttttttattactcaccactatactaacaaggacaggttttctatattggtaagtcctgccaggaaataccctttccttgcttcctttgggcttcagggaccaacctgccttcagggatcaactagacaaacccagcctgtttgtgctcagcaaaaatccaagaaaaactgttggcaggatattagtccccctgagagggcaaggcactgctgagctccccaggcccagccaggcaggcatctataactgatggcagaatgcctacagctaagtggccacaagttagttatcaactaagggccccaaagccagagcatccaagcaggcagaaagacagtgcagatttcaatggactgtggtcaggataggcaaggagtccagaatctaaaaggtcaaacagcaatgcaaacttgagcctgaggcaagaatgattgagtgagggggctgcaaggggacaagcggttcaagagcttattttgaccagatggaaattttgggtatactcggagacttctagacaggaaaaagggatctgggggtgtccttacaatactgagctggtggagatgctgcagggcctaatttcattattatggtgatggtggaagttgttgttgtagtgagattgatagtgacagagattgcagtaattatggtaatagcaggaatggggtgatgagtggtcatagtgttgccatggttaatggttgttgccaaggggataaaaggagtaaggatgataactattgttatggggaaggacatggtgatattgaagctagagtaacagaaacaatcattttaggggtgatggcagtatcagtgaatgatagtgacaataattatggtcacaagtgaagaggtgattgtgatggttgtggagaagttgacttgttatccagatgagggagtgataaggtgataaatattacattggtaaatatggactcttcatgtggtatcattgttctttctttaagccacataatatatgagataagcctgatcctttagaggagctcaggaggcatatgtcatgaccctgggtctccctgaacataacacctctgtgatcagacctgcactgtttttcctggtccactccattctgactgaagccaaagtggagattggagggtaacccataccctagcttttccttttgtttctccatcttcctaggggcctacttgcttcctaagatagtccttctccagggtccaatatagtaaactaaggcatagttgttcctcgtgggctgaagccagagcactctgtgtatgccaagcatctggctggaaaaggaataatgctgccaaaaggcccttgcagcagtaggaacagtggttactgtaactattattcttaactcatggctggtcctcaatctctaattggtttcaacctctggcaattcccttaatctgcgctggctactagccaaatgtggctattgcgcatttgaaatgcagctagtccaattcagatgtgagtgtaagatatacattggattttgaagacttagcatgaaaaaaagaatgtaaactctttatctctcttttttctttctgtttgtttttgtttttttgttttttggttttttttttttgagacatggtcttcctctatcgcccaggctggggcgcagtggtgcaattgtaactcattgcagcctcaaactcctgggctcaagtgatcctcccaccacagcctcctgagtagctgggattataggcacgtaccaccacacccagctaatttttaaaatttttgtagaaacggggtcttgctatgttgcccaggctggtttcaaaatcctgggttcaagtggtcctcccaccttggcctctcaaagtgctgagattacaggtgtgagcctttgagcctggacctctttatctctttaatataaatttttatattgttcacatgctgaagtaatattttgaaaatatggagttaaatgtaatataaattaatttcacctgtttctttttattttttttttaaatgtgtctactagaagatttttttttttttttttgagacaagttcttgctctgtcgcccaggctggaatgcagtggtgctgtctactagatgattttaaatacatatgtggttcacattatatcggatggtgctgccttagctcatttgcttttcgtttgctcagagaaacaaaaggaaagaaataaagcaaattccaaaattatagtaagttaagcacctaataagtttgtttctctttaccataaaatctaagcagaagtgctgcagggcagatgtggcagctccattccaatgtcagggctccagggtctctctttactatgctttcaccattctcaacacatggcttccatcttgaggtctaagatgactgctctagtttctataaccatttacactcagtgaaaaggggagaaaagggtgtcaactccttcatatgggcagagtccagaagcacacattacttctgcttgcatctcattggctggaatctggttacccaaacacacctagctgcaagggagtctgggaaatgtagtcctaaaccaggtggccatgctccagctaacacttggggattttattattaaaagaagaaagggagaatggctgctgggggacaggagggctattacccaaggctcatacctactacaggtctgaggagtggctgccatcactggcagcaggaggatggagcagataatctccaagaaaaagcctgttccgtttaaagagatttatttttatttatttatttatttatttatttatttatttatttatttattttcgagacatagtcttgctctgtcgcccagattggagtgcggtggtgcaagctcagctcactgcaacctctgcctcctggattcaaactattctccctgccttggcctcctgagtaactgggattacaggcacctgcctccatgcctggctaatttttgtatttttagtagagatggcctgggctggcaccatggctcacacctgtaatcccagcaatttgggaggccaaggcgggtggatcacctgaggtcaggggttgaagaccagcctgggcaacatggagaaaccctatctctactaaaaatacaaaaattagtcaggtgtggtggtggcttgagcccgtagtcccagctagtgggaggctaaagcaggagaatcgcttgaatctgggaggcggatgtgtcagtgagccaaaatcacaccgctgcactccagcctgggcaacagagtgaggctctctcaaaaaaagtaaataaataggccaggtgcggtggctcacacctgtaatcccagcactttgggaggcctaggcaggtggatcacttgagatcaggagttggagaccagcctggccaacatagtgaaaccctgtctctgctaaaaatacaaaaattagctgggcgtggtggtgcacatttgtaatcacagctactcgggaggctgaggcaggagaatcacttgaaccggggtggaggaggttgcagtgagccaagattgtgccactgcactccagcctgggcgacagagcaagactccatctcagaataaataaataaataaataaataaatacatacatacatacatacataggccaggcacagtggctcacacctataatcccagcactttgggaggctgaggagggcagatcacctgaggtcaggcgttcgagaccagcctggccaacatggtgaaaccccatctctactaaaaatacaaaaattagccaagcatggaggtgcacacctgtaatcccagctacgtgtaaggctgaagcaggagaatcacttgaactcgggaggcggaggttgcagtgacccgacatcgtgccattgcactccagcctaggcaacagagtgaaacttcatctaaaaaaaaaaaataataaaataaaataaaaataaatgaatagtgagctgagatcgcgccactgcactccagcctgggcaacagagtgagattccatcttaaaaaataaataaataaataaataaataaataaataaataaagacagcccaagtcccagcatattttcagatgttccttgatcagcatgattttaagagagggaagaaaggagacagtttgacaagaaaatgaaagagggagaatgaggacggtgcatggctggggactattgtttgagttgtaagctctcttgctgggacaacgcctgtgattccagtacttcggacgtttatactcaaggtcttcataggtcatgtgatatagaaacaatggctccaaccatttgttaagtaggttctgtttattaaactcctgcttgcctaccttcttccttccacttttgaccttccccacctctctatcaggtgcccaggacaggcacagaagtgaacccaggagacctacaagacctgtacttaagagagtagtgtgacttgggagtcagaaaacagccaaagacaactatccagacagccacagtgggcaaaggctgggacagacacactgggcatagctctgactttctctttgacccagatctcaacaaaaaaatactcaagtaaagttgatctccatgaagacaggacctagctctatcgtgtccaccaatgtattcctgttgcctggcacagaacaagcgtttggtaagagtttgctgaacagatgaatgaagaggagtgggctttctctgaagtcaggttcgaggttgagctgtgaggagagattatgtgggttttgaggttggggctccaccatgccctcccacctacccctccttttccatggcccgcttctgaaccttcaatcccatcctcccaggctctttctctccatgactgctggtctctcaagctcgggataggctgctctagggaaactggaggtagtgggcagaaaggtgaggcaagtgtgggcatttcctcggaggccggccctccctcagaacccactgccctggcagactcacctttgctcttggactgagacaaggcttccctgactgccgcctcctccacgctgctccttctctctcagcaagggtcagataaggagaccgcaatccgccctaggagaaagcctggccgatagaggggcccaaaccccggacgtcccccctcctcccatatatcttggtgtcaaacacattttatttcctcacgtctggggaccctggagcttcccctccaggattacttcctcctccggtttgttttccagctggagattctaggagccccacggcagggggcggctcctccgcttgtggcccaaaggcttcaaagggcccagagtggaatgccgcggccagaggctgctggcctgggaggaggggtggaggcatcgcaagcccaaggtacgggggctctggctgggtaccccactcattttcaagctgcccccccattggctgaagggctgtatctatgggcagaaggtgacttcaaaggtcagcaatgggggactccctaccaccccctcccccggggctcagagggggccaggaagtgcccccccccatcatgatggattaggtgcctaagagccatggcgagcttaaggacgggagaccttctcttttttcatggggttcagatttcacgatttgtggggggggttaaataattagtaatttgtgattaagccttttcatggatattttgtttctttgttctgtgatgtcgcctggagccatttaaaaaatgacttaatgacaaagaaaaaataattgctctttgtaactaatgactgtgtcagaacttggaaatcaccaaagcctcggaaagtagaaaccgagtagggggtgggggttccactctccaaggaatcagatcagcagtcgtaaagtggcccgggatctgcttgcacctggatggcccccttcccttccctggagccagcagccagcacctgcaggctcagcctgggggcttcaggcctagggtgccttaggtacctttgcccctgggctgagaggaatggtcagaatgccctaggccagcctagactgcaccagctcagcctcaccttggagttgctccttccttcataaaatccccctgtaaggagacttctccccctctggtggaggagcaaggggtagttctgtcctcacttctccactcctgcagcttcctatagagctccggagttgccctgggattctggattcttctgggtctttactttttttttttttttagtacttaattgtcaaataaagattgagcatattcacagggtacaatgtgaggatatgatacactcacccgaatctttatggctcctgtgtccctacctagactgagctctccctgggggacagaaaaaatgccctctccctcctgatgcttcagcccctcctcccctcatgtacgctaacctaccttgggctggggccctgcagagctctggaccacttgaggcagggatctggcagggcccaagccccaaggactcagggcagcccaccgcctgctgtcacccccagccgcctcccgcagcctctggggactgggccgggagatggggaattgctcacacagcagattccactcctgttcccttcccaggccctcgctccgatctctcccagggggaaatgctggggggagaaaaccgttaacttgtgccttctatttggttttcctctggttattgtttaaaatgcagagattatgaggtcaaagtctcccagccaatatttttctaatgaaaaatgtagtaaggcacgactgagtaatctaatctataagttaagcgttccacacagcagcgattttcaccgacagaacttcaataaatcttgttttgagaaaaatgatatgaggctgatgttctatttttgtcaatttgaatggactcccctgcccccccagtccccagaaacactgcactgcacccagccaatctccttcttccctcccccagagcaggctggatgaaagtgggggacaagaatgatagggtgggaggcctgagttctgacccagcttggctcagagggtctggggccacaggcctctgcttcagcccacctggtctctggggctctcctcctggtgaggggcttggcaaagggattgggggtcttgaaggaaaaggcagccagtggtctaggagaatggtgtcgactttcctagccgtggggtcaggactgcccaggcaagcctgtttccccgagctgtcccaagactgagcaaagaacaaacagcagccctcgaaccttcccttgacccccaacaagccattgatagatctggcaagaaaggcctcacctcaggaagaactggttaaattcatcttcaaagctgctgttccccttcgcctgactcgaacgtgggagacaggccagaatgtagtagtaaactcactcctaacaaaggatgcgtgtgtgtatatgtgtgtgtgtgtgtgcgcgtgcatgtgtgtacatgtgtgtgcatatgtgtgtgcatgtgtgtgtgcatgtatgtgtacccatgtacacccgtgtgcagggtgctgggaaggaagcaaggctctctcgatgaatgtgcagacctaaggctgtcatggagggtggctgccaagattaaaatcaagaaagagatttctagcccaaggaatatgtgggaggccagaagaaagaatatggagctgtttcaagaaactggagaagctgtaagggcagccagaaaggattatgtcacctcatcagagagaaatcaattaggagaggcttcacaacgagagctcctcctccctcctcccagccacgatccaccaaggggaacggattaagacagagatgtctggagacagaaaggtttttctgggtggagatttcagcagcatttagatttggaagagccagaggctgtctcactctgaaatctgcaggtatggaaaccacagacagaggtaacttgacctctcagtgtccaggagagctgagtatagaggcaggagggctggggttggggtctgaggatcaggggatccacgttttgacattaccaacagtctgacttcagacttcagacctcagtttctcagctataaaataaggaaaataagaccagttctacttacctgagagcaaggttagcagatcaagtcagaagatacatgtgaacacgcggtttaaaatactgcacaaggctgggcacggtgactcacgcttgtaatcccagcactttgggaggctgaggctggcagatcacctgaggtcaggagttcgagatcagcctggccaatatggcaaaaccccttctctactgaaaatacaaaaattagctgggcatggtggcgggcgcctataatcccagctacttgggaggctgaggcaggagaatcacttgaacccaggaggtggaggttggcaatgagctgagatcatgccactgcactccagcctggatgacagagtgagaccctgtctcaaaaactaataataataaaataaagtactgcacaagatgagctatggataaaattattactgaattgggtgaaggaaggagctctgggaacaactctcaaagccccattatttctctgggtcaggttaaactggacgacaaggatgggcgactgtcactggcctgcctctggagtctgagcttagagattcctcatggaataagaaagggatttgcacatttctctcagctgccagatgtgcaaaggatccacaatgtggagatgactccaggaaaggctttgggctggtggacatgcacagtaaggacaggggcctgggggctgggaagggggcttgggaggggaggagcttttgaagggaagggccccttgtctctgcttaaccaagtcaaggcaccaaagctgtgccccctttctttccaggtcttaccaattctccctccccatcccaccctgtgtcattgcaggggccattctaaggctcccagcagctccccagaaggggaggggtgagagtttttctttaacctcaaacatcaaacattagccctaagtccccttttgtcttctgacccctacccaccatttccttccatttaactgttcccaccaatggttcccaggaaagtcagctcaagcccagggctgccagagccaaggggaagtggggaggtagtggggaatggctgaggctgctcaaagtggcctggagctactgggcagcctcagaaaccctggagacccaattcccaaggaaaatgggaggtgaaaggagacagggtaatatttcttgcatgactagggtgggaagatgaacccaaagcaaagaatctctccaatttctctgtgcctgggtatggggagtgggtgcagcaggctccagtcagagctaaaaggtctgcccccaccatgagtttgagagtccctgtggcctggctctggtcctcctcttgcccccaaagagatcccaaacccctggaagagtatgcagctacagctccatagaccaggtactaggagcccttgaaagctgggggattgtcgggggagagggaattgcagttggaagagaggggagcttgtgcaccttaatgcccactaaaaattcaaacttttaatcacacaggaacatttttagagaaaattaaaaatatgatacaaagcactaggtatagaatgatcccatttatggagcaaaaataatcctatagtttgcttttttttttttttttttgagatagagtttcactcttgttgctcaggctggagtccaatggcatgatctcggctcaccacaacctctgcctccccagttcaagcgactctcccaccttagcctcccgagtagctggaatcacaggcatgtgccaccacacctggctaattttttttgtgtgtgtgtgtatatatatgtgtgtgtgtatatatatatatatatatatatatatattttttttttttttttaactagagacagggtttctccatgttggttaggctggtcttgaactctcgacctcaggtgatttgcccacctcagcctcccaaaatgctgggattacaggcgtgagccaccacacccagccttttttatatttactttttttattatttttattttttttgagacggagtcttcgctctgtcgcccaggctggagtgcagtggcacgatcttggctcactgcaagctccgtctcctgggttcacgccattctcctgcctcagcctcccgagtagctgggactacaggcgcctgccaccacgcccagctaattttttgtatttttagtagagacggggtctcactgtgttagccgggatggtctcaatctcacctcgtgatctgcccgcctcggcctcccaaagtgctgggattacaggcatgagccaccatgcctagcttttttttttttttttttttttttttttttaactactggaataaaaccagcaaaatacagacagtgataatttctgggtggtaagacttcatatgatattattttctgtatacttctctatagcttccaaattttctaccatcaacatttacatttataattaagaaattatttaaaagattaagaagataattctgggattaagctgacaccctaaaagtagacccagaattttggcagaccccaggccctctgcctagtcctatgtctgcttcggggatccctggctggccccttctagggcagcccgtgaggccgaggcccgccagctgggagtcagctgtgcctggagacaatccgtgtccaatgggaggtggggggctcatttccgagctggatgggggccaggtctagggccaagcagcaacctggggcaccggtattcacagctcctccccagcctctgcgcctaaaaagaggacagaggcctcagagtcagcttctgcccagaggatccccagccactaccccggtgactggttctggcccacagatacaggagagggggtgaagatggccatatccccagttctgaggctcagtgaggatttatggagctgtgtttaggcctagatttgccccattccctctctcaccccaggcctcccaagaccgtggactcagggaacgaatgactaatcagagttgggagggggtcctacagggttgggcccagggttttggaccaaggagtctcagttaatcccagctggggtttagtaaaaatatggctaagaaattctagcccaccttcaagtattcagctgtgttcaaggaaaaactcacacacacacacacgcacacacacacacacacacacacacacacataaaaaaggctttttagactatttatttatgagcatgtgtcaaaattttatttcaatcttgctacaagtgaagagacctataaaaggccagccgcttcaagatgacttcttggtagatacatttagaggcaagaagagtggttagcagcattgttaaaatgggcatacaaaaataatgtctgaataaaatatataaaactcttccaaacggcagggtggataggaaactggttcctgagaagaaatctaaatcctgttaaaagtttatcggaaaattgcttaagcattttaacaacaaggctgatttcctcccagaaggaaataatgaattacacttggcaaaaaggctgtgtcccagacaagcttgggggcctttcgtcttcagttagaaattccggcttggctgctgctccagggctgcagggtcaagcatgaagcaattgatatgtaaattccaggttcctgtgcgcccaaacttgtgccgggcaccaagacgagaataagacagcagggcagaagttgtggagaagctgaattgtctctctgcaaggaaaaatttcctgacacaagtatctgtccaggcaagtaccccagaagttctgagttccctcattttggaggtaagcaaggccgcagaggaagcaggaggcctcatggtacagatattttagaactacttacccaagtgggggacctggacctctgacagaatgccagatgattttcaatggtgcattgacaagacattaaatcactctgaatttcatagtgagaaagctatttccttgtcaattctctttctttatttccctgttttttttccactggaacttgggtttacagaactggattaatcacattccttgcttcatgatacactctcaccattggtcattgcatggttttcttttctttttcttttattattgttattttttaagacagtctcactctcgcccaggctggggtgcagtgtcgcaatctgggctcactgaaacctctacttcctgggttcaagcgattctcgtgcctcagcctcccaagtagctgagattacagatgtgcactaccttgcctagctaattttgtatttttagtagagatgaggtttcaccacattggccacactggtcccaaactcctggcctcaagcaatccacctgccttggcctcccaaagtgctgggattacaggtgtgagccacagcgcccagcctagattttcttttaattagtttaaaatattatcataagcatccatgactttatcacccaaaacaaaatctcagaccttgacaataactgacaactaaccaaatggtaccacatcccattctctgcctcccatctcagccaactcacaaccctgaatcccatagtcatcattcccttgctttccttttaatagttttatagcacttttatttattccttaaaagtttattttaaattttaactgttctttattaaaaaatagtatcaggctatatataactttttttgacttggtatttcacataatattatattgctaagagtcatccatattattgcatgtcacttaagttcctttgttttgactacagtataatattccattgtgtgagattagctcaggctattataaagatatcactttccttacactcatgagcacagcagcattattcacactcaccaaaagctggaagcaatccaagtgcccagcaagagatgaataaacaaaatagccaggtgaggtggctcatgcctgtaatcccaacactttgggaggccagggcaggaggatccctcaagcccagaagttcaagaccagcctgagcaacatagtgaaacctcgtctgtacaaaaaataaaaaattggccaggcagggcggtgtgctcctgcagtgctagctactcaggggtctgaggtaagaggattgcttgagcattggtggtcaaagctgcagtgagccgtgatcgtgccactgcattccagcctgtgcaacagaatgagactttgtcttgaaaaaaaactttaaaaaaatgtagtatatacacatacaatggaatattattcagccttaaactctgacacatgctgcaacattgatgaaccttgaggacattatgctaagtgaaataagccagtcacaaaaggttaaatactgtatggttccacttacatcaggtgcctagaataaatgcccagggatgagagtaggatggtggttgccaggagctggggtggggagaggaatggggattatcgtttgataggtacagagtttcagtttgggaagagttctggagttggatgatggtgatggctgcataacaatgtgaatgtaattaatgccactgaactgtacacttaaaagtagttaaaaatgggccgggcgcggtggctcacgcctgtaatcccagcactttgggaggccaaggcgggcggattgcctgagctcaggagctcgccaccaggctgggcaacacagtgaaactccgtctctactaaaatacaaaaaatgagccaggcgtggcagcgttcacctgtagtaccagctactccggaggctgaggcaggagaattgcttgaacccgggaggcagaggtttcagtgagccaagatcacgccactgcattccagcctgggtgagaaagcgagactcctatcaaaaaaaaaagtggttaaaaattgtaaaattttatgttatgtatattttataataacaaaaacatatctttcccatcaatgggcatttgggttgtttgattcttccagtttcctcgaagagaatgtctcagtttggtgctagtatgtctttaacacctctctaacgtgtgtttctcttctttccctttttaacagagaggaagattcaactgcaagagctttcagcaggcaatggtgtccaactagaatcgaaacacattgttattgttttacttatttttataattactttttattttggcaagtaacgggtggtttcgcagttactgtagtgctagaaggcttttttaaaaaaacaataaacatacttgagtaagaaatagtaagttgatttaaagaaaaatatcaagtaaataacattttaggtagaatatggatttggcatgaattgtgacactggtactcgaatgtggaaagtttgggaaacatgaatttagaggttgctcagactcttgttgaaccagtgatctctgagacccttccaaggttaacaatgtctgatattctggatgtacagacagtataggtcataggagctcagcaagtgctaacatggacagggaaggctttgtgggacatgatcttggtcttaaagaacgagtaggatttaagtgaagataaagacgaaatcagagttcttccaggcaaagaaaataacatgaaggtcaaactaaccaaggtatgcttaagggctaataagtttgcctggtggaagcaaaggatagtgatagaaaataaaggaaatcaccgggcatggtggctaacacctgtaaggccaaggcgggaggatcacttgagcgtaggagcttgagaccagcctcggtaacatagtgagaccccatttctaaaaaataaaagaaaagaaaataatttggaaaatctaaaaaatctgaggactttagacttagttgtgagggtatagggagtcacggaaagttcttgagcaggtaagtgacatgatgaagggactcagatcttgagcaggtaccacttggtttttggtgaaaatttcctccttgtccagcctgagactgctgactagttcatttatctctcaaatatttatcaaaggcttcccgtgtaccaggcactgccctgtgaattcagtgatgcacaaaaacatactcctcatcctacaatcctctagtgtgtgagtcaggcattaaatgaagtaaccacgcaaacataaaattccaagtgtcgataagtccaactaaagaggtgctcctgatgccaggagtgcatatagcagtggggaggcttacctgccttaggagtcagggcaaggctgttctgaggaagccacagctgagctgatattgaaaggataagaggcattacatgggtgaagagaagagggaaaagcatttcagacagggaaagcggcatgccccaaagccctgtggcctgcagaggaaagctgggggaatcaggagccccaggagggcaggaggggatcagggaaaaggtcattgtggctgggtatcagggaacatggtgtgaagagaggctggagccccgcaggctctaggaaggtttgggagtttatcctagaagagaggtgccattgaaagggctgtgacatggtcagttcagtgtttatttacatttcgagacagcatcttgctctgttgcccaggctggagtgcagtgaccagatcacagcttactgtaacctctactcctgggctcgagtgatcctcctatctcagcctcctgagtagctgggactacaggcatgtgccaccatgcctggctaattttttactttttgtagagacagggtctcactatgttgctcaggctagtctcaaattcctgggctcaataatcctcctgcctcagcctcccaaaaagtgttgggattacaggtgtgagccactgtgcctggcccagattattgtttaaaataataataataataatcagggccgggcatggtggctcacgcctgtaattccagcactttgagaggccaaggcgggcggatcacgaggttaagagatcaaaaccatcctggccaacatggtgaaaccctgtctctactaaaaatacaaaaattagctgggcatgctggtgcatgcctgtaatcccagctactcgggaggctgaggcaggagaatcgctgcaacccgggaggtggaggttgcagtgagccgagcgtgccactgcactccagcttggtgacagagcaagactcagtcaaaaaaaaaaaaaaaaatcaaaccttctggtacatgtgaggaaggcagggtgacatgtattcatgtctctctctcaggcagccccagaacactccagacgctggagattgggaggctgatctgaagagagtgtgcaggaggctgaggtgggcctgcagtggcagcaaagaaaagcaaaggggacagggtgactgtgaggatcggacagagtataagctgggcaggggccagaagggacccatatgaccggggaggggcacatgaagaggacacatgagtagggtactgcaagcagtgcgggcagaggctggagcctggaagagaaggcagggctggagtcactcccagaggcacaaagctgcggcagtaactaagtttgcccaggagagggctccaccttggcaaaatggctacgtctgaatgactcaaatggtctctgaggtcccctggagaaaagatgtccaaggacgaggccttggggaactcctggcatgcttggaggaaaaggagccagggacagtggttgagggcaagctggaaggggatggaccgagcaaagacaccaggttaggagcaggaaggggaccaggaagagcacagagctgcagtgacagggtttgtaagtggggacggagaagggacagccacctgggtgattggcaagcctggaggctccgcaagtccaacccccaagtctgcagggggcagacaccatgctttgttttcaccttctcctgggtataacgggcgagacagtggtagtagaggttggtggaggccggtgggagaacactgaccaggatggtggaacgaagctgacctgaaagtgaggacccctcacttgacccctacatcatcccccttttctttctaagcatccctgggctttagaaaaatagggagactgagaagaaaacttctctctagaaggagccagactttaggggctggagggagaagagaagaggaaacctgaacaggaaccccatcgtgcttttctttttttttctttttttttttttgagacagagtctcactctgtcgcccaggttggagtgcagtggcgagatctcggctcactgcaagctccgccttccgggttcacgccattctcctgcctcagcgtcccgagtagctgggactacaggcgcccgccaccacgcccggctaattttttgtatttttagtagagacggggtttcaccgtgttagccaggatggtctcgatctcctgacctcgtgatccgcctgcctcggcctcccaaagtgctgggattacaggcgtgagccaccacgcctggccacccatcgtgcttttcaacatttgtaagcaggcggggaataaggtaagcttgtggactccgaggctcgtgtgcgcaggcgcacatgcatgcaggtacccacatagacctgtgctgacttgaacacctgcactcactgattcacacgcgcatcctcttgaacacatgctcacacagccctcattcacatgcctcttcccttgccacgcacacatactcatactggcatccctcctaaacacatgttccctcttaccctgccactccccaaccacacacacacacccaggagaatcctaggaagctgttcacaatagtcctggatctccaggaatgtgtgtgattacccacgatgtgtgtgtatctatgtaagatgcaattcagaggggtgatgtgtgggtgggtggggatgggggataccccaagatgcgatgtgtgtctgtaaggggatgaatgtagtaaagtgtgcattcattcattccatcattcactcaaccaggttatggaggcgccaccatgtcccaagcactgcacttggttaaacagtgaaccacatagacactatcactgctcacaatctaatgagctccagagaagacaggccctgaggacatagctgggaaatgccgtgaagggggaatgccatgtactatgggagctgggaacaggcaaagtgacccagagaatttcccaagaacagggtgtgtaccttagtgaatgagtatagacactggtctggggggcgcctctgggatgtgagctgcatgtcagcaggttggaaggtattttggtggacatgaggattgggaggtatagggtgtgatatgtgcatgtgtgtacagctgtgtgtgcatgggaaggagtgaggtgtgtatcattatcagaattattggagcaaacaggctctttattatgtgtataatttccctgcgtcccatcggttccctctgtgcagggggagttggagtggaactaaaccaaataggggatttagcaacttcgagaggctgtggcagagcttaaagtgctgctgatagatggtggtggcaggcatgggagagaagaggtgtcaccagcagtggagagggaacagaagagggaattttgattgggctgggggcagggaccggtgtccggtgcccactttcagagaggaggtctggggacaagtgcaggaactggccgttctctgcaataacctgagagaagaaaagggatggggagagggaatgcccaatacagctcagtcctgcctggggcagggagttcgggcctgagggcgtggctgcacagcctctcttcttttaggggtctcatatatggacccttatatatgaggtccatatatttcgtgcatctcatatgtggaaaatggccctgaagtttagtggaaataagtcatctcagtgttgagttcaaatctcagctctgcagtaggaccttgggcaagttacttctcagagtagtgcaataattggagtaataatatttactttgcagggttgtggtgatcagtagtaacatataaaaactttggcaccttggaagcactcaatgaatgatgatgttttattaaagatattggatctactttgggaggctgagacaggcagattgccggagtccaggagttcaagaccagcctgggcaacatggtaaaaccctgtctctacaaaataataataataataataataataataattataggccaggcatggtggctcacacctgtaatcccaacactttgggaggccgaggcaggtggatcacttaaggtcaggagttcgagactagcctgaccaacatggtgaaactccaactctactaaaaattacaaaattagctgggcatggtggtgggtgcctgtaatcccagctacttgggaggctgaggcaggggaatcacttgaatcgcagaggcggaggttacagcgagccaagattgcaccattgcactcctgccggagcaacaagagtgaaactccatctcaataataataatacataaattagccgggcatggtggtgtgcgcctgtagtctgttactcaggaggctgaggtgggagggtcgcttgagccctggaggtcgaggctgcagtgagctgagattgcatcactgcactccagcctgggagacagagactctgtctcaaaaaaagaaaaaaaaggctgggcacggtgactcatgcttgtaatcccagcactttgggaggccaaggggggcggatcacctgacgtcaggagtttgagaccagcctggccaacatggtgaaaccctgtctctactaaaaatacaaaagttgctgggtgtggtggcgcatgcctgtaatcccagctactcgggaggctgaggcaggagaatcgcttgaaccccgaaagcagaggttgcagtgagccgaggcctcaccattgcactccagcccaagtgacaagagtgaaactctgtctcaaaaaaaagacattgaatctgttcgtagatctacatcatctacctgccaatcaatctacacctctcccaccctgtaagattaaaacccagcctgttcctacccaggcttgtgggtacagctccttctccctgctctggggctggagaaatgtttctgaataacggtgtctgtttctctggctgcccctccaagcatgtttctatcaccagtttcttttttcttctctcttttactttattttttcctgcttagccaagtagaaaataagtgtaaagaagcaggagaaagaaaacctttaatcccaccactcagaggcaattataaaaattgctaacatttcttcagtgccactttgtatcaagttttgtatccaaatgcttcggatgctttatttcatttcatcctcacaataacccagggaaactggtaccatgattatccccacttaatagaagctgaagcatggaaggtaccttgcccaagatcatacagctagtaagtgatataagaaggatgtgacttgggcaaattccactttccttccggtcttttagctattctgtcttctgaggactttcctgctggcttcctatagcctcttgctgtcttagttgagccagatctctagcctttactttacaaatatttattgctcacctcctctgtcttgggcatcttgctgggccctgctgggaggcaggaggcagctacagagaagctttccagggcccagctgccagcagtcctttagagcaaggaccagagaacaaaattattgcccagggataaatcaatgcagaagaagcagcaagagatgctgccagcaggggcttgggaaggaggttccctgaggattctactctcagctgagccctcacctaatgcccacttctcccaccaactcccatcactgcattctatctcttcctggggcatggccctgatacccaaaggacctgagaccctggatcccacagccctggggctgcagcaggcctgcaagctcattctcaggatcattgtagcagccaaaatgcctttctgccctccatccagccaatccaccagtgaccatatgaatcacctaaagctgactccattttgtccctgttctgctcaaaagcaatggcactcagttaagtaagaacttctcagctggctggcattcagagagggtcttgctgatctaaactcaaactgcctttgcagccttctttctgctgcccaccagctcacaattacaccccaactggaaaactccttctcaacagctcttccttattaacaccccacctttccttcaagtcctataggaaatggctcttcctacaaaatctttcctgaacatcctccccaagcacaatgaccaccaggcatatctcttcctttgaggtccatagtcctttatactccttcctgggcactaatcttaggctgcctgatagcataatgttttttatctgtcaggttgtagcataattattttttaattgaggtataacatgtacagtaaagtacaataatcttaagtgaattttttttttaagatggagtcttgctctgtggtccaggctggagtgcagtggcatgatctcagctcactataacctccaccccctgagttcaagcaattctcctgcctcagcctcccgagtagctgggactacaggcgcacgccaccatgcccggctaatttttgtatttttggtggagatgggatttcaccatgttacccaagctagtctcaaactcctgacctcaggtgatctgcctgcctcagcctcccaaagtactgggattacaggcgtgagccaccatacccagcccttaagtgaattttaaatgaatttttatacacacactgtaacttctaaccagatgaagatacagcacatttctagcgtcccagaaggatccttttgcctctttccccaggatctcctattctttttttgaaataacttttatttttaaatatgtatttctttatttacttgagacgccgtttcattctgtcactcaggctggagtgcagtggcgcaatcacagctcaccatagcctcgacctccctggtcagctcatcctcccacctcaacctccccattagttacgactacaggcgcatgccacatgtagtcacagagttccaccatgttgcccaggctagtcttgaactcctaggctcaagcaatccactcaccttggtctcccaaaatgctgagattacaggcatgagcaattgctaaaataagtttttatgccttaataaatccttcattggaaaatccagtacctcctatttttttttttttttttttttttttttttgagacagagtctcactctatcgcccaggctggagtgcagcggtgtgacctcggctcactgcaagctctgcctctcgggttcacaccattctcctgccttagcctcccaagtagctaggactacaagcgccgccaccactccaggctaatttttgtttgtatttttagtggagacggggtttcactgtgttagccaggatggtctcgatctcctgacctagtgatctgcccacctcgtcctcccaaagtgctaggattacaggcgtgagccaccacgccccgcctccagtacctcctattctaatttatatcatcatagattaattttccttgttattgggccaggcacagtggctcacgcctgtaattccagcactttgggttgctgaggcaggcggatcgcttgagctcagaagttggataccagcctgggtaacatggcaaaaccccatccctacaaagtatacaaaaattagccaggcgtggtggcacaggcctgtaatcccaactacttaggaggctggggcatgagaattacttgaacccaggaggcagaggttgcagtgagccaagatcatgccactgcactccagtctgggcaatagagtaagactctgtcttgaaaaatatatatattttttccttgttattgaagcttttttttttttgagacaaggtctcattctgttgcccaggctggagtgcagtggtataatcgcagctcattgcagccttgacctcctgggctcaagtgatcctcccacctctgcctccccaagtagctgggactacaggtgtataccaccatgcccagctaatttttctgtgttttattttttttgtagagatgaggtttcaccatgttgtccaggctggtatcaaactccagggctcaagcaatctgcctgcctcagcctcccaaagtgctgggattacaggtgtgagctaccatatagggccttgttattgaaacttagataaatgaagcatacaatatacactcttttgtgtccaacttatttcatgtaacattgtatctctgagatttacctacattattgcattttccaatagtccgttgtctttccttgctttgtagaattccactgtggaaatataccaaaatgtacttacccattctattattgatagacatttgggttgtcccaatttggggttagtacaaaatcagctgctgtgaccatttttgtacttgacttttgctgaacataagtattcattctcatgagcatatatatgcaggagtagatttgctgagttgtagaatacacatatgttagctttagtggttacttccaaagagttttccagagatgctaccaacttacactaccagcaatgtatgtgagttatagttgctccaatattttcagtctttttattatttatttattttttgagatagattctcactgtgtcacccaggctggagtgcagtggcacaatcttggcttactgaaacctccgcctcccaggttcaagtgattcttgtgcctcagcctcccgagtagctgggatcacaggcatatgctaccacacccggctaacttttgtatttttagtagagatggggtttcgccatgttggccaggctgctctcaaactcctgacctcagatgatcccactttggcctcccaaagtgctgggattacaggcatgagctaccatgcccagccagtctttttattatttatttttatttatttatttattctgagagagagtcttgctctgtcgcccaggctgctggagtgcagtggcacaatcttggctcactacaacctccgccttctgagttcaagcaattctcctgcctaagcctcccaagtagctgggattacagacatgcgccaccacacccagttaatttttgtattttttagtgagatggggtttggccatgttggccaggctggtcttgaaggcttggcctcaagtgatccaccctccttggcctcccaaaatgctgggattacaggcatgagccaccatgtcccatccagccccctgttttttttttttttttgagatgaagtttcactcttattgtccaggctggagtgcaatggtgtgatctcggctcaccacaacctctgcctcccaggttcaagcgattctcctgccttagcctccggagtagcagggattacaggcatgcaccaccacgcccggctaattttgtatttttagtagagatggggtttctccatgttggtcaggctggtctcaaactcctgacctcaggtgatctgcctgccttggcctcccaaagtgctgggattacaggtatgagccactatgcccagcccccacctagcctttttaattttaaccatttcagcagatgtgatcatgatttatttatattttaaaataatattaatattaataatatttaccacctattggcactagaaatttagcatccattgcctttaatattaacaactctagaaagtagatatttttatctccattttacaagcgaggctctgggtgactaatagttgaacaaggtgacatggatgtaagtcatagaaccagaacaccaatgcagaatcctctgacaacaaaagcctgtttgccccttgcctgccacacagtagggagcaagagccttgtctttctcctctgagatgctccacagtgcttaagtaagagcttaagaaggcttgttatattaaatgaattggtgtccatgaagaggctgtgctcttgcatcagggcaggcccatccaggtgctctaaattccagcgactaagactgtactttcagggatcatttctttagttcattactagataagtttctctgaatatgtagagcgctgaattataataaatagattttaaaataaataagtaaataaattccagtcactgactagatttagttgcaatcaggagatcttgtttttggaaagaaggaaggaaagaaggagggaagagacgaaagaaggaaagaaaggagggaaggaaggaaggaaagaaggaaggaaggaaagaaggaaggaaggaaggaaggaaacaccactgtttgtttgtctgtttgtttgttttgagatggagtcttgctctgtcgcccaggctggagtgcagtagctcaatctcagctcactgcaacctccacctcccaggttcaagccattctcttgccttagcctcctgagtagctgggattacagccacccgccaccatacccggctaatttttgtatttttagtagagttgggttttcgccatgttagccacgctggccttgaactcttgagttcaggtgacctgcccacgtcggcctcccagagtgctgggattacaggcgtgagccactgcacccagccaaaacgccgctattaatcaattgggcctcagtttcctcttgtgtaaaatggagataataatattgccctggctaatgagagaatgagaggcagtgctttaccgtttgtaaattttaatttgtaaattgatagaattatttaaccatagccaccatctgtggaactttctaaaatatatggattccagggacccagccctgaagatccagattggcatgatctagggtggggcctgggtatgtacatttttaaaaagcttctctgggtgatttcaatgctcagctaatggtgagaacagctggggtaaaaatgtgtatgatcatcattattgtttcagtatgatcatcactgtagttatcttttggaggatgaaagtggggaaacaccctttagagaagtctataaacacctagatccattgtaagtccttaaataaggaccactgtcactgtcttcgctccctggtcatctctggcctggggtttcagaggcaggttcataagtgtgtgtgtatgtgttttcatgaatatgtgcttggaaaaggcaatgagaagaaagcagattatgaggggtttctgtcttgagaggaagctactggaaccaggaagaacaagcagtctgattcctaggggctcaggcctatgcacttaaccataagaaacaagcgaaagtggccccactgagctccatgaggagcatggctaatcctgtcactctgatttgcatgtagggatggtctgcttgtggggatggtcagttcctgcagacccgtaactgctgagctcatgaagagccccctgggatctggcctgagagtccatcagccaactctcttcctcctgttagtactttcccccataacctgggtatcccagggtactgtccatctctgagaggttagagcatggcaaagaccaacccaccaattcccctctgcccagagacctcagttcctgggccactctctatccaaggccacaaggccaagttctaggtctcttccactctttatactcagtaagggggactctatgggactaagctagggtccctgcatgtcctggcatggaggtgggagtgagtagagggctagggctcagaaaaggatgtgggaagagaaaaagggaaataaaatagagggcaggattaatgaagtggcttcaaaaactaatagtgcatttcccaacatctcctcctctgactctcccatcccaagggaacctgcccacacccccaaagcaggctgcccagctctcagtccacctgctagggtggaaagaggcaggaagtctctcaaggtgagggagagaactccccttcctttatactccaatctctagagatgaaaccccaggtctcagcccctcctgtgaagcacaggcccatccccacccctacccagcttcaaaatagccagtgggaggtgcattaactggcgatgctttggggacagctcccgccatccacagccctggccatcttagtttctttcagttcatcccatcaaatgccctcctttctcccaggcctcctccctagaagctgacctggagctggattcccaaataaacagtaactaattggattaggagccgataatactgttgacctttcttaatgtctactggctgtctttccaccacactgaggcttaattgtatgcagtggggaggagggtgggggacttccaggagtgaaatgtgacccctgttaacctcagataaaatgggctcagcgtcttcccaactgcctgtcatcccccatggagcaggaacacacacatgctccctctctcatcaaataattacacagatgatacacacatgcataggcatgcatacagagatgcaaacacacccagaggcacatatgcatccacacgtggtgcacacataacgttgaacctgggtcatacatgtacacaagtcacacttgaatgatacacctacaaaattacatatatgaaagacaagtatatgcatatacacagatacagatttgcaaaatgcaaacacacagatacatatcgataaatatatattattgcacccatgatgcaaatgcataatagatgtattcgcatatgtacacaagatacatatgcaagtaaagatacactgacatgcacacgtatgcatgatgcttaaataaatgagcatgcaaagtccatgatacaagtgcatacacacatatgcacgctacgcatacctttgcacatcgatagacgtcagagcccccaccaccacacacacacacacacacacacacacacacacacacacacacacaggcagtttgccccattccacagcccatctccttcccagtctctgctgctaccactttctatttgttcctgggttgtctggctgtgtttctgggatcctgagtattatgggtctcttggagttctggcccagcccctctgagtgtctcctcctctcagtatctctggggccctgtccccatgtggatctctctcatcctgggatgctgaagtggaaaaggacctggctgccacggtggtagggagggcatgaaaagggaagagattagaaggggaggatgggagagaagggccagagaggatggaaaggaaggtcgggggaaaggaccgggaaagaggggagcggggagcgaggggcgggggaggggcgcctgcctgcgcacagcagatgttgccgctcctcggatggagctgttaatgtaagtggagtttctgcaatggtaattaggagggccctcattaccctggcggagccggctgagagccgataaagccgagggggagaagggccgacatcagggtaatgggggagcagggccattgaggagctggagccgagccggggaccgctccgcgcgcagctggagcccggcgagagggccgcggaaggggggtgcgaaccggggccggaccccggggaggagccgggaggcgagcggcgaggggcactgcgcggctgggtctgccccggggtttcgcactgcgccgcgggtcgaagtaccgcgagttggccctgactgtctgcaggatgagggtgtcgaggagggttccaggccagcgtgcctgcctcgcctccagcccggggtaaggagatccacggaggcctctgcgcctaaactcaggtggccagacagagttggggcgggaggcgggtatacggaaaggacacccttcccctctatgggccccgcccgctgtgcaagggtggggaactagcaccctcgtccagcgtctagcgtgaccaagacatgtactgtagaatagccaacacaagagttgacggctccagaatgtcagatcacagacgagaagaccagccttcagggttggaggtagaagcctcttgactctttggattgaaaggagaccagtcacccctcctgggaggactctcccacccatcctcccctacatagtaacctctcagccctagaggagctacaagaaaagcgaattggagaagctcatccaagcagtcctaagtaccttgcttccatgcagggctttgcaggaagaggaagggaggcagggaagggtacggtgacagctgtagacatcacctgcagctctgctccccggccaggaacccaggaggccctcccagacccccagaatggggttctggggtgggcaactcatttgccatctatcctccccacacctgaatattttaggatgggcctccagcgctttccaggctaactcagcgagcccagtcttcttagtcaactgagagacatgtctacagaacagaccatgtggccaactcctcctcctccccatgccccaggcaagaggactctgggaagacatccaggaagcaaggagtctgtagccaggtcagagagagaggagctgtgggggtctgtacagaccacctccagcagagaacccatcctccattttcatcccctcttcacatccctccacccacagctgccttcagaagcccaaggtcattggccctgccactctggtttgccaactcctcaaggaccacataggcccaactgttatggaaagggtggaccagagagaggggcttcttttccttcggctttggggaaggcaaaggcaattcctgccactgcccactccagagacggccgcatcttccaggtgactaaaggcaagtgatggttctgaggagaccaggactgtggggagctcctgggctcagtggggggagctcctgggctcagtggggggagctcctggcctcggggagagccccagatgtcgctcccctcttcagctgcatggcagagcaggggttaacagggagaggctgcaaggctggagctgcgaggctggagcaggcggtggctcccgcctcttcaccacccccctcaagagttgctgactcttcctttttgttcgggctgacagcgagcacctggtgtgctcctgcaacaatattgttcctgcctccctccccccaggccccaggctcccttccctctccccctccccgcccgccggcaaccttcccctctgcctcctctttcccttgccccctcctgcctgtggcctcctaggcacccccctaccacaaccaccacaagcaccgacgctgcagtgtcaataaacacaacatatgctgccattaatgtgaaaatcgtgccctctaccccattcatctcctcagcctgcccgcccgctgggggtgggggtggggggtgggggaaagaaaggtcaagtgggaagcattaactaccctctttttcctatctgctcagcccccacccccacccccagactggagagaagaaaaggaattggaggagaaggaatgggataagggtgggggttttctgagacccacattctctctgacatgcccactgagcctccccacaggaaaacaggtgagcgtcctcatccagcccacggtcttcaactttggggtgggggccagagtgaggcccttggcctgcccatggacagccatgttgcgggcacgcttcgcctggggccaaatgtggtcacgcaagtgggtctctttctcctgcacatccagcagtcatctcagctcctggggactttctgtctgtccacaggattatgaaagaaatactagaagtattctccaagttgggttgggcttcagaaagcccttttgatataagccaaatacctcagatggccaagggagtggcctggcctcagtctcctcaactaaatcaccagttccaagacagcagggaataataaagataaaaataatataataacgacagctaacatgtattgagggcttatttatgtactaggaattgtgctaagcactttacaggctttatctaatttgctccccataagacccctatggggaagttacaacggatatccccattttacagctgaggaaacaggcttcacagggtagctagcatgtattgagtgctcactgcatgccaagcgctgtgctgaattcacttagtacaatgttttcttgtttgtttgtttttttgttttgtttttttgagacggagttttgctcttgttgcccaagctggagtgcaatggtgcgatcttggctcactgcaacctccgcctcccgggttcaagcgattctcctgcttcagcctccctagtagctgggattacaggcatgtgccaccacacctggctaattttgtatttttagtagagaaggggtctctccatgttggtcaggctggtcttgaactcccaacctcaggtgatccacctgccttggcctcccaaagtgctgggattacaggcatgagcctccgcacccggcgagtacaatgttaatgaccctgcggtgagtacaatgttaatgaccctgcgaagctggcatcactattagtgtcatcttacagaacaggaatctgaggcccagaaaggttcagtaacttgcccaaggtcacacagccaataagcagaacttggccaggaacccaagtctgtctgacagcaaagcttgtcatctcaacccctatactttcctgcctcctttttctatctatcaccatctccagtaaccccacagcatggccccctcaaatccgccctgtgtggggttgaacagatacagggcaatgcagaaggaaaagctgacaagcggcctgagcgtgagaccgagccgagacttattctctgctcagctcctccctggtttcattgtcactcctttgccactgagctgcgcccacccagcctgtgcgctcactggactcctgccccctgtccagccccattttaagaattcatcgtggacaggaaaagtgccccttcaggctcccttagcatgaagacattgtgcttggctctgcagctcctcacttctgagactccagttgctttattgatattaacttaacactcccccgcccgccacttccccacccgccctagcccaggctgacgggcagaaatctgctgcctgggcaccaccctgacctctcttttcctctttcattatccactccaggcaccagggagccagcaccaaaattaaaacaataactaagcccgaagtggacccagcagcccccactcccaccccaagggaggggaaaaaagccacaaaaacacctggagaggagaataatcactggaaggggagggggtgacccactcccatgccagcacccttcacctgccttaaccctttgttccctggacagtaaccaaggtttccccatttcatccctcccacccagtcccataaagaagcggcagcttctggcagctgctcagtcatttggtgcaatgggatttgaataaacaaaccggggacagtgaggtccccagaagtccatagtcaagggctaagacccctagaggctttcagtcctgccacagcatgaagttggctcatatcagagccagcgagccagctggaaagaaaggacatgggtcaaggcaagcccagtctagctctgtggaggccagcagagggggctactgtcctgaggtcaagtggtgggagagggaagcttagagaggcccatctcaggagagcggaggtgctgattatcctgtagtggtgggcacctacccatgcagcctccccggacatctatgggctagcagctccagcagggggtgtccctccagggagattatcctgtagtggtggacatcttcccgtgcagcccccctggacatctatgggctagcagctccagcagaggctgtccctccagggagagggggcagagctagcagcactgaactgtcctaagtgtgctgggctctgcagagggcctttctgtcgtacgccccctcagctctacctagaaagaacctatctcactgctccatcggtcccacaccaggattcccacacccccaagctggccccttccctgcctctactccacaccacactccaacctctcagggtcttctaaccacccccttatcttgtccaaggtgtgaataagtccttgtttaccttaattctgctaacaccaagagggagacttttccaaaggctctgtactacaaaactgaaggaaagactaggagagccaacacttatgttaccatggccaggccctgttctaaggacttttcctaagatttgcacaacaatcctaagagataggtacccctatcctacagacggaggaaaggagggcctgagaattcacaaactttagctggtgaatggcacagctgggattttgatccaggcggtatatgcttatgcaacactactttttccaaagcaaaaaaaaaaaaaaaaaaaatttaagtctttatttaagttctttattccacattagactgtaggctctctaagggctttcttgcccatcatggcattcccacagggtgaggcaaagtgggacaaccataaatgtgcaccaaagggattccaagacaactaaaggcctccaaggactgcctgacacaccccagtgggcacagaggacatgatccttccccttgcctcagccatggctagcatgggtgctagactcagccacactgactgctggccacaagcaggcttagctgaatccagagccaggtctgatgaggtcctctagcctttccagaactcttccatcttctcattggtctcccttgaccctataggttctgacccagtcctggccccctcagctcatccttatagcccctcaagggcctgcaccacctgtctccaaagactagtcacacttcatgagggccctcatggtcatgcccttcagaggccactactccccaagcccggcactctcctgctatcgtggagcatatttgtggttagggctggccctgcctttcagaagctcagccctctcaccccacagcctggtttcaagttgtcctaaggacatgtgccctggccccaggagccactctgcttcacacctgccccctgcccacagctgaccaaagactttcctttgccactctctcaatacaagccctctattgctcccgttcctgatataagtttcctccaaatccccacactgtctcctgtgacccacttaagagacctaactctctggacttaaaatagaaaacaccaaacacaagcttttacacttcccgctaccagcggaataaaggttgcatctttaacaaaaacaacataaccacctactaataataatagttgccgaccacttcaaagtgggtggccattcacttgcccagctctccccaacccacttcctacctgtccccaggctgtgggtctctcgggacgtgtgacgtgtatggctgtgtgctgtgtatttttgcctcctcaggaaaaactccaaagtgactgcttgccctgggctcatctataatctggggcattgatcggggcccattgatagctgattgttttcacacgtgactcggtcacattcctctaatctccatccttctgctcagtttgcatgacaagaagtggcctcggtggagagaggtcgctcacctctgaccaggatataattggaaaaagaaggtcattgcctcctttgcttctagggcagatcagcttcgttccatttgtgtcacgagctcttgccagcacacactctcaatgacatggagacaatggctgtgccccacaatggagcccacagagatgtgctcgatacaacacaaacacaccccaggatccgcactcactctcatcaggacaggcatgtacgacaacacacacacaataggtgctctcagtaaacgctgatgataacaccagtgatacacgggatgatgcatacccagtgacatccgcacacagaggatacataaaaagatgcataaagcaatgcttacccagtggtgcaggtacccagcaacatacacatgcagcgacacacagacacatccatgagggcaaatagcccaggccgagctaccacatccaacatgaaaaaatatgtgacatttttcagtgtacccacttggcaggtagcccattatatcttgtactattattgatctgcttggagccaaagctgacagtgccccactcctggtctccccatgttcccattcccagtgccgcacctccaggcagtttcttcaggtaatgctcatgtgggactctgtatcagcgttatctgggggagctctgacaccgggcatgcttccaggaagccctgcctctacatacaagcttcttacaatgcatgcgtgcgggtaaacacgcttatgttaaaaatctccctcaagtaattctgctatcctgccaggtcgagaacactgagccgtcaccaccaggctcccctctccagggtggctaaacttgccattgagggtgttgggctgtattttattttctcagtttgggaagggatgaggccccagaactgaaaaaaggacagtcaatggccaggaaccgaatgagttaaaaccgggccctatagccttcatccctggtgactctggctggcctcgttagcgcccgcgcagcacgcacagaaggacccttcgcgcaggatgtcccggagactcgtccacgctccctagccgggctgcgaaggcccagatctcccagcgcctccatgccgcgtcggccgcggccttgggggtcttccggggacagtggccagccctgggccggtgacctagcctttgggcgcttccccggggctctagggtcccagggcgccagggccaacaccaggaaagccagaaggttccttcctttggggcaggagttggggggagtcgccgtacgcccaccctgccacgcgggaggcctccgggagagggcagagggcgccgggcagggaccaatcatcggcggcgaccggtcactcgcgccccagcgaggagaccctgagatccgcggggagagcacagggtcgcgccgccccctggcggctcaatgacagagttgaggcccggcggctggcgactgcggcgtctggcagctccaggaaaggatcccccttgtgaagaaacgcccctacgaagactgtcctgtcctgtccctgccctcccgctcccgctcgccttctctccccttctttattttctctcttcctcctccccccacctcttccactcttcctgcccttcccccctccccgtcctcactccctctcccacccccattcctttctctcgtccttcgcccaccgcctcccgcccccgcggggcagcgcctcggtgcacccgcttggcagttagcccattagatctcgtactattgatccgcttctgagcaaaagctgacagcaccccctcccgggctccccacgttcccattccccgcgcccccctccaggcagtcctggcctgcgcctcctcccgccccccacgcgggccgcgccgaagtctcgccctcacgaaggacgagaacaaatgtaattaaagcgaccggcgaggggggtgtgcccccaccaacgcaggcacgagcgagggtcccagcggccggcgcccggcctgccacctccctccccctcgtccccgccccctggagcgggagcatttgggttgagctgcgcctgtcctataaatccacatataattctcctctttcctgttcagctaaggaaaataaacgtgtaaggctgtttctgggagcccagctcagggaccgctctaaattctcctcttattgagtaggggctggaaatcattcagctcggcggcgcgccccagaaccaccccctacccccgctccggcccgcggccgcgcccgcgcccgccgcgcacacgcacgcgcgcacacggaaggcaggcgccgggtatataaatatctccagctctccccatagccgggcagatttattccgctgccaagcctgcagaaaattgacttgttcatggaggcggctattgacacatcaccggggggagggttaggggagaaagcagtggagccggcgcccctccattatacgttaatgtaatcagcagtgtgcgaaatgactgcgcggaaaatagcatcactgacatttatattagaggatattgatggcaggagctgtgaccgcatcactctgcctcccgtttccacggattgacacaggagcctcttgttggctccatccacgctcgcctcccctccccctacctctcccgccctctctctgtctccacccaccctgtgtctctccagctctccccctctccgaggaggagatctcacccccaccctccctatacactctttgatcactcattttccaaataattcttgagcacctactgggtgccaggcgcaagggtctctccctgtgcctcctctccctaggtttctccctccccctctcccccaccgtgcccttgccctctttgtccctcctccccagctctgcctctcccctccccctgccttggctcggtggctggaccgctgctgtcacagcagatagataattgaaaaatgggcctcacctttgcagccggcaggagtggttcaggcagttaccgccggggttacctactccatctcaggcccaggctccaaaagagattctgaggaaattggattttacatggatgttttattcgagcagaggctttagtgtatataaatacaggcgaggaggccttggcggcaaggatgagtgaggacagacaatcccgcctggggcctccaggctcaggcgaggcaggcgggccatgtgctcagctcccggtcccagacctggatatcagcgcattccccctcatgatctgggactgaaagaggttaatgcttctgaacagctcctcaaaagctgccttgggaataaaagagtgtagttgttgagaacttgacaggacagtatactgagaaaagaaggaaatatactggagaagtttgaggactgattctttttctttcttttttttctttttcttttcttttcttttttcttttttattttttgagacagagtttcgctcttgttgttcaggctggagtgcaatggcatggtgtcagctcactgcaacctccgcctcccgggttcaagtgattctcctgcctcagcctcccgagtagctgggattacaggcatgtgccaccacacttggttaattttgtatttttagtagagacggggtttctccatgttgatcaggctggtctggaacgcccaacctcaggtgatccgcccgcttcagcctcccaaagtgctgggattacaggtatgagtcacagtgcccggccgaggactgattctttcaataaatatctattgaacctttaacttttgaagtattgagtttgaggcacaggagtgagtaagttatggctgctgccttcaagaacagtctaatagtttggagaatgacactgggggtttccttttttttttttttttttttttttttcagagatgagggtctcactatgttgcccaggctggacttgaactcctggtcccaagcgatcttcttgtctcagcctcccatctagggtttctggttatggataaggaaagggagagtgagaaagcagatgctgagattgcttttctagggcatgaccagctggggagcttgaatgaagaggcaggagggaaagtggtcggattggggcgataaaggacctaactctccagtctgctctctgagcctggttagcaaagcatctagggaacttggacaatggtggacaatgaatctataggcaagatcacatccaaagtgtttgcaaggaatcctggtgagattctctggagggccaagatgaaggatcattgaagaccaaggtgaggccctccagagagaccaggtagaaggtgggaagaggacctttgcgggaggcctaaattgaaggcacttgggcaaatgaggggcatcagaagaccagggagatgggatgtgggtgtggagcgggaggaggcaatgcctggggacctaggataaagattcttttggccgggcatggtggcttacgcctgtaatcccagcactttgggaggccgaggagagtggatcacctgacatcaggggttcgagacgagcctggcttacatggtgaaaccccatttctactaaaaatacaacaaattagccaggcatggtggtgcacacctgtaatcccagctactcaggaggttgaggcaggagaatcgcttgaacctgggaggcagaggttgcagtgagctgagatcgtgccattgcagtccagcttgggcacaagacggagcgaaactccatctcaaaaggaaaaaaaaaaaaaaaagattcttccagggcctgaatgtcccctaccccataggaaggtctacatttcattcctgggcagggtcttttctgtgccctgtttgatctctgattagagtctatgtggctgacaggtgcagcgcaaatcatttctgttccttggaaggagagtcatgagccatcccatgattaaaggactggaatgaagatgagcggacccaggctcagactgctcactgaagggataggggcttcttctgagctcacagcacagacaacagctgccttatcccagccatatcgctgaaagctggactgttcctcccccagagaaacattacaaaaccccccttgtcctctgccacattgttatactgttacatcatccgctttgggggcaggacaggtgctggatagatgatggccatccctccagctgccccacacacatcccaggcactcccagatggcacactgggaactccagtccagctgtaggatgggagtattctgcggtaactggactccctctcagaactctccctgtctgactgccatcagcatcttccctctcacctacagatttcattcatcctgacagcccagtggaaagggagcccctttccacccatcagggagccagaacactcccacttaccttagttacctgtgccacctccttccctttgccctcagtgaaccacaggaactcatgtcctatctgtctcccagatcaactcctgtatttgtcttcctttccttgtgactcatttgaaacatggatgcagagattctggtcttgctcctagcttaagaccctgctgtggtgtttgtttccctccaaaattcatgttgaaactgaatccccaacgcaatagcattaagaggtggggcctttaggagatgcttaggtcgtgccctcacaaacaatattagtgcccttataaaagggcttgagggagttgtttgccacttttcccccttctgccgtgtgagaatgcagcaagaggtgccacgtatgaagcagagagatatcctttacccgacaccaaatctcctggccccttgatcttggactttccacctccagaactgtgaagaacaaattcctattattactattattattattattattatagagtctcactctgtaacccaggctggagtgcggcggcgtagtctcaattcactgcaccctccacctcctggcctcaatcgatacttccacctcagcctcccaagcagctgggactacaggcacctgctactacacccagctaatttttttgtattttttgtagagatggggcttcaccatgttgctcagactggcctcaaattcctgggctcaagcaatcctcccaccttggcctcccaaagtactgggattacaagcatgagtcaccatgcctggcctgaatttctattatttataaattacccagtgtcaggtattttgttatggctgcagaaatagattaagacagaccccttggctgggcacggtggctcacacctgtaatcccagcactttgggaggccgagatgggcagatcacgaggtcaggagatcaagaccatcctggctaacacggtgaaaccccgtctctactaaaaatataaaaatttaacgggcaggtgcctgtagtcccagctactcaggaggctgaggcaggagaatggcgtgaacctgggaggcggagcttgcagtaagccaagatcgtgtcactgcactccatcctgggcaacagagcaagactctgactcaaaaaaaaaaaaaaaaaagacagaccccttgaacaggatggcgatgagaacatgagtgcatgcatatacatgtgtgtgcatgcacatgtgctcccttgagcattgcaaacccagggaataagtgacaccattcaaggaaccgcactcggtctcaccttgccatccaatttaggaaattgacattcgttagaaaaataaaggagcagccagggaagtggcttcccacagcaggaaggatgctcctcaaggctttatgaagatgggcttctgggaagtcattcctccaggaacatctgcccgataagccatcagagaggactcagggaaatggggggttgaaggtactggaaaacggagccacatataattcaaccatttcttgagatttggaatctgtcctttctctctccccatgtagaggccaggtagatgtagggtgcaaaggagaatgaacctttgaaaggtggctactctgcttctggggggccaaggaagccagcaggagctgggaagttaaggtctaggtggagaagccaagcttggcagaggagtgtttccaactttagcaacaaagccaatctgagctgtgtaactgaggtgaaagtcacttcaccactctgggcttcaggttcctcatctgtaaaatgagaaaaaataagatttctttccgttctagtttctgtgattctaaaccgatgggtgagtgtgattggagagcccaggtttaggatgaaagaaggaatttcagggctgaagatccagattcttacaagagggatgaacagaggtaattgcagggccagcggggcctgacattcatcagaggactgttggtggctgggaacctgccagggccaggacaaaacagagcataaaatcagcccgaccctggggcagagagaaggcagggatggatctagaaagcatgctacctaaattgtttcaaactcagactctttgctcagaatctggctcatacagcccagagatcatgggtagaaactccaagtggccaggcaggtgtccatcagcctaagcaacataaaatctgtgcactctcacgttctgtgctttagaagggaatgagtgggaggtgagggtctttgctttgtttccccagagtttcctaatacggtttcctgcttgagaaatgttagcatcaccttggctggatggagaggggatcagggcgcccctagtggtggaggctggtggttggcagaagcggcacctccttaagacttcactagaggagcacgggataaagtgtgaagcagctggagggaggccgaggggcacagagcctaatggaggcaatccctccgccctgttttgactcagggcaagatgaaacagggcaggtggccagggagagttggagcagaaagctgccttggaggataaatgcctagagggaaaagactagaagcccagagcacaggcagccagcaggcagcaggcaggggaggagaggtgagaagggagggaagatatccctttccacggatgtgccttggcccctgcccaggcaaagaggggcagattttccgtcttgtcccaagcccctgcatctgccaccttgtttacctcctgcctatttatagttgcaaattccaagcctggcatgggactctgcgatttatatgactataaaccttcaaagggcactgagggctggcggggaatgggtaaagacaggggcaggcctcgcaaggtcaaaatactcagtctcccacccccactgtcctgacatcctacctcctcacaacaggttgaaaggccaggctcacgcaaataagaaaatgggtaggaagccacagtcgccgctgactcttcctaccctaagcttgtccagtttaggatttagagcaaggcagagcatgtcctgggtcctggaacatggtgggggaaaagaagaaaaacaatagagcaaaacagagagaacctgttttagtctccctggccccttttgggagggggtagggaagctcagtgtgggagagtggatctcatcaaggacaattgaatttggagagagtgggtgagtccaggctttcgagggagaggggaaattgggatcagcagcccaactcccacctaccccatccacttaacagcagaggggaagaagaatgagacctggagcactcctggcctctggcttccttctgggggtgcctttggaggcctgaatggctcacctcttattcagaacagggtgcactggtttacccaatgcctgggtgcccagtcaccatggaattctgctagcactgctcataggccagatccttccctttagaggcaccctctcctcagcctctggctgaccctctgcttcaattcatctccctttctattttctctggacctccagcccgccatgtgtactcacgttaccgctccccacaaagtgccccttgctttgcacctgtgccctcagctgactattacagcctcctgctctgctcttcccctcaagcccaccacactggtccccactccacgatgtgtcatatgtagctcagctctgtgtgtgcatgtgtgtgtgtgtctgtgtgcacgtgcatgcatgtttgtggctgcatgtgtaagaatgtgccaaacagttttgaacatgaaggaggggggaacccagaatggctttctccttgacttttttgttgttttcccatcaacctccagtctgctggactaagtctaaggacttagggagggaaatgtcgctcttagagtccatgtgacccactggccacttctgaccctcttttacagcccccctccccgacctccaccatctggggtctcaaacccctcaccactagactaagcctggtgagaggcagacagagctgagggtcagggattgctcagttgggattggtcctctggcaggggagggcactcagtcaacagagactcccatctggctttgggcttggtctcggccttgggtaaagtcatatagggaaaggcggaggccacaaggaatgaaccaattcttggtctactcctctctcctaccgtcccagcccagcctatccttggggacagggatgcaaatgagtaagccaagtcaaagtcccttctctaagaagagagacagagaatagagaagatgtcacagagccccttttgccacctactagtcttctcttttttttttttttttttttttgagacaggttctcactctgtcacccaggctagagtctacagtgcagcagcatgatcatagctcactgcagcctctgcctcctgtgctcaagcaatccttctgcctgagccttttgactagctagaactacaggcatgcaccaccacatttggctatttttttctttttttttgtagaaacaggatctcactatgttgatctggctggtcttgaactcgtggcctcaagcaatctgcccacctcagcctcccaaagtactcagcttacaggcataagccactacaccggtctcatagtgtattttttatctagtgctttctctgtggtgggagagggggtatcaggaggcattgtcagatgtgaagatggtgtctgggatgcttattttatttattattatttgttttgagacagtcttgctctgtcgcccaggctggagcgcaatggcactatctcagctcactgcaacctccgcctcctggattcaagcgattctcctgcctcagcctcctgagtagctgggattacaggcatgcaccaccacactcagctaatttctgtatttttagtagagatggggtttcaccatgttggccaggctggtctcaaactcctgacctcaggtgatccacctgcctcggcctcccaaagtgctgggattacaggcgtgagccacctcgcttagcctggaatacttaactttatatgccaacttgactgggctaagggatgcccagatagctgggaaaacattatttctgggtgtgtctgtggagggagtttctggaatcagtaggctgagtgaggaagactcacactcatcactgtgggtgggcatcattcaatctgttgatggcctgaatagaagaaaaaggcagagggagggtgaatttgctttctgcttgatctaggccatccatctcctcttgtcttatgatttgacattgctggttttggggacttaagacttggaccaggacttatacaccagcccctccccggcccccacagttatcaggcctttgggcttggactggaactataccactcactttcctgggcctctagcttgcagtcagcacatcatgggactttttggcctccataattgggtgactcaatcattcataataagtccctttatctaccttcttccttcctaccttccttctttcttctttcctttcctttctttctttctttctttttcctttctttctctatctctctctttctctctctctttctcttcctctctttctcaccttctctccttgtctgcttctttctccctttcttcttttctttctttctttttttctttctcctctttctttcactctttctttctatctctatctctctctttctctctctccttctttcctcctctttctttctttctttctttctctctttctctctttcttggtctgtttctctggaaaaccctgactaatacagtgtatgaggacctggggagaaatcgaggacctagatggaggtgaggtgcagtgaagagaagccaggaggacctgcagaggggctggcagcagagcagagctcaccgttatgccctctccagagggaggcagcagaggaccatgggaattgccccatccagcattagcagttcagttccccttgcttcactgtctaccatggagcccatatctagggactcaccttgtttgaatgtttttacacttttagtccctgccccaaggagagatgccttgggaaagtcagccctgatttagtccctcccaagctcctctcttcattcctatgtagaggcttctctcctttgtgtctagaacttagagaacatacttttgtccactccccacctccttacatttctcaacctccccagctccctacctcctacacgcccttggaggccatgatccagcccagattcactgccctggagaggcccgtatctctgccctgtggccatgctgagccatgactgtgacaactagacattgttagcatctgacccccatcatccctagggagtttccagtgagggcccatactcctaatgtcttcttttccctacccccatttagtcactcaccaggcctacttcctggatatgaggaccaggtctggccctggaagtgcacagggagatggtcctgtgctggggaccaggctagcataggggcagcagctaggtggaggagttctgaggtgtggccttgagtgcgatgaaaaaccagtgcctcatagcctagtaacattcccctccctgccaacatggcacctctgtggtccctcagcctggttggaagtggggtggtgaggagttggggggcacaggtagatggaaggtggggaatggggtgggagggcacaggtcaagggaacaaatatctaattttttcaaagctcaaaaactggaagcaacctagaggcttcaaagttaaatcctggagcagagagaacatctcctgtgcatcgggtagagggagccagggacagaatggccttggtttgaggatgatcttatcaaaaaggaagctaagagtgaccagcttttttgagaccaaagagggccaatgggttccttctgaactcttactgggatgggagtggctgagagagctgtagacctgaaccctggggggcacagctgagatcccaacagaaaggagcccatgtgttaataaccactataagccacgagaaagtcagggtcagggagtggtggattactactggtctctcttatccagtctcctgtcattgactccaagacatctgggtctcagagagtccaagatgcaaggtaggcagctaccttacagatcatctggcctaggactcattttatagatagagaaaagaagactcagaggggataggaaggtgcctgactgtaccacccaccatctcaagtcatctattagcttagttataagatctcagtttgacctcatcctgtggaactccaggcttacctgcctgcccaatggatttgtccctagattaagtttcccctccacccacattgttgctctatgtttggacccctccagataggcctgatggaggagccctgattggaaaatttcccctccccttccctgtctcagaatatagcttcttagggcgctccctttgcaacttgagatgtcactgtctttctattaaaatgtcttttccactctgcctctccctttctctcgctcttctccaaaccctaccccctccacccccacctgccatcccttctctagatagagccccagaactgctgagatgaatctctgcagctttgtggttctgggctgtgttcctggtaattgagttgtgctccctagtcatgatgggggagggtggcagtggctgccggtgggtccagtcatccttctgctagcttagccccttccactgtgatccagcagagagggtgaggaggagagagctggggatgcttccttttccccagccctccttctccagctctctgtctccccctctccccctccctgcttcatctccagcacaaatcacatggtgacagccacatccaacctttggggaagggtttgtaaatgtgtcttccttagctgtgatctccaaattgttccttttattgcatttgtcacggtgaagattaaagtccctgggtggtctgcaccacaaatcacaaagtctgctcagggagaggctgcaggttgggaactgatggaggggtctgggccctgttacagggtgtgcatgcatgtgtatactcacaaacacccgatcccatgtgtgatgaggatttgtacttaggaatggaaagatgtgctgctgatattgtccttctgagttgttagccccctttataagcacagtttttgacctcttcctccaggctgtcttccaggatctccctgcccaatctgtggttggcatcatggtctacattgctctttcccgtctcttccatcagtggggagggaaagctgtggtcacatcagagatatttcaggatatccccctggatctttggtcacattgatctctagatctcatcctggcagccctctttttttgagacagggtctcactctgttgcccaggatggggtgcagtggcacgatcttggctcactgcggcctcaacctcctaggcttaagcgatcctcctgcctcagctcccccaagtagctgggactaaaggcgtgcaccaccatgcccagctaaacatcctggcagcactctgaatgggtcaagggcagtttgggcccagagctcccaagggactcacatccaagccccagaagaacagctgatcttaccctgtcccagcacccccatatcctgactttctttctcatcctgagacacaactggttgcagagggagcacagctgacatggaggaaacacagctgaggaaccaagaggacaaaagctcccttgtacatgtgcgctgaaaacagcccccttatgaggtgggcttcctgcctgtccctcatccacattcataacattcaaatttatgctgtaatctccaccgctccatatgtatgagcctttgatgggtgtttgggtttatgggatgcacccgtccctccattccctcacccgcccaccgcctccaaccactgcaaagacgctcgtacataattgacatcggcagattctttcattatacaagatttagcatctgctcagggatcgctcgctcctcactcaccatagatgacttttccccgcgtttcctattatcaattcaaattagccccatttccccacccgaccagtgcagcgtttacacttgacagtgaggaaacagcaaggctataatgggctcctcaattatttaggcccaggtaggccaggacccagaaagccttgacaaggggatatgctggggtggagtcattgtagaggggaggatagggcagcaactacctggtccctgtttggccttatagccctctaccctctcactttccaccctgggacccccttccccacctcacacacatgtaggtctctaaggagcaagacagtcccttcctgcccccatcctcagcagcagctctctccccttccatcccatatttgctccacatgagtacccaatgggccactggcataaaccaaagaagaggtcattagcacctgccgggctgcccctcccctgaagacacccctgtctgaaggttcatctgtctccatgaaggtgagaggtggtgccccaggatttcagagatcagtagaagagtcagaaatccagctgcagagccctaggaagagagagataaagcaggcccagctgacacatgagacacacatcagagcctgagggagccgagagtgttgccgctggggcttcgggagaagtcacaggcaagaagaacggcttgggcaaggctccctctcagaccacacggactgtgcagagctgtaattaggtcagttctgcccacccactggtctgctattccaggcccagcctcctgtaataactcttgggcccagccagtagctattcaggaatcaggggctctcccgagctcactaaatggcctaagtacaggggcagaagctcctggtcagcaccgaagccctaacccctccttcccatcaaccctcctctcatctgaagcagggctccaggcagtcagctcagctcagcaaaaccctgtgcccacttctgcatccccctcccgtccccttcctcagcttggatcagtttccaaaggcagcaatggggaggtggcaggcaggggtcgaagaggctctgggattagcagtgtctttcccatgcttggcttctccaaaatcaaagaattcctccgtctgattggatttaccctaagtcacaggcgtgtgggaccttctttccctcagcaacagctggaaacagccctaaatatgattaattaacgctgtaaaaagccctggacacaattaagatttatgtgtatgcgtgtgtgtgtaagtgcacatacctgtgcgtgtgttgcaggggagtgggttgttggggggactcgagtggggggagcacgggtggattaccaaccacctccagggccctctgggggagtagaatgacatttcctcagagacattcctttgacatccatcccaggcaggggtcattttatccagcctccagcttttgagtagattagcctttctctgtcccaggggcacggggctatattcttttctctcttctctggccaatgaggggagttgggggtggttctggggcaggtgcctcatctttcctctaccacagcagtatattctccgtcaaacctcaattcctcttgctgggtcactctaggcatcagggacacatacacagtccccaaacatagctgcactgacacagcccaaatgggacataaaataggaacctcagaggaatctgaataaatgagctgccggacaaacctcttgcccttggagatagttcactttcatcctcaaagactcacatctccaagacaagacagaggtccttggactttctcctcacctctaagatgacaaaaccttatttgttgggccctctactgcctcctggcccacccccatgtgattgggtactcattctctaacgtggtgacatcccagcttcaaaaagatgctggtgatgatcgacattatttataatcatgaaaaggaaagggacaggagcacagaaaactccagtgaatcattcggaaatcagttatcaggatctttgcaagagtcttggatttcaatttattttcttttatttattgcaactgattgatctacttctgttttgctgaaatgactaagcctaggaagaggttgcttaggttctagcactgatggccaaagaggaagtgtaccagaaagagcatggaaaaaccccagactctacatcccctcttgggatccttctggggtcaatggcctgagtacctggggcttctgatttatggcatggtcccccggggaggaacccaggaggtcttgcggatgcctaggtattccttgggagaggagcttcacatatcctggtggagttattaacaaacatggattaaatcactgggactagagttcaacttcctgatatcaaggctaagtagggccaagggagtgtgtagactctccgtgccacgtgtctccatgaagaggaccacccttgcctggaggcaggagaatggcagagatgaactttcagtgaccatttctagaaccctgagattttaggagcttttgtagaatttctgaatttgtagctggtgactgagtagaggagctaagttccactccagagctccagagtgaaaggtgtgccttaaagaggggaaaggggaatcaattttcccctgaagccccagtacaggcttgttgtgaggatcaaaagagcaggagggtatgtcctgaggtccccagatgcatgtgtgatgctgctactacaggggtcagctgtgcagagcacccccacccccaccatttccattcacaccctttgggttctatagagttccactcctatcacctctcggtcttttggctaagatcaaatgtagtatgtttttaccagcttaacatctgatacatcctctatctgaggacaatatattaaatgggttttttgagcagggggatggaaaaggagcttgcttcatccactcctatgcatcaacctggtattgcaggacctccaggaatggtgcatcaccagggtgcaagagagagttccactcccagagagaggggtgaggggatgagatggtgtgagtagcagacttgggtgccagtgagcaaacaaggaagaggaggcaagaggtgggaggctggcaggaggtggacaggaaggcaggctgcctggagatgggccactcccttgtgagtgtcctcgtgctttccttacagatgctctactcatttggagtatggtatttgctctgcacatcctcataggtcagtgtatctgcacatgtggtatctctctactctgtgataatgcttggtgaccatgtggctgaggatacctgtgtgaagaacaagaaactaggggttgcccatagagcacttgggtgtttggtttgatgagcacagtgtttaaaacaaacatgaaattgaatacctgtaggaaaacatgtgcttctcaggtgcagccatagaccctgccactctactgcatttcactacttgcgtcacttatataatctgcctagcactaaagccttgactctgtgatctcttgaagaaaaggagataggcccctacttgcccatcagttggcttctgagtcattagcttccctcagagataatggctggggtccagccaccagcttctctgggactaaaggtactggaagccactttttttcttgagtcaaagacatctgtataagagaagcaaacaagtcccaaccttctacgagagaggggtccaagatcatacagtgatactagactccaggttgcctctgtgggactccaaaacctctattttgcacactgcctcttgccttcgtcaagtgggtttgagctgaggctgagatatgagagctagaaggagaataagcccagagaccctgagggacacacttgtttccaactggtgtgtcctggacatgggcctctgccagaggatggaaagggatttggcctgacatgctgctgggatgggcattgggtagactgcttgctcagtccattgtgtagcctctcaggtaggcagagccctccttcctgcccagtgtcatatcaccaaactgccccatcccccatctccctgggagaaaaggaagtttggaggcccgaaggaggatcaattctattttgttttggaagcttggaagagtagctggaaacatgtggggcttggtttgaggctggggacagggctggctcttagtatctgcttcatccttgcaatcagctttccagaactctcagtggagcttatacggtcaggctctaccacaggggacccatactaagaccatatctatccctgggatgcccccatgtaggcagcagcttctaagacaagaatcttgatataagccttttatttggcttctaagaagcttaggatggcaatgggaatgtaagaaagggtgaactttgtaagggagctgatcttttatagctgctgtttactgagtgttagattttggtttttttttttttttgagtttttttggtcatttattttgtgtcagacagtgaactgagccttttacttactttatttcattaaatgtttataaccatccggtgaggtaagtgatattatctcctattgctcagataaggagattgagaatctaagaggttaaaaaccagtccagaacaacacagctattaactggggaatctggctgtttccactcaagggcactcccttcctcaatcaatacaaaacctgaggtcaatgggcaaggtggggggtagggtagggttaccagatttagcaaataaaaatacaggatgcccaattaaatttgaatttcagacaaacaacaaatacttaagtatatcccaaatagtgcatgggatatacttatactaaaaatttattgtctgtctgaaattcaaatttaatcaggtgtcctgtattttatctggcacttcttggcgggaagtggggtgacagcctggcccagctctgcccccgtttcctaagaaagtcctgaggggtacaggcctcaagtaagggatggtctgagctcaattagattgtgcaggctgggctgacagcccttttctcccttcttgagtgtggctaggaaaaggcagggcttggagtctaggctaccctgtccagcctcccaggctctgtgctgaggacgtcagagatcacacccatttaccaatcaatcaaaagggatttttcatcccagtactaggctgctcaacagaccaagcaaaccacaagtggtgcaccagcacagcagggatctccgaaaaagaaatgaaaaattaaagaaaaaaatcaagacatttggctgggcgcggtggctcacgcctgtaatcccaacactttgggaggctgaggcaggcggatcacctgaggtcaggagatctgtctctactaaaaatacaaaattagccgggtgtggtggcgtgcgcctttaatctcagctaatcaggaggctgaggcaggagaatcacttgaacccaggaggcggaggttgcagtgagctgagatctattgcattccatcctgggcaaaaagagcgaaactccatctcaattaaaaaaaaaaaaaaaaaaaggaaaaaaaaatttcaagctgtccgcatgggaaaggatgaaaccttcctggcattcactgtacgatttagcactgaattagaccgtgcgggtgaggttggagtcaatctgctcaaggtttagaaaggtctagcccagccctgcatttggggcaccagcttctcttcttttcccttccggggagtctaactctgggcgggcctgagagggggcagatggtgggaggggctccttctgacccctaagtccccaagctctccagccccccgctgcccgacccgcgtcaggcctcgggctgggctcgggccccaggcgctgccccggctccctctctggttcctggcctccgtcctccgcagctgagccccgctcggctccaccccaggctctatcgcctgctctgtcgcctgctccatcgctggctcccgatctggctcccgttcccactccccgcccggtgtgctcagcttgctcggggcgtctccctactgaagaattatgttgcataaagcagccgccaccatcttgaactggcagtgaactttgctttctacatataaatacagatagcaatcacaccccaatcagcgcagaggcttcagggcatcatctcagcaactctaactttcccattacgataatgtgattttcactcagtctataatatcaccagccatgaataaagcaactggctctttctctctctctcttccctcccccctttctctgcctctctcccacccacttcagtctttcttttcctccttcacaccctcctcttctgtctctctgcaacccctcctggtgatctctgagtctctgagcacctccgccttcctctcccactgcctctttctccccctcatcctctgggactcacattccctaaatactaatggcagggatttgctgtgccccatggctcagttaagttctgctccccagctctgccatcatctgcctttgcctgaaggtgagaaactgcggagtgggggtggggtggccagctaggctttccgagagggtgaggagcttggagcggactcagctccttcgcttttctctccctctttccttaggtaccaggatggctctctgcaaggattcccaccaggaatgccaaagccagagacttagggaccaaaggacccagaagggagatctgaaaaattcctgcttaggggcgggtcctggaggctctgatttttctgggtattgagggacccaaactcaaccagattccaaatgccagacgattgtgagtagatacagctggtgagagggtgctctggagacgcctgcagaaaagagaggaaactggcccagcctcctagagacacttctgagtacggctcggtcctgagcctgacggcagtccaggctgtagctgcctttgccaggacatgtgataaaggcccgcagatccttgatcaaggtgtcagccactttgtcggagctcctggaaagggcttctctttccttcatggacattctccaggttggtagtggttctggcgggggaattttctgtgcctctggtcactcatgtgtctatcccccctgagtttgtatgccagttcttttaaactagcgttgggatcatggacagtgctcttatcttccctaagcctcagtgtcctcatctataaaacgggcataataatatacctactgaataaaataatgtatgtgaagtgcttcacactgtgctcagcacattgttaaatgttcaataaatgctagcaattattactatcagcaattattgaataatcatctgctatgtctttgacacagggcaccatggaggttaggagcctggggtttggagacagatgatctgagtttgaatcctggcttaacgcttattaactttgtggtcttggaaaagtcacagcttctctgagactcagtttccccatctgtaacaggaataataatagtccctacttcatagggttgtcgtgagggttactcaagctcatctagtgcttggcacagtgttgatatgtgacaagagctcttgaatattctcaagggtcactgtgtatccagccatgagtaaggccaacactgtcctggctgtcctgtagaccacaccctctctgtgggttattgtctgggcccttgactttttctaggcaagtgtccattaatggccttgtcttttcactcctgtggaggatgaggacttgcttcaatttccctagctataagaactgcaccttttcagttgccctcctttctgcggttggagctaggactcctgcccagcccctttcctggttgaggagagaaggtgacccttgaatctgctctcttaggcaggggagacaaattagaatcagacatcctcattctgtccatttctgtagctctaagtgtttgggggtcagtttgcttgcttgcttttagtttctcttggtttctctctgaaggctcctttggagccattccaagctgatttcatgtgaaagaggggaaagaagattctactcacctcagctgagccaggaggggcctcgggagtatggcagtgagagctcccagctctgggacctagagagccagtatcactgaggcagactcagggaggaagctaggggtagagtgcctggctagtggcaggtttgggtctcttccttaatacttagcctctctcccctggctccaagaggaaagaagctacccttcaaaatccagagccataagccaacacttttttttttttttttcagatggattctcgctttgccacccagcctggagtacagtggtacaatctcggctcactgcaatctccgcctcccaggttcaagtgattctcctgcctcagcttcccgagtagctgggactacaggtttgtgccaccgtgcccagataatttttgtatttttggtagagaccatgtttcaccatgttggccaggctggtctcgaactcctgacctcaggtgatccacccacctgggcccccaaaactgctgggattacaggcgtgagccaccgtgcccagccaagcaacacattattaaccaagtgctgtagctaagggaactgaatcacctgtaaactcatgacagaatgcggagtctggtctcctccctatgcctaactccactgctcacagacagggtccatggcttccaggtgatattgcccagtattgggggacaggcatgagaacatggaagggaagcacagagtgagagacacatatagagataactgcagggtgcagcagggcagaaaaagagtggtaagttcagtctgaagagccaggtgacacttcatagaggagatggtgctccagctaacgtaaatataggcaaaatgggagggcaaagagaaggaaaggcattcaagcagggggaatggcacatccaaaagccttaaggtgtggaacagcctggcacatctggagaactccactgaagtacaggggagggcatagggagggcactttgggagagaggccagcagaaggagaaagagagtaaagggctgtgccaaggagttaggctctcaccctgtgagcaggggcccactgacgggctttcacatggagtgatttgcatttcagaaaaataactctgaggatgatacagagaatggggggagggtgcaaccggaaacattggagaccaggagaccagggaggaggctccccccaacccccaggctggagtgcaatggtacaatctcagctcactgcaacctccacctcctgggtttaagatattctcctccctcagcctcccgagtagctggaattacaggcgtccaccaccacacctggctaattttttgtatttttagtagaaacagggtttcaccatgttggccaggctgctctcgaactcctgacctcaggtggtctacctgcctcagcctcccagagtgctgggattacaggcataagccaccatgcctggcctttttttttttttgagacagagtctcgctctttggcccaggctggagtgcagtggcacgatcttggctcactgcaacctctgcctcctaagttcaagcgattctcctgcctcagcctcctgagtagctgggatgacaggcatgcgccactacacccggctaatttttgtatttttagtagagacgggatttcaccatgttggccaggctggtctcaaactcctgacctcaggtgatccacccccctcagcctcccaaagtgttgggattacaggcatgagccaccatgccctgccgagggaggaggttcttacaactgtgcgggcaagagacatggaggacccgagttatggcagtggtggtggggacactgaggagtgacagactagagagggcctctgaaagaatggacgggattttttttttttttttttttttgagatggagtcttgctgtatcatccaggctggagtgcagtggcgcgatctctgctcactgcaagctctgcctcccaggctcatgccattctcctgcctcagcctcccgagtagctgggactacaggtgcccaccaccacacccggctaattttttgtatttttagtagacacagggtttcactgtgttagccaggatggtctcgatctcctgacctcctgatccacccacttcagcctcccaaagtgctgggattacaggcgtgagccaccagtcatggcaaagaatggacaggattttgtgcttgattggatgtgggaggtgactgagaggaagattcctagatggcaaccaggttcttgccttgggtgaatggtgagatgatgacagagatggagaatagaagtgatggaatagctttgaggagagttcaaaaatactaagatctgattgagacacatactttgagagtctggggtatgtctcaataaagatatccaggagattaagagaattgaagaactttatctccatatatctggagtctggtagggagttggaaatacatgtgtggcattcaaaagagttttgggctgggtgcagtggctcatgcctgtaatcccagcactgtgggaggccaaggcgagtggatcacttgaagtcaggagttcaagactagcctggccaacatagtgaaactctgtctctactaaaaatacaaaaaaaaattagccgagtgtggtggtgcatgcctgtagttccagctactggggaggctgaggcaggagaatcgcttgaaccagggaggcagaggttgcagtgagccgagatcgcgccactgcactccagcctgggtgacagagtgagactctgtctcaaaaaaaaaaaaaaaaaaaaaaaaaaaaaaaaaaagagtttagtcagagtatgtggatttgagggttactagcatatagatggtaattaaagccgtgggaaggaggttatttacttgggaaagacaagtttgaagaggcccaagagtggagtgttaggaaatgtgtacatttaaaagagtgattttcaaccttggtagcacatttggatgaaatggggagcttgaaaaacaccagtgtcggctgggcacggttggctcacgcctgtaatctcagcactttgggaggctgaggcaggtggatcacgaggtcaggagatcgagaccatcctggctaacacggtgaaaccccatctctactaaaaataacaaacaattagctggttgtggtggcgggcgcctatagtcccagctacttgggaggctgaggcaggagaatggcgtgaacctgggaggcagagcttgcagtgagccgagatggcaccactgcactccagcctgggcgacagagcgagactccatctcagaaaaaacaaaaaagaaaaacaccagtgtctgggcccctccccaggccaactaaatctgaatctctgggagtgagctgtaaaagtccttcaggtgattctaacatggcattggggttgagaatcaaagacttggagggaggcaggaggcggtggctcacgcctgtaatcccaacactttgggaagccaaggcgggcagatcacttgggcccaggagttcgagaccagcctgggcaacatggtgaaacccccgtctaccaaaaataaaaaataaaaataaaaataaaaaaattagtcaggcacagtgctgcatgcctgtagttccagctactgaggaggctgaggtgtgagaatcgcttgaacctgggaggcagaagttgcagtgagcgaagatctcaccactgcattccagcctggacaacagagcaagaccctccctcaaaaaaaaaaaaaaagaaaagaaaagaaaagaaaaaggcttggagggagggcagaggacccaggctagcaaagaaaactgagaaggaatgttcaggatgataggaagagaaacaggaaagaggggtgttgtggagtaaagagaggacaaagtttcaagaagggagagttcaaaagcatcaaatgatggagaataatagtagttaacacctacccagtacttatcctggctttacgtgaattcactgagtcttcctgagaccctatgaggcaagtattattatcattgccattttgaacataataaaactgaggcataggtacttgccctagctcatacaactagtaagcagaaaccaggcttcaagcccaggcaggccactaccaaatgtgtgctacaccacctctcttgcagagggccaagtgacatgcacaccgttcgtgctttttagcagtgtagccttccaacggcccagctctcttctccttttctcttctcttctccttttctcttctcttctcttctctccttccttccttcctttcttccctccctcccttctttccttccctccctccctccctcccttccttccttccttccttccttccttgcttccttccttccttccttccttcctctcagtctaggtccctaaggcagcttttttcacctccctggccttctcctggtgactgggctaagtggagctggttctcctcccttactcttggagggacaacaaagtccacccttaggtgatggccacagtgagcctgcattcatcagcctgagcgagcaagcaccctttgaagtctccagagtctaggagggtggggggttgggagaggggtgcagagggaaaaggatctgatcctcctgggaagttaagtctcctgagaagtgatgcaggaagattttgaggaggaaagagactggaatctacattcacagtagaggtgatgtaagtgcggcctccaggccccagagcagtggttctcaaccagcctgactgttagaattaaggagaggggagtgttaaaaatataccaaaagtgccacctccagaataattggatcagaatctctgggaatggagctcaggcactgatggtttttaaaagttccccagctgattctaatgtgtagccagcgctgagaacagcagcctggagaaaagagctctgaataaatacaaaaagaccacggttctacactccaactttatcacttcctagctgggtggtcttgggcaacccattagacgtctttgagcctctcttactcatttctgtaaaatgggcatagtaatgtccaccatgcctaccttaaacagattgttatgatgctgaggtagacttggatgtgatatactttgttaattatgtagggtactgtgtgaaagtaggtggaattaactcagacagacaaaaggacaaataagcacttgtgttcattttgcacaggtagaggcacttgagtgagtacacacacacacacacctcacagagagttgctggttggattttgaaagcagaactgtggttttctagtcatggtcttttatgtttttagccttcagaatatgccattaaaatatggaaagatgatctggtgtgtgtgtttgtgtgtgtgtgtgtgtgtgtgtgtgtgtgtttaaatgattgttaaagtgtagcatcatttgagtccgcctgtcagcctatcagaaacgtcatctataaccttcactgtttgcagtttaatctcccctgcctccccgcgggccctgttctgacattttaaaccccataaatgacagtagtgctctaagccattttgaaaaaagccaagcatttggaaaaaacacacatagagacatccccctaaattccccttcctgtgaacacatgctcattcatgctcataagtcgaatcacacacacgttcacacccctgcactggccaatttgagagaagtcacagatactggtactagccaacaaaatacacatgtgatggcaggacacaggtgtgtcgaagcatggctgtgtgtctggcccgtgcatgaactccagtggacacacagcagggacacctttcttttctcattctcaagttccaaccattcttctgctccttggctttgaaagggaacgaaaggatccagcatccttggaaggctggcactgggagctgtttcctgtaatttggagttagaaaccaataggggctgggtgcagtggctcatgcctgtaatcccagcactttggcaggccgaggtgggtggatcatttgaggtcaggagtttgagaccagcctggccaagatggtgaaaccccatctctactaaaaatacaaaaattagccgggaggtggtggtgcgcacctgtaatcccagctactcgggaggctgaggcaggagaatcgcttgagcctaggaggtgcaggttgcggtgagccgagattgtgccactgcactccagtttgggcagcagagtgagaagaccctgtctcaaaaaaaaaaaaaaaaaaaaggaaaagaaagaaaaaagaaaaaaagaaaccaatggggtgacaagggagcttgaagagccccaaatcttggggtttagtgccaagcaaggatgtgcattaacaggatcaaggttctgaactcttggaaagcccatgagtagaagggataacatgtaagttgcaccccacctaccaaaccagtgagctctcaaggtttggagaaccagaatgcaagaagaaaattcagagatacttagtcacgggatgaacatgtgagtgtacaagaaggtggtataagatgttaattgtgaactctgtaagaacagggccctgccaactcctggatatatccctagagtctggcacagggtctacaacatagcagaggcttgcaagtacttgctgaatgaatgacaaagaatctgaagctcttgatggcaggcctggctcctgtggctctccctcccaccagctcaagtcatcatgtactttaaggaacttgtttccaaggcaaccaattagagtcagaaagtgagggctgtgacgtcaggcaaggatagggggtgggtggagaaactgccatcccccatatccctagctcccagctcagtctctgcagccttgaagggaacacttctgaaaagaggaaaagacagagggcattgccctcctgagagtacacttctgggtcagggctcaggaatagggactatgttggagatctgattcatctggcagtgtccctacctgctaccgcattccaaaatgctgataagcctgtgggtccagcagtgagacagtgtaggcatactagaagggtaacagtagttggggaccactgcccatgctcctccctgtcgcctaggagggagagatcttaggctttctttctttgggggacctgtaaacaaggcccagaaggaaggaagtcttggctcaaaggggaggagatgctgctctcaggcctcacttgagacctttctgtctgccccctggaaaggatgtatgttttggtttatgagaggaaagtatacactttaaataagagtaggaagccaacaaggaatgcatttggagagtgtagcggagacaatccaatgagcggtagctcacagattctttcttggagcagagaatgagatgtgagtaacaaaactgcagcaatttgaacccctagatccttgagatcatgttaggcttcccaagggacaagtctggccaatttgggaaggtcattctaatcagaagataaaaggcagaatgcaaaggaccttgtccttagggtacaatgagaatactgggcattcacttgttgaacttcctggccaaactatgataagcctccacaccagctgggtaggccctgctgtgaagacgatgaaaatgatgatgctgacaatgataaatagcagctatatttttcatggcactgtactttaccaaatacctttattgtcgtggtagctcttttgataagtagggccggaattgtccccaggtgtggttctggaagcagacttggagatggcaagtactgtgcaggagcttcactggagagtgctctgggaaggtgctagaagtgcaggactgggcaatggagaagtggggttgtgctgcagtctcaaaaaaggccttgactgactgcagggggctctgaagttggacggcccttcagaaccatcctgagtaggagagaggcagctgggccttcacacacccctggtgaccagtcactggatgcaggctgccccagaaaaggggcatgaccttaggcagggcagcactcttcagcagaggcaaatccaaggaaggctgacaggcaagggtggcagcttaggggaccgtccttcagtatggaaggggaatgcggcctgacaccatggcacctactatagcaattaccactctcatattggaggtgaggaaactgaagttcagagagatgtaatgacctaccatattatgcagctatcatactggcaaggttggagtgtggctgtagcatcaagaagggctttcagtgtaaaattcctccagtataaccacaggagtcaactgctgaggaaacgccctctccctgagctccatgcaggacaggcagttggagctgagggtgccctgactgaggggctgggagaaggaactcagtgtgctttcccccaggccgaagagtcagggtgcagagaccctgtgccaggccttcagagggcctgctgagctctgctgaggtccagggagcctcctcccccactggaaagtagagactgtgatcttaatccttcccatcacagaggcacagtgctggctgctccaggccacaggagaagctttcctgacagatgtgtcggattgaccaaaagaccaaaaggggctttgcggagattatgctgtctgctcgatacttggcccctaagcctcaagaaatggaagctcagagggcatccttggtggcttctagaaagggtcagagctttaagcaggggcccagcaatggtcagcttccctggccagccccaggctgcctccaaaaggcctggcggaaggcatttgccaaggtgtcagcagaggtgagggagggagaggacaaggtgacagaaggcgagagtcagtgaggcagaggccaaggaacaggaggggcctgaccccctcaggaccagccacccccacagaaactgacccaggggagagagacccttgtctgggcttgttttcgggctgctggggccaggcatcggggtctattaaggatttggaaggtcactgaagagcggggtgtgtgtgtgtgtgtgtgtgtgtgtgtgtgtgtgtgtgtgtgatggggctggggtggaggcagtgccaccatcagatgtgtgtggggaatggagtgaagggagtctgcctgagtccaccgctttcacactggaaccactgggtccacagcacaggctaggagggactgctattcctgcttttttttttttttttttttttttttttttgaggagtttcattgttgtcgcccaggctggagtgcaatggcacgatctcggctcaccgctacctctacctcccggcttcaagtgattctcctgcctcagcctcctgagtagctgggattacaggcatgtgccaccacgcgaggctaattttgtatttttagtagagacggggtttctccacgttggtcaggctggtcttgagcccccgaccccaggtgatctgcccaccttagcctcccaaagtgctgggattacaggcatgagccaccgtgcccggcctcctgatctttttattctcaactctcgctgactaggagatgagaaaggaagcctgagctgtcacaaggagaggacccagacatgcaagaggcaaaggaacaggaacatgacagctctggagtctctacagggagactcacaggaatagaccatcccctgatcacaggaacacagggtccttcttgcccttttctggggcaaaagagtgagtggccacagcctctgtcttggagacccctatcagaaagggattgctttaggtggtgttttttcactctgctaccttcctccccaccccaccccatttcccttcatgaccttgtgactccattaggtctcctttcttcttgattcaagaaaaagccaggcggggagggctggggaccagggagggagtcaaggggggcagagaggctgagccaattgcggcgtctgcaaggtgcaaagcaatcagcggagccgctggtgagcggggtcactcagtagtgtgcacatcagggtgaaatcctttcagctcttcgccaaacccctagtgaaagacaatcaggctcgctgtcaccgagctaattctgtctatataaaagcagtaatgaaattcacggcaggattaccctctccatccaatgggccagcgtcgtggtgacatatctctcttattgcccgaatgtaacacaccatctaatttacgtcgtgtagcgagcaggaatgaaatgttcataaagaattgctgcatctcgtcaccttaactgcggcccggggctctgaggcatctgtcagggagaggagcaggaggagggagggcaggcggggctcagggagtagcagccgggggcaggggtttctgtggggttgttgtttcttaatagggtgaagtggaggcagagggaggtaggggctgggcgggggtcaggaggagagagggtaagggaggggcacagagggctttggggaggtgaggatgaataacggtaggttgaagtagtctggagggaatgtttggaagtctgtgggtttgggtgagtttgggaggatgaatgtgagtgcctaagtggccaggggttggttggggaaatgaccctctgggtgcatcccagttactgcagggcccctgacagtctcttccatcctctggaagtagaaacccagccacctctgaagactatcagaacaaaactctccagtgaacaagaaagaagcccatttataaaagtgaacaaggagcagacagacacaaggagcaagtttcataaacctaggagttctccatggctactcccccaccctcagcaattgcatgacccaaccggccatctgcaagccctttcaacgccacttgaaaatgttcttctcttccattctttcctctccacccatcagcaccctgcccccatcccagtccaaagtcattgccatctgttgcctagatacctaagtaccctcctgactgatctctccatgagccctcttgccccctctggcccctctttctccctctactcagccaggtagtgatcatgtcatcactaccatctctcagcttaaaaccctgcaatggtgcccccttgctcttaggggataccattgcaggctgtcccctaagaccctacctcttcagcttctttgtcccatgctcccagtcacaacagtgctccagccatattggccttttcccatagtctgaataaggtgctgtgttctaagaagccatgggggctgtgcacacgcctttccttcttggaagactccccttggcagtggcagcatcaccagaccctgtccagcatggtcttaactcctactcccacttcagatgccagctgaagccttgcacctcaggggaagccttctatgactactcactcatgtagctctctcctcttttatacactttcttggcatcatttacttctttttgtgactgtttcattatagcctggattctcccactggactctgcactccatgagggcagggaccatgcctgttttactcaccattatatccccagcccctggcacagtacctggggacattgtaggtgctaaataaatacttgttgatgggccgggcgtggtggctctcacctgtaatcccagcactatgggaggccgaggcaggcggatcacgaggtcaggagatcgagaccatcctgactaacacggtaaaaccccgtctctattaaaaaatacaaaaaaattagccgggcaaggtggcaggcgcctgtagtcccagctactcgggaggctgaggcaggagaatggtgtgaacctgggaggcagagttttcagtgagccgagattgtgccactgcagtccagcctgggcgacagagcaaagactccacctctaaataaataaataaataaataaatacttgttgatgccatgtggaagcagctgatggaaaaaaaaaatgtgttgaatgaagaaattaggggcatgcacaaccattacaaggcgagaacctaccttccttccttccttcctccctccctccctccctccctccctcccttccttcccttctttcttccttcctttctttgttctttctttccacaaacatctactgaatgctttctgagtgccaggcactgtcagaggcacagtagctgcagtgctaaacaagtgaagatacagtccctgcccatgaggagctcatgaggggagggagacagacagccatggggctaaacctgtcctgtgcttccttactccagagaagagccacatccttgcccactggcacagtcacctacaaaatgtggctgattctctgggaccatagagaattc

SEQ ID NO: 68 - DNA, 146656 bp, Homo sapiens
gaacttccccaatacatagcttagctacttgtggggtaaaaataccaacagatggaagaaactttgttgaagagcgataactagatttctcctcctagtgaagcatttagtgagtatctactatgtgctgagcacctcatctcatgtcattctcacaactgtgatatctaggtatattatttttgttttggcgatgaggaaactgaaactgagtttaaatagcttgccccccaaaaggtcacacaactggcatacagtggatacttgttaaatatctactgagtgaatgaatgaatgagaagctaataagcagaaaggccaggactcaaacctagactttctggctccaaagcccttatctctttctactctttattccaagcaattagttttgaactctcagagtcagtattagaaaaataatctgatgttgggctctggatctgtgctttctctcatctgggatccacagccttcccacagctgcacatggcaccccagacaccaggcctggccagagcaggaagtttaggtctagagaagaccagaacttaagccctctggaagatgtccataagatgaaccctcccccatcctgtccagtcttccttcaatgccccaaacttgggttaacttatcaaaaggactgagcaagacacttgtctgggagatggaccatcactcctgcatgggtagaatcaacccatgtcccttgtgcccaagctatgtgaccatttctcattaactcagagatgtttactcaccagatgatacatagttgtgtgtgcatgttgtgtgtagacatgtgttcatgtatgtatacatatgtgttagtaaatccatcctttcattagttctcctatagttcaatggtatctactatctgtgtatgcagaccccatgtctgcaccctgaggttccctccccacagacatccatggacaggtgttcctggacctgccttttctctttgcttctatcctccactcctagaaactgtatgtgaccttccagctaatgctcacgggccacagagtgggatacagtgctatttgcttcctcttattttgaggaaagttctactccctggcagtagttaactttttctttatcaaaatgctaatgcatagatgtatcaacaaagaaataatatatgcctggcacacagtaacctctcaattcacgttagctattaacattattatagctcatttgtcctccctgaccagagggcgtccctccttctatcatagccctgctaggtctggaagtacaattacccatagctacacctgccagggagctatgtgaggcttggtgcgcttgtaaaggtctcctctggttagatggctcccagccattgtcatccatatctctcagtaggatgaaaatctcacacatccctgtcaggcaggactcactcatattttttaaagtctctataaaataagtctcaggggtttctgtagacattgtatccaaaaccttaaatttctaagacacagattgtttcctaaacccatccttctgcagctgacattttttctaggtgagacctgagaccagacacactggccaatgtctaccagagaactatagtttcagtcatggcactttgatatggtttggctgtgtcctcattcaaatctcaacttgaattatatctcccagaattcccacgtgttgtgggagggacccagggggaggtaactgcatcacgggggctggtctttcccatgctattctcatgatagtgaataagtctcacgagatctgatgggtttatcaggtatttctgcttttgcttcctcctcattttctcttgccaccaccatggaagaagtgctttttgcctctcacaatgattctgaggcctcccccagccatgtggaactataagtccaattaaacctctttttcttcccagtctcaggtatgtctttatcagcagcatgaaaacggactaatatagtatattggtaccagtagaatgggtcattgctgaaaagatacccaaaaatgtggaagcaactttggaactgggtatcagacagaggttggaagagtctggagggctcagaagaagacaggaaaatgtgggaaaatttggaacctcctagagactagttgaatgggtttgacaaaaatgctgatagtgatatgaataataaggtccagtctgaggtgatctcaggtggagatgaggaacttgttgggaactggagcaaaggtactcttgttatgttttatcaaacagactagcggcattttgcccctgccctggagatttctagaactttgaacttgagaaagatgatttagggtagctggcaaaagaaatttctaagcagcaaagcattcaaaaggtgactcaggtgctgttaaaagcattccattttaaaagggaaatggagcataaaagttcagaaaatttgcagcatgatgatgcagtagaaaagaaaaacccattttctggggaaaaattcaagtcagctgcagacatttgcataagtagcaaggagcctaatgttaatcctcatgagaaaaatgtctccaggcaatgtcagagaccttcatggcagcccctcccatcacaggctaggaggcccaggaggaaaaagtggtttcgtgggctgggcccagggtccccatgctgtgtgcagactagggatttggtgccctgtgtcccatctgctccagccatggctcaaaggggccaatgtacagctcaggctatggcttcagagggtggaaaccccaagccttggcaacttccatgtggtgttcagcctgtgggtgcacagaagtcaagaattgaggttcgagaacctctgcctagatttcagaagatttatggaaatgcctggatgtccaggcaaaagtttgctgcaggggcagggccctcatgaagaacctctgctaaggcagtgcagaagggaaatgtggggttagagcccccacacagaatccctactggggcactgcctaatggagctctgaggagagggccatcatcctccagaccccagaatggtagatacaccaacagcttgcactgtgctcccagaaaagacacagacactcaatgccagcccgtgaaagtagccagaagggaggctgtaccctgcaaagccacagaggcggagctgcccaagaccttgggaacccacctcttacatcagcatgacctggatgtgagacctgaagtcaaaggagatcgttttggagctttaaaatttgactgccccactgattttggacttgcatgggccctgtaactcctctgttttggccaatttatcccacttggaatggctgtatttacccaatacccgcacccccattgcatctaggaagtaactagcttgcttttgattttacaggctcataggcagaagggacttgccttgtctcaggcgagactttggactatggacttttgggttaatactgaaatgagttaagactttgggggactgttgggaaggcatgattgattttgaaatgtgaggacatgaaatttggaggggctggggcagaatgatatggtttgtctgtgtccccattcaaatctcaacttgaattttatctcccaggattcccatgtgctgtgggagggacccatggggaggtaattgaatcatgggggccagtctttcccatgctattctcatgatagtgaataagtctcatgagatctgatgggcttatcaggggtttccacttttgcttcctcctcattttcttgctgccaccatgtaagaagtgcctttcatctcctgccatagattctgaggcctcccaagccatgtggaactgtaagtccaattaaacctctttttcttcccagtctcaggtatgtctttattagcagcgtgaaaatggactaatacacacttgataatcctaattcctttcctttggcccaagtggcctatcctcctagctaatgataggttctttggctctgccaggagctgacattccaaaccaaacctgcttcttcaagtgaagcaagatatcattcaagttggacagatacagagcattcagtaagcaggtacaggggagaggggaaagaagagagataacacaaccaatcattgcaaaaaaatcaggattctccagacagtatctgtcctgaaattggcataagacattttttttttttgcaggatctgcataaacccaggggtctgtgcctagaagtgtattaagattaagttttatttgattgtctttggataagcaagagggttaaggaagattatatggaatgaataaactagaagaggttggtgatggattagaaattggaatccaaccctgttgatgtgtttatttgattttcacattttcctaccccctttattcccactcccctttccccatgcccagactgacataaatgataccttgatggctatttcagttgcaaccctatatatctagggaagcctgagctccccagctgccacccaactctgatcccctaatcccaaagagaccagctggtcagagttctcagggatggcagaccccagtgcagattgggcctctgctaccaacagtctctggtcatggtcagatggctgaacttctctgtgtattggccttagtatcagcctcctgctccccctccacacacaccaccccagataatagcaagaagcattctaaacttcgtggaatactattctagaaattcacctttatatttctcactatcattaccagatcagaatatagtcctcaagaggattaacatgatcttgggtgggccagtcagctttactgctggcctggacagctgtttagtcatcggtcaccaggagaaagtgaggatggatcagtgcagctcagccctgccactcagtgcatgacccattatgataacagcaaagataattttctaggatcctgggctgtctgcagattttgggagtacctacagataccgcatggtttaaaactccattggtgaaaagcaacaaccagcattcaccctggttggagttcagtatgatggtgaggggatgtctagtatatagataaaactgaaaggcccctcaaaatggagactaatagatgatttgaagaaataggcataaatttgttaagtgtgggtcaaatcccttgctctccaggccctcctaaagccagaagcttaatttagtggtcattgcctgctcggtgccactaaattttctggtaatctgcagggatatgtaattatgctgtagttagtgattgttcactaagtaaacccttggtgtagttaccatgtaagtcaacagtatttacaggatattttttctgcctgtaactcaaagccttaccgaaacaaattggaattgccttctggaggccgttgttataaattacagacccaacatctgtccacatctgcaatgtctagacagcctgtctcagctacaagagagaagagagacaaatgagggaaagcgagggagatatgaagagtggcagagaagtctcagattcatacaatttttctcttcagaggtttacccaaaggcttgctgtgctggcttctaaaattgacccgaattatcagcagcccaatggcaagctctggagggtttggggcctggtcatcacccctggatgtgatggcaatgcagcgtcttctcttgggccgtatctctgccccaacagattctcagaggtcacagtggggcctggaagatggagttataaatacagaaactgactatggccagatcgggagaatcggctgtatctccaaacattcccccttctctctctctcctgctccctgactctcaccaccacctggctcagcttttcagagtggggcgaagcattcatttgcctacctttcctgtggtccctctcgtgtacccacgataaggagcctgctcgtcagctgagtgattgtatttttttacagttcctagcacaaaccttctcatttatatgtaaagcagtcattagtcatagctccgttcccacacactgcctgatgtacaatcacattttgcagcggatgaatctttccacacagctgctctgctatgaataatccgtctctaggcccataaatcagaaaaaaatcatgcacctcgttcgcctgatccttacacaaagtcatatattttacatgaggacgagctaaatattcatgagtcttaaaggcttttttcataggcacttgttggggttgttttctactgttggggggataccaaggttgtatttaggagaaccagggattttaaagaggaaaaagaggcaagagagagagaatctctctctctctttctctctctgtgtgtgtgtgtgtgtgtgtgtgtgtgtgtgtgtgttgtggggggaagaaagagaagaaagagagggagagacagattgattgagattgcaagcttatctcttagtcatgtgggacaaaggatgctattgtgagttcttaaaaatatgataaatacttgttgtgtacctgagctttgatcctgcccagagccatgaatattgcctctctgaccttcaaggtcatttgatgaacctttgccttctgacctgtggaacaatgaatttggtccttctctgtgtaggaaggtggctgggagagccccacctggatttgataaaagcaggacttggggtgagggaggggggaaggtgggaaaatcagcagttgcaaaggaaactgctctgatgctagcaaagcttcctacctacacacaacttaaggcctccagcagctacctggtattctgtgtctgacccattcttctttcagaaagcatttaatgtggcattgctcatcctccgttttatctccctccctggtctgtctccttccactcaccctcttagcctccctcatcatctcactttcttgtctttaggctttttctcagatggacccatgctctgccagggcaagctcctcagactctctccctctcccaaaatgcaaaatctgacctctcccagaagcctccttctactaaatagagaagggagacttacttgctttgctgtgcaagcctcacactcttgtcttccctagctaacccactcatcataccagcccctctgctggcaggtgctttttcattttattctggcattcactcagcatttgtgtgctcagtggcgctgtctgtctgactcattaatgccatggtctgcagtggtgatgatgatgtgtcctcacttctctccgaagggtagaaaattctgcttcttggatttcactgacaacacagggaacacatttttagggagagatttctcagatttagctctagatctggaaacacacatatgccctcagaccctttagccttcagtggataatgaaaatacgctgggtttgagtaggctgtccttggatgaagaactgtatcaaaagtgtaatggcactcagggggttacttctctatttaaagtcacttctctatttaacggatgggcaaactgaggtataatcttaggaaactcctttctaaacttcaaatcaggaggtcatgacaggcagctgcaattacttctgagttgacttttgtgatgttgactctgggcatcaagcttttacaccaccctccagggccaaaggccagggatcgaagccttgccccatttctctcagttctcgggctgacctgttcttctgctgccccttgcccctcctgccctcaacccacttttgctaatgtgcagaaaaaattaagtcaaagaaccgccagagaggaggaaaatgtccaaagaatcacagatggcagccttgcaaatttaatttaaaatcattctttattatccaaaatattaaaattagagctataatgcccaaaggaaaacacagatgaaaacccccaatgtttcacggcctcttcctcagggggtcccaaaaacactgagtgggaatgcttttgaaaagaaagcaggagtgcaggagcaaagagccagctgtagatcattgagccaaacactcagtgactgacccaatcagcttcccttaaagccaaacaccaactgtttcatatgcaattaatgattgccctggcaaattaaagtgcatcaagtcatcacaggcatggttgaatgagaagacacacagcagtcacaggtatctcatccctggcatctacataatgatattaccaggctagactcagagatttaattctgcaaaacaccatgcactaaatatttatattcataaaagggctaaaaaaatgcccacatgctacctctaggctccccattcatctagaataggctgctggtttatttgctggggtctatggttgggagtaaagggtacaagtcaagtgtcaggaggatcccagtgttcctggcccccaacttcacctttcaaaagggtctcggccaggcatggtggctcacgcctgtaatcccagcactttgggaggccgaggtgggcggatcatgaggtctggagattgagaccatcctggctaacacagtgaaaccccatctttactaaagtacaaaaaattagctgggcgtggtggcaggtgcctgtagtcccagctacttgggaggctgaggcaggagaatggtgtgaacccgggagacagagcttgcagtgagccaagatagtgccactgcactctagcctgggcaacagagcgagactccgtctcaaaaaaaaaggggggggggtctcattcctggattgggtactgagcagcatccaagagtgggcaaatctccttccttctctggagatgtcaaagcagaaaagaaagccccttcgtatgtcagagtcaagaaaggagtgttagaatggatgacaacatctgttgcccattctttggtgcagaaaatcaaagtccagagaagtaccaaagactgttacagtcatcctttacaggttccaaattattttcttttcttttcttttttttttttgagatagggtctcactgtgtcacccaggctggagtacagtggtgcgatcttggttcactgcaacctctgcctccggagctcaagtgagcctcccacctcagcctcccaagtagctgggaccacaggcatgcaccaccatgcccggctaattttttgtatttttggtgaagatggggtttcaccatgttgtccaggctggtctcaaacccctgagctcaagtgatctgcctgcctcggcctcccaaagtgctgggacaaattccaaattctttttttgttttgttttgttctgagacagagtctccctctgtcgctgaagttggagtacagtggccacatctcagctcactgagacctatggctcctgggtttaagtgattctcttgccttggcctccccagtagctgggattataggcgtgagccaccaagtccagctaattttttttttttttttttttttctgagatggagtctcactctgtcaccaaggctgtagtgcagtgacgtcatctcagctcactgcagcctctgcctcctgggttcaagtgattctcctgtctcagcctcccgagtagctgggactacaggcgtgtgccacaacacccagttaattttgtatttttagtagagatggggttccaccatgttggccaggctggtctcaaactcctgacctcaggtgatccacctgcctcagcctcccaaagtgctgggattacaggcatgagccaccaagtctggcctaatttttgtattttcactaaagatggggtttcaccatgttggccagtctggtcttgaactcctgacctcaagtgatccgcctgcctcggcccctcaaagtgccaaggcatgagccaccgtgtccggcctccaaattccaaattctaagtcacaaatatagttgtgattttggatgccaccgtgcctgatctgaagaatagggtctctccaaacaatcataaataaaccggtgctgatggaaagaaaatgttttctttggccttttggatttgtcttggtttcctctactaaaacctaattctgagcttatatggcccctactcaaatattctcatctcagcattcagcacactgctgggcctcagcacccctaccatataaaggcacagaacctaacctggcttggcctagcccctatcctcatcaggttgccaggatcatttctgtgtccatcctggagactgctttcctctccccactggcatcccaaacccaattattttcattcagccccctctgccctttctgtctccctggtagaaaatgcagatgatggaggctgcctgttctctgtgcacaccatgacttggagccttcagcaacttttccagggctctgcatattataatcaagatgagatcagctaataaaaaattacattggttacaatccaaaaagattaaccagccttaagggtttcatggctacgcattacacttctcaattttcctacaattaagctaacaacaaataatattgacaaataactgctagatgtgctagttgaagcctggccatggaagggagggtggttctgtgagtctggccattccctgctcgtaagttctagcaaacactgggctgctggtacttgagctgctccggtggagaagtgatgaggaatggttgctgtgcttgctcctaaataaagaattttgggccaggtgtggtggctcatgcctgtaatcccagcactttgggaggccaaggtgggcgggttgcttgagcccagaagctcaaggccagcctgggcaacatggccaaaccctgtctgtacaaaaaatacaaaaattagctgggcatggtggcgtgtgcttatagtctcagctacttgggaggctgaggagggaggattgcttgagcctgggaggcggaggttgcagcaaactgagattgcaccactgcaccccagcctgggtgacagccagaccctgtctcaaaaaaaaaaaaaaaaaaaattaaaagatgacaatcctgacacctgttctcctaccaccttttagaaattttcctggtttctactgatttctcaacctcctgctggagacaatccaagataaggagacctatattctcacaaggcacaactatatcaattcattaattaacctgatgtcacaaatccaagacctaaaataaattagacctagcattagcaaaatttgggacagataagactaagagtctcaatgaaaaccccctcccacacagatgctgatagaggtctgtggaggtgagacttctccctgactggctgctgccctggcactggggaagccagcgaggggtggaggaaggaagggtgttttttttgttgttgttgtttgtttttttatacaggatctctctctgttgcccaggctgaagtgcaatgctatgatcacagctcactgcagcctcaacctcctgggctcaagtgatcctcccacctcagccttccaagtagctgggacaggcctggctaataaaaaaaaatttttttttgtagagatggggtctcaaactcctggactcaagctatcctcccaccttgacctcccaaagtgttgggattacaggcatgagccactgtgcccagccaccagttatttctattactcagtgttggggaagaagctagcagagggaatggttaggagaggaggactacaaaggaaataatgacacttgttatcatttaatcagagttaccatgttccaggcactgtggtaagtgctttcatgcattaatttatttaattttcacaataataacatgctcactttgatactatatctgatgttcatcaaaactgacaaatatctgaagggaacccaggctggagtgcagtggtgtgatcttggctcgctgcaacctctgcctcccgggttcaagtgattctccagcctcagcctcccaagcagctgggactacaggtgcacaccactacgtccagctttttttttttttttttttttttttttttgtatttttagtagagacagggtttcaccatgttggccaggctggtcttggactcctgacctcaggtgatccgcccacctctgcctcccaaagtgctgggattacaggtgtgagccaccgcgccttgccgattggttttttttgttgttgttttttgttgttttgagatggagtcttgtcctgttgccacgctggagtgcagtgggccaatctcactgcaacctctgcctcctggttcaagtgattctcctgcttcagcctccccagtacctgggattacgggcacccgccaccatgcctggccaattcttgtatttttagtagagacggggtttcgccatgttggccaggctggtctcgaactcctggcctcaagcaatccacctgtctcagcctcccaaagtgctgagattacaggggtgagccacagcacccagcctatatttgtgttttacacatctgggcctggtgtaggactctctctctctctctcttttttttttttttttttttttttttttttgagacagagtcttgctctgttgcccaggctggagtgcaatggcaccatcttggctcactgcgacctctgcctcccgggttcaagcgattctcctgccttagcctgcaaagtggctgggattacaggcacctgccaccatgcctggctaacttttttgtatctttagtatagacagggtttcaccttgttggccagcctggtctcgaattcctgacctcaggtgatccacccgcctcggcctcccaaagtgctgggattacaggcatgagccaccgcgcccagcctctcgctgtcttttataatgtaatttttacttaagtataatatacagaaaagtgcagagaatgcataaggatatggctcaattaatttttaaaaagcagatacacctgtgtagccagtatggcgtctcctctctctcaacacaaatttgaaatcaaccctcagtctatcctcaatggagttgtccctgaactaagcctacaggaagcctctgagctgccttttttctctggtttctcacagttatcactggaagaatcacaaaggagctctgttttggagcttggaggtttagaatcaagagtctcattggtggttttagtagctacactgctttgttcctgaactggcgaagatgatgccccggcattgaagggcggggtcagaacagtccatgccccaaagagtttgcctgtgagccattcaatttctcacctagtactgattaactcaatgcaaatgttttgcctattttttatttaaaaaaattgtatatgtttttatttttttaaagtagagatagggcctcaccatgtttcccaggctggttttgaactcctaggctcaagtgatccacctgccccagcctcccaaagtgctgggattacaggcgtgagccactgcacccagcctgttttacctgttgtagccacaaagagacctgaagattcaagagtggctctttagctctgttgtctggctcctcctcctgctcagtcagtgtgggtccttcatgcccttgaccctacttaggggcagagcatgaccttccatttgcctcttctcttcctttccacctccaccttggtccatcctcagaccctcttttattcctggctcccacggtctgggccctttctctgaaggactccctctgttggattctctgacaggtgattgaactggggagaacattgggaagcaaaccctcataacacaataattagttctttaaaagcccagcttgtctaggtgtagtggtacgtacctgtaatcccagctactcgggaggctgaggccagaggatcacttgagcccaggagttcaagactagcttgggtaacatagcaagaccacttttttttttttttttgagacaaagtctcactctgtcgcccaggctggagtgcagtggtgcgatcttggctcactgcaaccaccatctcctagattcaagtgattctcctgcctcagcctcccatcgcccaggctggagtgcagtggtgcgatcttggctcactgcaaccaccatctcctagattcaagtgattctcctgcctcagcctcccatgtagctgggattacaggtgcccgccactacacccagctaatttttttttcttttttgtatttttagtcgagatggggtttcaccatgttggccaggctggtcttgaactcctgacttcagctaatctgcccgactgggcctcccaaagtgctgggattacaggtgtgagccaccgtgcccagccaagaccacatcttaaaaaaaagaaaagaaagaaaaaaaatgttcaaaagcccagctttacaatcctttgcacatctccatgttgggtaatagaatgtctccttcctgttaaattctctatgtctggagaattcaaataaacaaacaaaaatctactctgctgtacttaggttcaaagccgaattctggtaaatgaatcttttttttttcaagacggagtcttgctctgttacccaggctggagtgcagtggcacgatctcagctcactgcaacctccgcctcccaggttcaaacaattctcctgccccagcctcctgagtagctgggattacaggtgcccaccactgtgcccggccaatttttgtatttttagtacagacggtttcaccacgttggccaggctggtctcgaactcctgacctcgtgacctgccctcctcagcctcccaaagtgctgagattacaggcgtgagccaccgcgcccggccaaatgaagcttcattgtgtcctttctgggcctgagtccttgacaaaattctttgttaggcccttgtcatcatcgttgtcatcatcatcaccatcatcatcattactagcatctaatgtttactgagtccttaccatgagctggggcctgggcaaactgctttccatagattgtctcctcctggtccagctaaatctggactactgagtctaaaccagagggtcagtctccggggctctgctgtgaatgaggcagactctcagaccagcactggaatcagcagggagaagccaggggttgggcataaagtttagacagattgctgacagttgagacaggtttgggacagttctctgacagagactgaagagtaatgtttggtcatgcgtccatttaataactatgtagaaaagtgcttgctaaggataagggaactctatgctcaggaaagctttgagatcagaaacagatcagtacagcacttcgtgaccttaatatactgtaagctgcttttatagttatgaaatgatatgataccagacatttgcatccatatgagccagaaaagggtgaaagaagtgggtaagggcacacacaaaacaaaactgactataagtcagtatttttgaagctgggtaatgagtaaaaggaaatttattgtattattctctttacttttttatatgtttgaatgttaaattcaaagttaaatatacataccctggccgggcaccgtggctcacgcctgtaatcctagcactttgggatgccaaggggggtggatcgcttgagctcaggagttcgacaccagcctgggcaacacggtgaaaccccgtttctactaaaaatacaaaattagctgggtgtggtggtcagcacctgcagtcccagctacttgggggctgaggcaggaggatcccttgaacctgggaggtcgaggctgcagtgagccaagatggcaccactgtactccagcctggtgacaaagtgagaccctgtctcaaaaataaaataaaaataaataaataaatacacacatccatattcttccatgccttttttccttttctgtgtgtgtgtgtgtgtgtgtgtgtgtgtgtgtgtgtgtgtgtgtgtttaattttagttgttttctttttcctggttgttttgttattctgaattaaggtgctttaaaaaaaatagccagttcaggcaagcatggtggctcacgcctgtaatcccagcactttgggaggccaaggcagttggatcacttgagatcaggagtttgagactagcctagccaacatggtggaacctcatctctactaaaaatacaaaaaaaaaaaaattagccaggcgtggtggtacctgtaatccctactcaggaggctgaggcaggagaatcacttgaacccgggaagtggaggttgcagtcagccgagatcataccaggctgggcgacagagtaagactctatcttaaaaaaaaaaaaaaagccagttgggtgcagtggcatagctacttaggagactgaggtgggagaatcacttgagcctaggagttcaagaccagcctgggcaacatagtgagaccctgcctctaaaacgagagagagagagagagaaacgtacataatgaataaacaagcaatcaatcatttatttaaaaattttaaaaaatagcctatcttagttgcgataaggacaaaccaagtcaaatggtttttttgggccagtaagaaaaagatagttatgggttcctaatatccaggtgcctataaaggggacattcataggagagtcccatgaagacaaatagtctggggtgggagtccagacctctttggacagctgccctggttctctccttccctttgctgccccttctcagggttgttcctctcaaaatatgtttcttgatgcatgaatgacattgcatttaatttaagaggcaattctctgataagaaagtcctgccttttccccacttcctgccccaacctgctcccagacctcctggggttatagcctggctatctggatttctctctgcctactaatttgcttgtcatcaaagatccttcccactgaaagccccccttgatttttttcctggtacctgcttctggggcctccctcaatgacctgccctgccctgaagttctgtccagctgccagctctcatccacccccaaaccagtcccatgctaaactcttccttttgcctttctagaggcactctccatcctttcccagccctctctggacctgggagatgaacacaaatggactgcatcaaaggctctcttgtcctctggcttctgtttgtgtttaaccaaaaggagatatcagaagattaaagagcaggaggatgctggtatatgattcttccagatccctccctgctgggctgccatgaaagggctacatccctttttgaatgccatagctatggtcaagtggtcctttccccacagccaccttctcagggtcttggtaactatgcccttcccttggcccttggggcctaggagtaatatggttgtctgctgttgctagctgaggggtatgcactagcccttgttggtctcccttcactctgtccacacctttgcaaataggtccttaattaaacccttctgaaattaatcaagtctacatatgccaggactgtgactgatacaaatccatactattgtcaaaagagccctagttagtatctatttttatgtcttgtttccttcacataatggaaagcttcttgaaggcaaggcccatctcttatctgcagagtgatagacacaaggaaaatagtgagtttttaacactgactcttagaagtaatcctgacctcgatcacctcttcctcaaaaggcattttttaggagggaaggggtatccaacgaaatatagctgcagacgatgtaaatgtctgggaaattaaagcagccagataaaggaaatcaccagcttgaagacatggtagtgggggagtctggacaaatgccagttaaagataaaacaacctgttcaaactttgactaaactatacaaaataaagtatgttaaacaatgttggtcaaaaagtgtctaagaaatccaggcacagaaagcaagggaaagatagctttgtcagcactgaagactaaaaactgattaatctcccaacctgggaaacatatgtagcaaatatatgaagtatatctttataaccaaggtgaatactctttttgtttgtttagacatgaattcctgctttggatacatgtgttaataaataaaaaactgtcactgcatttaagatctggagttagactacctgtaaaagaaccctggttccataagatattacagaaatgatggaaggtgacgcccaaggctaggttatacaaggtactggggcttctgccttagtctgggaaaaattagccaccatgttgtgaggtcccataagcagccctatggagaggttcacatgacaaggaaataaagtattctgcgatcagtcacccccaaattgccagccacatgagtgagccatattggaaggagatcctccagccccagttaaaccttcagatggctagagccctggccaacactgactccaatcttgtgagacactgggtagaacattcagctaaattgttccttaatttctaatgcatgtcagatttaaaaagatgcttattattgttttaagctgttaattttcagggttatttgttatgcaacaatagataactaatacagatgcataccctggatctaatgatgaagaaacatcacagccaggcacggtggctcatgcctgtaatcccagcaatttgggagaccgaggcgggcagatcacctgagatcaggaggttgatatcattctggccaacatggtgaaacctcgtctgtatgaaaaatacaaaaattagccaggcttagtggcaggtgcctgtaatctcagctactcaggaggctgaggcaggagaatcgcttgaacccgggaggtggaggttgcagtgtgctgagattgggccactgcactcgagcctgggcaacaagagtgagacttcatctcaaaaaaaaaaaaaaaaggaaacatcagataaatcaaaattaaggagcattctacaaaataactggcctgtaagcttcaaaagtgtcatggtcatgaaagttaaagaagagatgaaggaattgtttcatattgaaggagaccaaagcgatatgacagctaaatataatttgtgaatctgaactagatccttctgcaataaaggacattattgggacaactggcaaaacttgagtggattctgaggattagatggtaggtatgtatcgatgttaatttcccaattttggcggttgtatactagtaacatagaatgtattcgagtgtaagaaatactaaagtaggctgggcgcggtggctcatgcctgtaatcccaacactttgggaggccgatgcgggcggatcacgaggtcaggagatcaagaccatcctggctaacacagtgaaaccccgtctctactaaaaaaaaaaaaaaaaaaaaaaaaaaaaattagccgggcgtggcagcgtgctactcgggaggctgaggcaggagaatggcgtgaacctgggaggaggagcttgcagtgagccgagatcaccccactgccctccagcctgggcgatagagccagactgtctaaaaaaagtaaagggctgggcgcagtggctcacgcctgtaatcccagcactttcggaggccgaggcgggtggatcaagaggtcaggagatcgagaccatcccggctaacatggtgaaaccccgtctctactaaaaatacaaaaaattagccgggcgtggtggcgggcccctgtagtcccagctacttgggaggctgaggcaggagaatggcgtgaacccgggaggcggagcttgcagtgagccgagatcgccccactgcactccatcctgggcgacagagcgagattctgtctcaaaaagaaagaaagaaggaaagaaatccaattctctcaatctcacctgcctgcacttcttttttgaaacggactttcactcttgttgcccaggctggagtgcaatggtgcaatctcggctcacagcaacctccgcctcccgggttcaagcgattctcctgcctaagtctcccgagtagctaggattacaggcacgcaccaccacgcccggctaattttacatttttagtagagacgggtttctccatgttggtcaggctggtcctgaactccccacctcaggtgatccgccgacctcgcctcccaaagtgctgggactacaggcgtgagccatcgcacccggccccttgcctgcttttctttactccatggaaggaagtgcaggtgatgacgtttgacaggcctctgtgcagaccagactgtaccttcagtaacttctcacgtactcgcatttctttcttttcttttttttttttttttttttttttgagacagggtttcactctgtcacccgggctggagtgccgtggatcatagcttactgcagcctcgacctctgaggctcaagcaatcctcctgccttagcctcccgagtagctgggactgcagggatgtgccaccatgcatggttaactatttttgtaatttttggtagagatgaggtcttgctatgttgcctacctagcctggtcttgatctccttagctcaagtgatcatcctgcctctctgccttccaaagttctgggattacaagtgtgagccactgcgtccagctgcatttctctttttatttgtttgttttgagatggagtttcgcttttgtggcccaggctggagtgcaatgatgccatcttggctcactacaacctccgcctcccaggttcaagcaattctcctgcctcagcctcccgagtagctgggattacaggtggccaccaccacacctggctaagttttgtatttttagtagagaaggggtttcactatattggccagactagtctcgacctcaggtgatctgcctgcctcggcctcccaaagtgctgggattataggcatgagccaccatgcctggccttggccacacatttcttaataataggctgccacactaaaaacaaacaaaacaggtgctcacgcctatgaagacaaagtgttaacaaagaaatagtaaacaaagtgtaattagtctttatcctttacagttcagttcaaatattattgcttttgtctttttctatttcccaagcagagctagttaacatcctattggatgctaccatagcatttcccacactcttcactcatagcgataatcacaatacattgtagtcttggtttttttttttttcttccaagttttctcatagacagtgaggaaggaaatgtctcttgtttctctgtgtacccttcatggcagagagttaatcattacaataataatggttaacacttactgagttcttagtatgtaccaatgctctaagtgtgttatgtttataaattgatttcattcttagagcaatcctatgaagaagttactgtgataatcattattttacagataaggaaaatgacacacaggaatagaagtcagatttgaacctaagtagtctgcctccagagcccaatgctgttaaacactgtggtatattgtactgtataaaataagtttgtagtgaatggataaatgaacgatgactcataattactcgttttattacttaaagtcacctagggcatgaacagagttatatttgagttccaatatacgattaataatattttggacagccttggtttagaacagggtttctcaacttcagggttattgacattttgggctggacaattctttgttgtggggggctgtcctgtgcatcataagatgttcggcagcatctctggtctttacccactagatgccagtagcagctcccattgtccctagttgtgacaaccagaaatatctctagacattgctatatgtcttccagggaacaaaattgcccccagttgagaattactatctagaatagcactaatctaaaaaaagctacttgtttttttgtttgtttgagatggagtttcactcttgtggcccaggctggagtgcagtggcatgaccttggctcactgcaacctccgcctccctggttcaggcgattctcctgcctcagcctcccgaatagctgggattacaggcgcccgccaccatgcccagctaatttttgtgtttttagtagagacggggtttcaccatattggccaggctggtcttgaactcctgacctctggtgatccacccacctcagcctctgaaagtgctgggattacaggcatgagccactgcgcccagccggaaagctacttttggatccagcaatcccacttcccaaatgaattgaaatcagtgtgtctgtcaaaggaatatctgcactcctatattccttacagtattattcataatagccaagatatgaaatcaacctacgtatccatcaccagatgaatggataaagaaaatgtgattatatatacacacatatatacatatacataaacacatatatacatatacatatatattttttattttattattttttttttgagatagagtctcgctctgtcgcccaggctggagtgcagtggcactatcttggctcactgcaagctccacctcccacgttcacaccattctcctgcctcagcctccccagtagctgggactacaggggcctgccaccacgcctggctaattttttgtatttttagtagaaacggggttttaccgcgttagccgcgatagtctagatctcctgacctcctgatccacccacttcagcctcccaaagtgctgggattacaggcgtgagccaccatgtccggccctttttttttttttttttttttttgagactgagtctcgctctgtcacccaggctggagtgcagtggcatgatctcggctcactgcaacctccgcctcctgggttcaagcgattctcctgcctcagcctcccaagaggctgggactacaggcacacaccaccatgcccgactaatttttttttttttttttttttgagacggagtctcgctctttcacccaggctggagtgcagtggcgcgatctcggctcactgcaggctccgccccgcggggttcacgccattctcctgcctcagcctccagcgtagctgggactacaggcgcccgccacctcgcccggctaattttttttgtatttttagtagagacggggtttcaccgtgttagccaggatggtctcgatctcctgacctcgtgatccgcccgcctcagcctcccaaagtgctgggattacaggcgtgagccaccgcgcccggccaatttttttgagtagagacggggtttcaccatgttagccaggatggtctcgatctcctgaccttgtgatccacctgccttggcctcccaaagtgctgggattacaaacaggccagccaaatgtggtatatatacacaataaaatactattcagcctttaaaaagaaggaaattctggctgggttacatagtaggataactatagccaatagtaatgtatcgtatatttcaaaataactaagagtaaatttcacatgtctcatcacaaaaaaggacaagtaagtgaggtgatggatatgttaattaggttgatttaaccattccacatcctatacatatatcaaagcatcacatggtactccatcaatgtatacaattacgatctctcaatttaaaacaatattaatttaaaaagaaaagcgacttttccactaattgtgctaataaaagaaaagggaaaaacataatccagaagaacagaaaatacaaaaattttatttctttgtatggcagaaattgttacttgcctattgcgacacctattagaagggactaccttggccgggcgcagtggctcatgcctgtaatcccagcactttgggaggctgaggcaggtggatcacaaggtcaggagtttgagaacagcctgaccaacatggtgaaatcccgtctctactaaaatacaaaaattagccatgcgtaatggtgtgttcctgtaatcccagccacgcaggaggctgaggcaggataatccaaccagggaggcagaggttgcagtgagcagagatcgtgccactgcactccactccagcctgggcaacagagcaagactccatctcaaaaaagaagaagaagaagggactaccttaacctttctctgccaattctaaacttaactttatttgtcctcatacgctcctcctcctgtctctcagaggaggctaatccctccatctgttcctagatccctttctgtcctgtcttctcaggaactgttgccatcattatcctctttctttcatccttagcctttctctaatggatcctttctatcagcatttaaatatgctcaagtatctcacttcattttattccccaagtttaaattttggaaaatttcaaaccctcagaaaagttgcaagaagagtacaacgaattcctacaacccttcacttagatccatcaattttcctttttttttttttgagacagagtctctctttgtcacccaggctggagtgcagtggtgcaatctcggctcactgcaacctccatctcccgggttcaaggggttctcctgcctcagccttccatgtagctgggattagaggcacacaccaccatgcctggctaattttttgtatttttaatagagacaccatttcaccttgttggctaggctggtctggaactcttgacctcaagtgatctgcccaccttggcctcccaaagtactgggattataaatgtgagccaccacacccagtcagatccatcaattcttaacattttgccacgttcgctttagttgtctttctccctcccttcctccttccctctttctctctcactccacatagacaccttccttatttcctaaaccaattgagagttagctgcaggtatcataacatttcaccctaaatacttcagcatgtatcatctaagacattctctgattttcttattctcacagttatcacactcagaaaacttaacattgataaaatactgttatctaatacacagcccatattcagtttttccctgactgtttcactaatgtctttatttatttaattttatttttttaagagctgggcatggggcatggtggctcacgcctgtaatcccagcattttgggaagccgaggcgagtggatcacttgaggtcaggagttcaagaccagcctcgccatcatggtgaaaccctgtctctactaaaaatacagaaattaggctgggcgcggtggctcacgcctgtaatcccagcactttgggaggctgaggcgggtggatcatgaggtcaggagatagagatcatcctggctaacacagagaaaccccgtctctactaaatatacaaaaaattagccaggcgaggtggcaggtgcctgtagtcccagctacttgggaggctgaggcaggagaatggcgtgaacctgggaggcagagcttgcagtgagccgagatcgcaccactgtactccagcctgggcaacagagcgcgactcagtctcaaaaaagagagagagagacaaggtcttgccaggttgccaacctggtcttgaacttctgggctcaagagatcctcctgccttggcttcccacacctgtgtgtaagccactgcacctggccctattaatgccttttatagctgttttctctgctgtgtatcagtgtcagtgtatgtgtgttgttcctgtgtccaatcagggatcattcattgcatttagttgccatgcttcttcaatttcctttgaactaaaatcttccttctttcagacaaaacaatgctttccttagactctcaacttctacatcccaccactgtgctagcttttctctccttccctagatagccacgttttgtaaagaagagactcagcagtcttcatatcctcacctccctcttcaacaggctgcagtgtggcatctgcaccccctaaccccttcatgatcctcactcaccagactttcctgctacctctctggtcacttcttgggctactttgtaggctcctcttcctgtgctcgtcctataaatcttacagttctttaggaccctgtcctagtcctgttgctctttccactgtttatgctttccctgggtgatttcttttctttctttattttatttatttatttttttgagacagagtcttgctctgccacccaggctggagtgcagtggtgtgatctcggctcactgcaacctccaccttctgggttcaagcgattctcctgcatcagcctcctgagtaactaggactacaggtgagcaccaccccacccagctaattttgtatttttcatagagatggggtttcaccatgttggctaggctggtctcgaactcctgacctcaggtaatccacctgcctcagcctcccaaagtgctgggatttccagtgtgagtcaccatgcccagctccctggatgatttcattcttttcgggggaagaagcgggagtggagtttcatttaccacctacatgctggaatccctatttgtagcccaggtctttccctccaacttcagtttcaaatctccaatggcctcctcaacatctgaatccacttagaaatctcacaggcaccttgaagcaatatgtccaaaaagagaactgattatcctcctaccacttctactgtgctttctgtcaaaaaaaagaaaaaaatacatatatatggcatccctcattcattacctgagccagatacatagaagtcatctttgacacatccttttgacatcatccatgacacatctaatcaatcaccatactccactgattctatcttcttagtatctctggaatccatctacttctttctgttctcaccaccacattcaggctgccatcatctctcccaggaatatttcagcaacctcataatcctttccccaagcttccagctgtgctccattttaatctctcctccaccctggactctgagtgattttctgaaaatgcaaatctgaccattttttaaattgttcagctagtttctcacagctctcaggatacagtctaaatgactgaacttggcctataagctggagtgaaagtcaaggtattttatatctggtaaggtacaggccctgatgccagtttagaaagcatgtcagctgatttatctgaccagtttatgccggctaaataatggcttgcctatagagccccatactcttctgcagtctcatctagggccactcttcctctaaagtcccactgatcttgttttggttctcagaatcaatcaccaaaaatgcagttacctttgcctggaatactcttttccagtggctgcaccatcatcccaccttatcttttcatttatttatttatttattttttttgtaactccatcctgttactgccttagtcctctgaaaacctccagctagttttcatacgaatgcgtttgaagtcttctccattttgcacttgtgtagaatttttttaaaaattcaagaacaaaactttttattaactgaaagcctattatgtattaagtatcatgctgagttttgtggatataggggctaggacaaagtatcaacagagtaaaagtgtaagctccacgaggaaataactgggtctgtcttgttcattaatgaatccccattcctttttctttttgtttaattaattacttttatttttatttcaatagtttttggggtacaagtggtttttggttatatagatgaattatagtggtgaagtctgatattttagccacccaagtagtgatgaatccctatttcttgagatgatgtctgcacacggttatatgcttaccatttgttggatgactgagtgaataagatagtttaaaatggagattttttcctataagtcaaaaagtattttcctagttcatttattttataaattcagatattttgtacaaggctgtcacaatctaactcacttttttttttttttttttttagacagagtctcgttctgttgcccagcctggagtgcagtagcgtgatctcggctcactgcaacttccgcctcccgggttcaagcaattctcatgcctcagcctgccgagtagcttgaattacaggcgcgtgccaccaggcccgactaatttttgtatttttagtagagacgggggtttctccatgttggccaggctcgtctcgaactcctgacctcaggtgatccacccgccttagcctcccacagtgctgggattacaagcgtcagtcaccgcgcctggccctaaatcacttttgttgttgttgttgttgttatactgttctttttcattgctaagtaatattccactgtgctacatatggaatatgctacaatttgttcatacaaccacctgctgaggggcatttgggtgtgtgtcagttttttaggctgtataaccaattatcacaaacatagcagcttaaaacaacctaaatcacttttaaccaaaccctagagttttctcctcctaaggtagacccaatttccaaaataaacccatattgtaccttttcaggccaaagaaaatatttatatgctttatttgctggaggccattatattccaccgttgaaggacttttgttaagtacctgtttgacccttagtgcagggcttacatcccacagttagcaatagcaagttatgtgctttttgagctctaaacactgagaatttcttgaaccgagttctattcggccctgacttgctgtgggggagaaaagattcctcgggagaagtgtgggtggcgatggcttaggaggaccttgaaattccgcatttgtctgtgagctgctgccaggtgcccattggcccagctactctgggtcgcaaacctgcagatgccagatacatgaaatttggggacgttcagcttcctaaaaccacagttaggcaggtcctaggacccgtgattcttgccacagtttttcttagtatttgggctacaagtgaggcattggccgccatcttgatatcaaatgccaggcaagccgctactggcgtcgctcggtaaccacggagacacccgtgcccctcccgtttctcatccttagaggctgtaaactacaattcccatcagccgatttcctctgcgtaatggcaacttatctaaatctggcttgtgggcaaccgcaacgctgccgcagtgaactgtgggagttgcggttcacggcgtagcctcagtttttttcctgggggaagttccagaactacaaatcccgtgagccagtgggctttcgcctgcgcacggagaagccgattctccttggcccctcagcctgcgcctgagaggtaagagagggcggggggaaggaagaggaggcgggatccgggcgctgcgttggctgcggcctggcaccaaaggggcggccccggcggagagcggacccagtggcctcggcgattatggacccggccgaggcggtgctgcaagagaaggcactcaagtttatggtgaggagacggtggaggccggggaacggtggaggcgctggcgttggcggcgtcgctggcctgggccgcccgcccactgcgggaccgggcagcgggaccctgggccgaggctggcggcggagcggctggagggatgggatgggagctccagaaaggaggctgggggttgcggagcggacccaggggtgggggcagcggctccgccatcttgtggatgagaggccaagtgacagcgggagcttaatcgaggagggggctccaggcggcgcgcggggccctggagggaaaggggcgtggggactgttactgaaaagcggaggaagctctctggagaaacgccgtgaggccgctggcggggccttcctggtgtcagggttaccggtaaggcccgggagaggaggtgcattcacgactggggaagggagcgcgggatagagtgaagacagatacggtgggtagaggggaacgggcagggctggatgcagatggatttaagggtggaggagggaacgctagggctggtgagaggcttatagttttgtagaatgaggagggaggatagcctttgccttgagggtggaatcccagcttggccaaactactgttgacaaactctggaagggaagaggcctcactaaagaagataaggactgggaatgaggacctagggctataatgacagtccctgggaggggaaaagggtgttgactgtaagctagaattacaaatgtcagggaggggtacataacgctactttgaaaggagaagctaaatactgtaataaggacaaggtgatgaaaagtaagagcagattgtcagggaaacatgggtacaggagattggggcaaaatgagtatctaatagggtaagcaaaacaaaatttaaaggtaaattgtgggacggtaaaatgtggaggccaggtgctttgtatcattttctgggaaaggaaaggccgtggagatgagagttgcaaagacccataagaagtgatgagatcagttgagaaatttaggagataaaaagggtggaggttggtagagggaagtaagtcagggataagtcaggatttgtggttacccgtcagttttaggttgaagcacagtgtgagcaaagattggattttgtgggtgtgcttaaaccccttggaacatatttctttaactttgtatcacgcttttctttttgctgtgcttatctttggcaaactcgtatagtctgatatttgatgcttttaatctgatgctttttgtatttcctaggtgtaaaaccagactttgtggttacaactaaagaatgatggaatgcatagattttaagcttaacaggtggccttagggacattgatattatttgcagtccagtcttgctttttcagaagttattgtgacttgtcactccaaatcttactcctttgcttaaaaaaatagctattttgtatctttgcctaaaataccgtaacaaatccagataaacatggatactaacaaaattgaattttagactttaaactgccccatttataagaatacttttttggaatctagtcaaattcactaaaactttatcttgcattagtgttttcgaaaacacctaattaaaattcaggggtatcattaacaaaatttcattgagcctgaagaaggttcttggatttctgcccaacattaaaattctaaatatgaagaagagaccttgaacttttactggactttagaagtaagtgaaagttactacacttaagttagaaaactgttactgcttatttttgttttcctacttagagggttgactcctttttttcttcttttgagatggagtcttgctttgtcgcccaggctggagtgcagtggtgcagcctccgcctcctgggttcaagcgattctcctgcctcagcctcccgagtagctagaactacaggtgtgggccaccacgcccatctaattttttatttttagtagagtcggggtttcactatgttggccaggatggtctcatctcctgacctcgtgatccgcccaccttggcctcccaaagtgctgggatttcaggtgtgagccacagcgcccagcagagggttgactcttaatcctaatcctgacatttgtgtcagatttatggaataatgtgatttacagatcataaagagacattatgagatcatcctttttactctcagttagacttcagcctagtaacattctcagctacttaatctctgctttgtaccagtgagttatgttttgataatggcctccctggttgagttaaagtggacttggagatgaccatatagtagttgcagcttttagagcaccacacattattaaatcttgaatcagttttcatagggagaagccaattttttcttttaattttagttactttcattattgaccttgcctgctgttttggctgccatttgagaaaaggtcaactagaagagggtcaccagaatgacaccttaataaaagaaacagagaatggagagtttgagattgggtattctctttcagtgcagtaacagtcttatgaatctgagtaagtcacaacttccctttggtgccatttaccctgctataacatgtctgtttattcagagtcagttttaagaaaggaagataggccgggtgcggtggctcatgcctgtaatccaggactttgggaggccgaggcaggcggatcacgaggtcaggagatcgagaccatcctggctaacatggtgaaactccgtctctctaaaaatacaaaaaattaggcgggtgtggcagcgtgcgcctgtagtcccagctactcgggaggctgaggcaggagaatggcgtgaacccgggaggtggagcttgcagtgagccaagatcgcgccactgcactccagcctgggcgacagagcaagactccgtctcaaaaaaacaaacaaacaaaaaaggaagatattggccaggcgtggtggctcatgcctgtaatcccagcactttgggaggctgaggcgggcggaacacgaggtcaggagattgagaccatcctggccaacatggtgaaaccctgtctctactaaaaatacaaaaattagccaggcctggtggcgcgcacctgtagtcccagctactcgggaggctgaggcagtagaatcacttgaacccaggaggtggaggttgcagtgagctgagatcgtgccattacactccagcctgggtgacagagcgagactctgtctcaaaaaaaaaaaaaaaaaaaaaggaagctatttgagctagcatcaaataattagtgcacagtacacatggaagaactatccttttaatcaaacgggcatttttattactatttggctttgttctggtcttaacctttccctcaattgtgaatcgctaatgacaacttttatacagatgtcatgatttccatggtttaaacaaatgtaaaattagtttaaaatgccagaatgaaatggatactctcacaaatttgctcattgctatactaaagtgccttgataaagaattttacaataaaatcctgttaataagactgctgattcagagatgaccataattcacacgtgatcgagacttaaagcttattgttttacttgtgaaaaaagtttaagcagaatgtttaacttttaaaaacaaataaatgatattgaaagcaacggtttacattaacttacgtgctaatgtctctcattcagctttagcaggtcctcaaggacctttcttaatacttttttggttaacaaaagtataaatggaaacttgaagagaacctaagaagagaaatgaaaatgattgagggaatatagaccccaaaacacacaaacacacacacacaagcacgtttaagataggggttgaaaagacatactgaggaggaatttgaactttatttttgttttcacctttgagacagggtctcactatgttgcccaggctagagtgcagtcatagcttgctgcagcctcaaactcccaggctcacatgatcctcctgcctcggcgtctcaagtggctacaggcacacaccactatgctggctattttttttttcttttttgtttttgtagagacaagggtcgccctttgttgacaggggtggtttttgaactcctgggctcaaggggtcctcctgccttggcctcccattgttgggattacaggcgtgagccaccttgccaagccacgtttatttttaaaaacaggataaatatattcttgtccagccaatcccagaatcaagtacagtagcttgaaatagatgaaataattttagaatgtattgttttatttatagagctgatagataaatgaaacagtataaagggtaaatatttgctgtttaacagacaacctcaaaacttagcttaaaaaaaacaattatttttcccctcaaatctgatggtttttctgcttcacttggtattggctgaggtgtgggaaagaccttcacttctcctctatatgggcctttctctacctggctgcttggatttccttaaagtgtggtggcaaggttctaagaagggacattccaggagacaggaggtagagactgccagtcttctaaatcctagatttggaagtccaagaatgtcactgtgggtcaaagccagtcaaggccaactacagagggaggagaaataatgtctacctattgataggaagggtggcgtgcataaacaaggaagggggaattgctgggggccaccttttgagacttgctaccgtaggtgctatgctagttggatgttaaggctaaaaataaaaatggtatcggccaagtttgtgggtcataatgctaggaatgtttaggaggcatctctttttttgaggttaacttcggaaggcactaacatgatctcctgcgtgacttcccttaatgatgtcactgttgacataatactgggtgaattaatgtgattaagtaaacttgcttacttacttcaggaaacagaggtatctaaacagattacattttaaaataaattgtcagatgtttcactgtaatggaattttctttacatcagtgaaattgattaccaggtagtgggatgaacatctgaaactagttcttagtttaagttgtctgagtttttgtgtatactttacctattcccagtttaaattggctttcaaacagtttgttttctgggtactcttataggtgttggggtatgaaattagtggtaattctttttgcctattttctttttttttgtctgagataccctgagtctcgctctgttgcccagactggagtgcagtggcacaatttcggttcactgcaacctccgcctcctgggttcaaatgattctcctgcctcagcctcctaagtagctggaattacaggcgtgtaccaccttgcctggctaattttgttgtatttttttttttttgagatggagttttggtcttgttgcccaggctggagtgcaatggtgcaaactcagttcactgcaacctctgcttctgaggttcaagtgattctccttcctcagcctcccctgtagctgggattacaggcatgcaccaccacacccagctaattttgtatttttggtagagacagggcttttccatgttggtcaggctggtctcgaactcccaacctcaggtgatctgcccgccttggcctcccaaagtgctgagattacaggcgtgagctgccgtgtccggcctctttttgctaattttctaaatttatgtttatagtagattttcataaattatcaaaagtgaattattagatgtggagtaaaaattcaactttgagtagttttagaaattatttattgctaaattagaaaataaactttcaaaagagatctcttttttttaaaaaaacttaattgagacagggtctcactctgtcacccaggctggagtacagtggtgcaaccttggctcactgcagcccctacctcctgggttcaagcaattcttgtgcctcagcctcccaggtagctgggaatacaggcatgtgccaccacgcccagctaaattttgtgtttttagtagagacagggtttcaccgtgttgcccgggctggtctcgaactcctgacttcaagtgatccgcccaccttggcctcccaaagtgctgggattacaggcgtgagtcactatgcctggcctagagatgggatctgctttttttttttttttttttttgagatggagtcttgctctgtcacccaggctggagtgcaatggcacgatctcaactcactgcaacctccgcttcccaggttcaggcaattctcctgtctcagcctcctaagtagctgggattacaggcacctgccatcatccctgactaatttttgtatttttgtagacggggtttcaccatgttggccaggctattcttgaactcctgacctcaggtgatccgaccgcctcggcctcccaaagtgctgggattataggcattagctaccgcgtctggcctctagagatgggatcttgcttgctctgttgccaggttggccttgaactcaggctagggttaagtgatctttgtgcctcggcctctccagtagctgggactacaggtgcgtgccaccactcgcagcctaaaatactttttaaatctcacctactttctagcagtattttattttatttgggcgcagctctgccatcagtaggctgagctccctgcagcctcaaactcctgggctgaagcaatgcctctgcctcagcctcctgagtagctgggactacaggtttgtgccaccacacctggctatatttttatttttttgtagagatggggtcttgctgtgttgcccaggctggtctggaactcctggcctcaagttattctcctgcatcagccttccaaattgctgggattacaggcttgagccaccatgcccagctttagcaattttttttttttgagacggagtctcgctctattgcccaagctggagtgcagtggtgcgatctcagctcactgcaacctcagcttcctgggttcaaacagttctcctgcctcagcctcccaaatagctgggattacaggcacgtgtcaccacacctggctaattttttgtatttttagtagagatggggtttcaccgtgttagccaggatggtctcgatctcctgaccttgtgatccaaccgcctcagcctccctaagtgctgggattacaggcatgtgccaccgcacctggccagcaatattttaatatagcacagaagtcctttctaaatgtgtatagtgagaatccattgaggatgaaatagaaaatatttaccaaagtttaacaacttagtcaataaaaataaaactttctctttccgtaataagtcaatctcagcattctaaaataggcaatggaggggggaagaaatctctatgggaagggtccactggatcttaacagtttcaactagtgttccacaatatttctgctgtacttggggagaatttctggataattagaatagtctgaggcttattccttttagtttcccatagcctgattgagatagagctataagaccagctataacattgtacagaagactcagagataaacaagtgaaaaagataactgagattaatgttgaactaagaatatgattgttctctgaggcactacctgctagttcctggattacctttatatgtggccaaggtggggattgggaagcaagggagcaaaagccctagagctaagggagagagaatttctgcctgcctaagatgaaccttctgagttggatatttttttttcttcccccttgagacggagtctcactctgtcgccagactggagtgcagtggcatgatctcagctcactgcaacccccgactccctggttcaaatgattttcctgcctcagcctcccgagtagctgggattacaggcacgtaccaccacacccagctcatttttgtgtttttagtagggatggggtttcaccatgttggccaggacagtctcgatctcctccttgtgattcgcccgccttggcctcccaaagtgctgggattacagctgtgagccaccgtgcccggccttgagttggaatttctttctaaagtcttgctcctttctgtagtttggctttcctttcagggtatctgattttgccttcctgctcctaggcttgtgacctgacctgatgctgtcaattacaggagaatgcagaggtgcaagaaatttttttttttttgagatggagtttcgctcttgttgcccaggttggggtgcaatggcacaatctcggctcacagcaacctccgcctcccgggttcaagctattctcctgcctcagcctcccgagtagctgggattacaggcatgcggcaccacacccagctaattttgtatttttagtagagacggagtttttccatgttggtcaggctggtcttgaactcccgaccttaggtgatccgcccgcctctgcctcccaaagtgctgggattacaggtgtgagccaccacgcccggccagaagaaattttttgtgttttgttaatacagtcagccacgaatagctaacagctaacagctggtccctcatatttgtgggttccatatctgctaattcaaccattgattgaaaatattcagaaaaagagaccacaataaaaaataacaatataacaataaaagtgggaattaaaaacaatacgtataacaactacttacataacatttacattgcattattatatgtaatctagagatgatttgaaatatatgggaggatgtgtgtaggttatgtgccgtttaaggcactataagagacttttgagtatctgtggattttggtatccgatgggaggatcctggaaccagttccctgcagctatggaggtttgactataattatttagcatgtactatttgctgttctaaatatactgttctaagctctttatatatattatttcatttaatcctcccagtaatcctgtgagatagattcagtattattattatccccatttctcatttaaggaaaattattccagagaggttaagtaacttgctcaaagtcatgctagcaggtatcctgagattaaatccaggcagtctgacttgagagccttacttacgtgcagtatacttcctctttgaagagcaggaaaactgtgggatatggtggcatgtttccttaatatctgttaaggcacactttggtaaatgctaaaatagaagcacaaagtgctatagaatttaagggaggggaagttcgtttttgtttttgtttttgttttttcttttttttgagatggagtcttactctgtcacccaggctggagtgcagtagcgcaatctcagctcactgccacctccacctcccgggttcaagtgattctcctgcctcagcctcccgagtagctgggactacaggtgtgcaccaccacgcccggctaagttttgtattttttagtagtgctgggattacaggtgtgagccactgtgcctggccgggaagttcgttttaactgaagagctctttagcagctttgtagaagaaagcttcatattagatcttgatgaatagatagattttgacagatatctctctgaggtaggcagtcaagcggtggccagagtggaagaattactgtccagatttacatataggtttcctgattatttaaattaccgatgaagtgcagtaagactctactgttgtcacagtatcatttcagttagctattggcgtttagaatcacaaaataccagcatcttacagtgataggtatttattctcttgaaattgtgggtttgctgggtagtggatgatctaaacttggcttactcaaagtcaaaagcccaaagtcaagcagggcagggagtaacttgcacaatactatagtgacagtaatctactgcagtgatctagtacagttgatttagagaagaatggtaagatgcttattatgacaactattgtgctttcttctttctgctctctattgttgacactctcctgatagcactttttcattttggttgctgaataatacctgttgattggatactcctagaatcataatgtaatacagcagatttcttctcttcatgttatgtagaaaaaaagcataaagaaataatcagaatcttgactattccacagtgatgccctgaaaagttcagcaatatcatggtgctattcttctatctttgggactgataagcttgatgtcactggaatggcatttgtaacagaatttgaactgtaacagagtttacatcaaggtcatacataataacccaacaactcctttgttaacagttttaacagctttccatctcttcgctgcacctaaacttaaggttgcaaagatcaggtgctgatatatttagatgtctggaaaactttcatgctttcactgaaaagtcatagagacagatatccaggaattatagcatgtggataaatatttttgtagcacagattcataaatccttgtatgcaggaagtactacaccaaactgttaatgtggttatttgtgagttgctgaattatgggtaatatttcaaaatatttaatggtattctgaaaatatactagtaaatacacagaaaagcattatttaggtgatatttcttttaattcttttttttttttttttgtatccccggagcgagtgcaccgttcctggaggtactgcaataccaggtcgatgcatggagtggacggagcaagctcctattccatctccctgctccaaaaatctatttaatatattgtcctcagatagaggacatatcagatactaaactgatgagaacagatactacacttgatcttagccaaaaggccgagaagtgattttaattctttttctttttttctttttaaaatttttttatttttattttttttttaagatggagtttcgctcttggtgcccaggctggaatacaatggcgcgatctcggctcaccgcaacctccacctcccgggttcaagtgattctcctgccttagcttcctgagtagctgggattacaggcatgcaccaccacacccagctaattttgcagttttagtagagatggggtttctccatgttggccaggctggtcttgaactccggatctcaggtgatctgcccgcctcagccttccaaagtgctgggattactggcgtgagccaccgcgcttggccctttttttttttaattttttgagacagtctcactcactctgtcacccaggctgggtgatatttcttttctttaattctttttctttttaaaaattttttatttttatttttattttttttgagacgaagtttcgctcttgttgcacaggctggagtgcagtggtgcagtctcagctcactgcaacctctgccttccgggttcaagcaattctcctgcctcagcttcctgagtagctgggactacaggtgtgcatcaccacactcagctaatttttgtgatttttattagagacagggtttcaccatgttggccaggctggtcttatactcctgaacttaagtgatccacctgtcttggcctcccaaagtgctgggattataggcatgagccaccatgcctagacttctttcaattcttttatgttttacggattttctacagtgaatatatatcataatcggaaaaagtaaaatttagtatattgagtatatgcatttataaaacaaaatgatcatggactacattgtagcaagtgtactggccagtgggctgacagtggctgcttaaacgactccttactctgagctccagttttcttaaccagaaaatcagctattgttaattttacctacttagggtctctctctatttttcctttcagttcatgttaatttctaaattgccatgtataagtaaggggttgtcaatttacaccataaaacccctttatgtatccaaggttttcataggaaatttaggactgtatgatcctaaattgtgctggagtaccacattttctgttaagtagtacttggcaataaagtataggaaaaaaaaatcagtgggttgacaaagagaggtcatgatagtgtacctgtaatgtaatttgataaaaaatgtgagcctgaactgattgcaaagcattgttacatataggggaagacattatgggggcagaggggggtgaagatacaaagttgaataaaacttctctagagcttcacaatctaataagataggcatttataaatatctcttaaggcgcactttgttaagtgctaaaatagtggcacaaagagctatagaatttaagagaggcgacaggaaaaaaaagtaaattgagttaaaggaaggagaaattagttttaatgagagattttttagaagctttaaagaagaaagttttgtattggaccttgaagagtagatagattttgacagacttgtgtctgaggtgggcaattccaagaataggaagtaacttgggtaaaggccaggagatcagaagttgggcaggtgcagtgagttataggtgggtagatagatataatttgagtatagcagataaggaaaatataaattggaggcccagggagtttggacttaatctagttatatatatatatatatatatatttttacatttatatatatatttatatatattaatatatatttatatatatttatgtatattaatatatatttatatattaatatatatttatatatatttatatatatttatatatattaatatatatttatatatatttatatatatttatatatatttatatatatatttatataaatatatatttatatatttatatatattaatatatatatttatatatatatttatatttatatatttatatatataaatatatatatatataaatataaatatatatatatatatttttttcgagctagagtctcgctctgtcgcccaggctggagtgcagtggcgcgatcttggctcactgcatcgtctgcctcccaggttcaagccattctcctacctcagcctccccagtggctgggactacatgcgcgcaccaccacgccagctaatttttgtatttttagtagagacaaggtttcgccatgttggccaggatggtctctatctcttgaccttgtgatctgcctgcctcggcctcccaaagtgctgggattacaggcgtgagccactcactgcgcctggcctaggtctatatttaagaagaatgttctagtgtactttatgtatgtgttaatgtgagcttttttactaaagtaaaatatatatacaaatagttacatatttttaatatgtacaaataattatatatagctcagtgagtttttacctagtgaacacatcttcgtaaccattatctagatcaggaatagaactttgccagcactccacaagttgccttcatgctccctttagttactaactccctaatcccaagggaaaccactctcttataatatctgtagattagttttactgttattggtatgtaagctcatctaaatggaatcattccagggtgtattctttggtgactggtatcttttgtcccacattgttcgtaagatgattcattcaggttgttgtgggaggtgtggtgtgtttattcttgttaatgtattccactgtgattaatcattcagattagtcattctatttttgatggacacttgggttatttccagttttgggctactttaaattgtgctattataaataatcttgtacagtttttccttaaacatatgtacatatttctgttgggtaggtacctgagaatggaatcgctgggtcacagggtatgaaaatgtttagctttatgctatggtttgaatatagcttgtttggccctgccaagtctcatgttgaaatttgatctccagtgttggaggtggggcctggtgggaggtgtttggattatggaggtgcgttcctcatgaagggcttggtgccatccttttggaaataagtgagttctcgctccattagttcctgccagagttggtagtttaagagtctggcacctcccttttctctcttttggtttctctcttggcgtgtgatttctgcacatgcagctcctcttcgccctccaccgtgagtggaagccgcttgagactcttaccaggagcagatgctagcaccatgcttcttgtacagcctgcagaactgtgagccaaataaacctttttttattatgaattacccaccctcaggtattccattatagcaacgtaaatggactaagacactttagtagaacctatgcaactgtttttcttttttttttttttttttttttttttttttttagagacagggtctcactctgttgcccaggccggagtgcagtggcatgatcatgggtcactgcacccttgaactcctgggttcaagctgtcttcccattttagcctcctgagtaactaggactacaggcatgtgccaccacagtcagccaatgtttttcattttatactttctttagcagtgtatgggagtcccagttgctgaacattcttgcagtgctcacttaatatcgtcttttttgaggccgggtatagtggctcatgcctgtaatcccagcactttgggaggctggggcaggtagatcgcttgaggccaggagttcgagtctagcctggctaacgtggtgaaacctcgcttctactaaaggtacaaaagttagctggatgtggtggcgggcacctgtaatcccagctactcaggaggctgacgcacgagaatcgcttgaacctgggaggcggaggttgcagtgagctgagatggtactactggactccagctttggcgacagagcgagactccatcttaaataataataataataacatcgtctttttcgttgttgccactgtagtggatgatggtactatcccaccgttttaatttgtgtttccttaatgactactgtaaacaagcacctttttaggtttgttgactgtttagacatagtcttttgttgaagtgtttattcaagtcttggccttttttcccctattggagtattattatttttttttttttaaagagatgggttcttgccctcttgtccaggctctcgagtacactggtgtgatcatagctcactgcagcctccaactcctgggctcaaacatcctcccacctgggcctcccaaagtgctgagaggcatgagcctcattattttttgtgtgccaggactccttatttattttgatgcttgaattgttccctatttggccagtgggaagtgcattcaaactgcttcctctgttttttggtgtcattgagcattttcttgtttactgaaagatactccaggctcttcttatactttttttgccctagccctggaattagtgatttctctgagaagctcttttagaagtttcttttagtagagaatgacatgtagaagtccagatctgggtgttaagcgtgctcattgctattggggtgtcactgctcacaagccatcatactggacacaccacacacacaggtgcacattgcacatttacgttgttattttatcttacatattatttaaaaccatgagttcacactgatatccccaattccagtctaataccacagggttcgttcgataatttcataattgtaactccattttctgacagtgagtaacttggctttcattatcctcaaaatattttcttagtcaatcagcccctttctatgtgaccactctcatgttgctgctgttccccacacccactatatagatgccgtccttgacttacttaggctccaaaaccccatgtcagattgctggcctacacccttccatgaacacccttgtccgatacctgtgctagattgcttttcacatcacatttggacttcaacactctgtgcagggctgccatgttacctgccatatttctgtatggacatatcccttatcctgtttttttgtttgttttgagacaaggtctcactcttttgcccaggctgcagtgcagtggcacaatcacagctcacagcagcctcactcaacctcctgggctcaggtgatcctcctgcctcagtctcctgagcatctgggactacaggtgcttgccaccacgcctggctaattttttgtagagatggggtttccccatgttgccctggctggtctcaaactcctggactcaagtgatcctctggcctcggcctcccaaagtgctggtattacaggtgtgagccatcgggcccgccccttcttccttatcctgatggtactctgtcatcctgtactaagacctctgctgatcctgcagatgtctgttttgcctggccctgacaaaatgagtagaggtttattgtagtcaaaatgtagtcaagattttcaatttttaaatttatggttagcactttttctctttgcttatcccaagatcatacagatccttccctccctccctccctccctttctcccatctaggctcactgcagccttgacctcctgggctcaagcgatcctcccacctcaacttccccgtagctgggactacaggcatgtaccaccaaacatcggctaatttttttgcatttttagtggagatgaggtttcttcatgttgtccaggctggtctcaagctcctgggctcaagtgattcacctgcctctgcctccccaagtgctgggatgctggggttacaggtgtgcaccacttcactgggccaagatgttgattttatttatctgcacacacagacacacatacatatgtacctatatacatacacacacatataagcttcatttaaacattttttattgtggtaaaatacatgtaaaatttaccattttaactatttaaaatgtatagttaagtagtgttaagtatattcacactgttttgcatatataatctttagaacttttttgtcttgcaaaactgaaactctatacccattagacaaactatcgatgtctcccttatcccagccactggcaaccactattcttttttttttgtttgtttggtgttttttttttcccccagagacggagtcttgctctgttgcccagactggagtgcaatgaatggcaccatcttggctcactgcagactccgccaagcaattctcctgcctcagcctcctgagtagctgggactacaggtgtgtgccaccatgccagctaatttttgtatttttagtagagacgaagttcaccatgttggccaggctggtcttgaactcctgatctcaggtgatccgcccgcctcggcctcccaaagtgctgggattacaggcatgagccactgagcccagccttctattttttttcctatgaatttgattcctctagatacctcatttaagtagaatcatacagtgtttgcctttttgtgactagcttattttacttgatgtcctcaggtttcatccatgttcttccttttttaaggctgaataacatttaattgtatgtatataccacattttatttgttgtcaatggacacttgggaagcttgtacgttttgacctttgtgaataatgctgctatttgtatatgttacaagtacctcttcaagtccgtgagaagttttatttaccatttgcatttagctctgcaatccatctggaattaatttttgcatatggtgtgaggtagacgtcagcattctttttttttttctttctccatgccagacaggtaatgtgcctatgtaacaaggtttgagggaggcacacctcacacatgaggctgaaaacccaatcgtcatgcttacaaactacaaaaggatcagaattctttttttccttttctttctatagccagcttattcagcactatttattgaaaagattgttctttttctattgcagggtcatttttgtcatattaatgtctatatatgtatgtaggcctgcttttgggattttctcagtagctccattggtctattcttgtgccaataccacactgtcttaatttctatatttttatataataacatttcttgatatctgatagtatatgcccctcagcttccccttcccccaagattgcattggctatcttggccttttgcgttttctttttctttttctttttctttttttttttaaatggagtttcgctctttcactcaggctgcagtgcagtggcgcaatcttggctcactgcaacatctgcctcctgggttcaagtgattctcctgcctcagcctcgagtagctgggattacaggcacacaccaccacgcccggctaatttttgtatttttagtagagacggggtttcaccatgttggtcaggctggtctcgaactccctgacctcgtgatctgcccgcctcggcctcccaaagtgttgggattacaggtgtgagccactgtgcctggcctgcattttcatgtgtattagaatcagctaggccggttgcggtggctcacacctgtaatcccagcactttgggaggccgaggcgggcggatcacctgaggtcaggagttggagaacagcctgaccaacatggtgaaatcccgtctctactaaaaatacaaaaattagccgggcatggtggggcatgcctgtaatcccaggtactccaggttgaggcaggagaatcgcttgaacctgggaggcagaggttgcagtgtgtgatcatgccactgcactgcagcctgggcaacagagcgagactgtttccaaaaaaataaaaaagaattagctagtcagtttccacaaaacatacttttatgatttttattggaattgcattgaatccatatataagttttgggagagctgagatcttaacactattgagtttcatagtccacaaaaatgatgtgtctttccatttatttaggtttgaatttctctgtttagaggtctttatatatcttttgttaaattattcctaggaagcagatgtttttaggtgttatttaaaaaatttaatcctctttgttgctgatagtgcagaggctttaaatctgtggtctgtggcccctgtacaagctataaacatgtgaatactttttcctgaaagatctgtaatttacatttgaatctgattcccactgggagcaataacaacaaagatgaaagagcacttagtgctttagagtggattagactagggaggggtaccagagaggcagggaggccatttaaagtatgtaatagtctacgcaagagactgggcttgagctagggcagtaggtatggaaaaggaggaaagacattcaaggatattctggagacagaatgaagaaggttgctgagagtagggtagaacaaatgaagaaaaagagtaaaatatagctggcatcagtcatgttaagggcaattagagggttatcaaagcagtaggtaggtaagggaaaatgagtgtttggtgggtgaagatattgggatggtccctaactataataaggagactttgaatttaagatatattcgtataaataaagatgggcagggccgggcgcggtggttcacgcctgtaatcccagcactttgggaggccgaggtgggcggatcacgaggtcaggagatcgagaccatcctggctaacatgatgaaactcagtctttactaaaaaatacaaaaaattagccaggcatggtggtgggcgcctgtagtcccagctactcgggaggctgaggcaggagaatggcatgaaccagggaggtggagtttgcaatgagccgagatcgtgccactgcacttcagcctgggtgacagagcaagactccatctccaaaacaaaacaaacaagacagaaaaaaaaaaaaaagatggtcaaagtgatagaatatatgagacttggaaggtggaaagctgggtgatgattagatggagattatatattattctgtacttttttgtatatttaaaagtatccatgataagaggttaagaaaagtttatctgctgggccaaatggtatttccagttctagatcccggaggaatcgccacactgacttccacaatggttgaactagtttacagtcccaccaacagtgtaaaagtgttcctatttctccacatcctctccagcacttgttgtttcctgactttttaatgattgccattctgactggtgtgagatggtatctcatagtggttttgatttgcatttctctgatggccagtgatgatgagcattttttcatgtgtttattgcggcattattcacaatagcaaagacttggaaccaacccaaatgtccaacaacgatagactggattaagaaaatgtggcacatatacaccatggaatactatgcagccataaaaaatgatgagttcatgtcctttgtagggacatggatgaaattggaaatcatcattctcagtaaactatcgcaagaacaaaaaaccaaacaccgcatattctcactcataggtgggaattgaacaatgagatcacatggacacaggaaggggaatatcacactctggggactgttgtggggtggggggaggggggagggatagcattgggagatatacctaatgctagatgacgagttagtgggtgcagtgcaccagcatggcacatgtatacatatgtatgtaacctgcacaatgtgcacatgtaccctaaaacttaaagtataataaataaaaaaaaaaaaaagaaaagtttatccgcataaaaagtaggctgaactgaagattgaagatctctggaccagctgtactcaaattgttatgtgagagaaatatcaggatttggttttgagtaatttcataaccgctgtctattgggaacacagttttatcaagatctgccagttaaggaggcacaaagctacagaggccaggtgctgcagggtggctaggagttggggaaaagaaattgactaggtgtctgttggcaactcaaccaggtgtgtggacgcaggggaacttagcaagggaaggtgatatgatttggctctgtacccacccaaatctcatgtctaattataatccccagtgttggaggtggggcctggtaggaggtgtttggatcatgggggcggatttccgccttttgtgctgttttcgtgatagagttctcacaagttctggttgtttaaaagtgtgtggcaccttctctgcccccctctcttccccccttctcttcttcctgcttcggccatataagatgcacctgcttcccctttgccttctcccgtgattttaagtttcctgaggcctccccagaagcagaaaccatcagaagcagaattcactacgcttcttgtacagcctgcagaaccgtgagccaatgaaacctcttttcttataaattacccagtctcaggcatttctttatagcagtgcaaaaatggactcatatacaagggtatacattcagcaggagaataatggcagggagtctggggcagatattctggggagatcaataggcagaaagcatcagtgaatactagaaacaggtagcaaagcgttgcttcaagcttgaactcaaaagtggaactgggaaacctagcaaggaactaaataattgattcattcagcctatactgattagtgtctattgtaatagttctacactttaccctgtataggaattatttggaatgcatgttaaaatgtagtacagattcttagttctttttcccccctcttcccttttacttggtacgcctaaaaaattggcatgttcagcaagcatatcagatgtttctgatgctggtgtttctcaggatcatgctttgacaaaatatctagtccactgtgtgctggccagtgtatcaacacaggggaagtgggggaaatgatgtggctagaaccagagtaaaaggtgaggccttgtacttgggaaacacagcaggaaggagctgaattaactggaatcaaaagtgatggcaggccagttgcagtggctcacgcctgtaatcctagcacttcgggaggctgaggcaggcggatcacctgaggtcaggagtttgagaccagtctggccaatgtggtgaaaccccgtctctactaaaaataaaaaaattagccgctcatggtggcccaggcctgtagtctagctacttgggtggctgaggccagagaatcgcttgaaaccaggaggcggaggtttcagtgagccaagattatgccactgcactccagcatgtgtgacagagcaagactccatctcaacaacaacaacaacaagtgatggcagaatgagacaaatctcatggccaaggcttggactctctgaattccaactagttggtagtaagttggtttcagaaaacaatttacttctgtaggctgtttgcagctagagaaatagtgaaccatgggagtaggaatataagcaagctgtgacacttagaagaggtatatctagtggaaggacaatagcaacatcccagaatgtggccactgaggtactacattaaaatcacatcacaataaaactggtagtttttcctagtactatgaacagattgtgtatcatcttcatttattttaaagatgctgtggctggtccctcagctcataatcaccatcagccatggcatctttacatagaggaaaaggatgtaattcagtacaattaaataaggtaaatgtaaaggtgctttgtaggtcatagggtaaggtggtggtggtggtggtgctttcacaacaacattctaacacaaagcaattcatacagactcccaaagtttattgaataggcattccactctcattccattttactctttaaatatatatttattcatgcctgctgtatgcaaatttttgattccaatttttttaatggacatacagtaaaatggatttttcttaatgtacacagttttaggaattctaatatgtgtagtagattcatgtaaaccacaatcaggataagaacaattgtatcactcccccgcaaaaaactcttatactcttcctccacctctaaccccctcttcctcacttcattttatgtttttgagaatgtcatataaatggaaccgtgcaatatgaaatcttctgttactgacctcttccgttcagcataatgcctttgagctagattaatccatgtttttgcatgtatcaggagttcacgtcttactattgttgattagtattttattgtgtagtgtaccagactgtttattcactcctgaaggacatttgggttgtttctggttttggtgattataaataaagctgctataaataaacacttgtgtatagattttgtgtgaacattttcatttctctaaatacccatgagggagaattgcgtgataaatgtaggtttaacctttttagaaattgctattttccagagtgattgtaccagttggcattcccacaagcaatgggtgagagttctagttgatctacatccgtgtcagcatttgggattatcagtatttttaattttagccattctaataggtgtatagggatatcctattgtggtttcaatttgtatttccctaatgcattcctcgattcttgatgcttttattgatggaggatccaacacaaaagataatgcatggtcatgagaacaaaatatttgatatgcctaactttaacattctatgaaagacttcattaatatttttaaaaaggagtttgtactattgaatattcatggtttttcagtgaagtttgaggtactctgaagcctatctacaaagttttaagtaagccatgtgacagtgtggataagagagtgacttcagagcattttttttttttctggtgacctttggtgtgtagaacacttgtggcctttaataaactgaggagataggatgaccaaaattttttttatatgcctgtaatttttttaaagcagaaataagtgagaaacgcttatggacactgtgatcaagatcgtgaacaagatcatgatctacatttactgatttcatgttcctagtagcatagatcaatggtatgattttaataattcttattcagggaagtaatttagatggaggcaaggaaggctttcccttgagtaatatattaatttggccccatctatctcttctcctttgtagatcatcccaagcagcagtctgtattataagaagcaaacttaaatgattgctaattaaatgtttagtgttttttttgagttggttattagcttgaggttaaatttgtttaatgagtaaatatggaagaattatgtttttcacatttggaatgcatacttgctgatcattggtatgttactcccattttatgaagctggaacataatttccttctttttaatgactgtgagttttacagttatttaatctttgttttggtggtgttagtcatgtcagtactttatttgctaccgagttctcagttaggaaataggctcccaattataattttttttttttttttttttttgagacgaagtctcactctgtcacccaggctggagtgcagtggcgcgatcttggtgcactgcaacccctacctcccatgttcaagcgattctcctgcctcagcctcccaagtagctgggactacaggaatgagccaccacgcccggctaatttttgtatttttagtggagatggggtttcaccatgttggccaggctggtctcgaactcccaacctcaagtgatccgcccacttcggcctcccaaagtgctagaattgaaccactgtgcccagccccagttataacttgtttccatgggaaaacatccgctttgaagcagtattcagtaatatattgaaatgagaaataggcggtcaagcagtgattcaggtttagtgttcagtgtaattaagaaaaggtgacttaagttgaagaacattgatgtatctgtttttaaattgcacctaattataatgacaacttacaagatctctttccttccttctctcttggaatgttgactataaatttcacataatttaaaaacaatttaaaagctagtcaaattaattgagaagaatcctgctttatcaaattttgcctgtaatcatatccagacatggcattttgaaaatcagaaaggattgcttccacttatatcagagtttgaaagtagaaactcttttcatgtaggtatgggtcacctttgattatatggtagtcttctgaatatggtcctcttacctgacacatatgcacctcatcaataaactacatacaattcttaggtttatatgtggtcatgttacaaaggatttcttaagtactcttaaatgtgttctactaatgtcttgtggaaaaatataatcttttgaaagcattcgtgttaaaaagaattagacgtgatttatctcatttagacctgttctttttcaatgtgtctttaaaatgtaggtacagtatataagaattcatactaaaggatcaactgagactttgatttaaatatgttataaattatagtatggaggcctgcataatatactacatatttttttttcctaagaagcttatttaaatggttctgttaagtgtaggaatgttctgatgattatctttttaattaaaatgagaaatctttgtttaaagtggcactcgtttttttatggcctgttacagtctctgtaacaatcatttcttaagtctgaacgttttatttccaggaatccatttatataaaactatgtttagacttaattaaggaacgattcttacaaagcttgtaaatagccaggaaaaaagggacagaaaataaaactgacattcacatttaacaaaatgattgttacaaggtatgtaataagctataaaaatacaataaagccctttttataagagttcatattttttgatccttgttttcaaaggtatttaagaaaaatatcaaagctttgcaaagtgacatctgtttgctgaatggactagttataacttcttttgtttataactgacaatacgagaattctacctgttttgttagtgtgtcttctttgaaataccttgtaattagtttagattggtaggtaaattttacgttgtaccatagtgaaaacaagacctggttttcaggttctgcttcctagatgtcatagatattgggcatgttgcttaacctccttgagtctcactttcctcatatagaaagcaaagataatatctacttttgtacctcaaagagctgttatgaggagtaaatgaaattattataaatagagcaaatattttggaaattataaaggactgtaagcatccagatcatgtgtctcttaaagatgaattagatttaacaacctcttttttttttttaattaaaaagtaaactttaatgtcaaaaatgcaaacttggggagggcagaaagatcacacacaaggctgtgccttcacacttggagggttgcacagcagccgggcagaggtactcctcacttcccagacggtggggcggctgggcagaggcactccccacttcccagacagggcagcggctattaagaacctcttttaattagcaaacttccttctcttgttcatgcattctgtcaagtacatacatgtacatcctttttgaaatgacacttatttttccatttccttgtctaagtataagtgattgaaaccactattggcatagtggaaattacacaagaattggagtcagaagaactggtttcaagtcctgtcttaactacagtcatgcattgcttaacaatatgtgatacattatgagaaatacattgttaggtgattaagtggttgtgtgagcttcacagagtgtacatagacaaatctagatagtataccttactatacacaaatgccatgtgatataacctgttgcttgtgcagtttgttactgtacactgaatcctgtaagccattgtaacacaatggtatttgtatatctaaacatagaaagggtacggtaaaaatacagtgttataattttatgagaccactgttgcatatctgaccatacttgactgaagtgtcagggggtgcatgactgtatttttacttattctctgaccttattcttgggtggtgataataataacaataataatggcagccaacacttgtagctcagtatataccgtgcaggattctagacactatatatattaactcatttgatcctctcatcttattaggtgtgtattattattatcatcctgatttacaaatgtggaaactgaggcacagacaggttgttactttttccagatcaaacagtttgtgaatggcacagctggtattccagctcagacattctagctccagagtgagtgtggttaatcattgtgctatactaaccatgttccttaatttcctcttctctaaaatgagaataacaataactgttctatctactgggttgaagatccagtaagagagtacacataaaagcactttgacatcacagtgtaccataaatagaagttatatgtgaactgtagaattagcatgcaccttagagtaggtattttatagttttttggtgggtgagggatgttatcttttgacttatttttgagaaatataattttgaagagaggtgttgatggtgtcattcttttttcaactcctcagaaaaattatgagaaacacacgatgataactcatatatccctcacctgaattatctaattgttaacattttgccacatttgacttttcctagtatatactttctttctaaattatttgagagttgcagacatgatattttaccttctgcatgtattttctaagaacaagagcatccttattcctaacctcaatacaagatcccactcaggaaatttaacactgatcactgataaccttttattatttaatatacagttcatatccagaacccctagttatcctaagaatgtcttttttttttttttttttttttttttttttttttttttgagatggcgtcttgctctgttgcctaggctggagtgcagtggcgtgatctcagctcactgcaaccttcgcctcccaggttcaagtgattcttctgcctcagcttcctgagtagctgttattacaggcacctgccaccacgcccggttaatttttgtatttttagtagagatggggtttcaccatgctggccaggctggtctcgaactcccgacctcaggtgatccacctgcctcagcctcccaaagtgctgggattacaggcatgagccaccgcgtccggcccctaagaatgtcttttacagctctttaaaaaaaaatccaggatccaatcatgttatatataatatctctttagtttcctttaatttacagtagttccctaatggtttttattcatgaaattgacatttttgaagagtttgaggtagttttacagaatgtccctcatttgtttttgtctgattgtttttccatgattagatcagggtaaaaaatttggcaggagtataatatatgctgtgttttttttttcttagtgcactactacatcagaaggcatataatgtcagtttgttccattattggagatattgtttgatcatttattaaggttgtattcactagatttctctgttgtaaaggtatatttgtaagtattcagaggagcaaacttggagactgtgtaaatatcttatttcacaacattgtttcacgcagtagttttaccatccattggtgattcttctgtggtagttgtaaaatcaacctatttatttttaggtagttctaaataatttttttctttctcaattttgaaatggtgagtgtttcctattttggaaagacattacatgggctttatcctctttatttcatttttgaacttagaccaattaaagtgtactttttacattgtaaaaaagataaagataacttttatctttagtgcaacacactactaaagctgcttagagaattgagttaagtttttaagggctttttgtaacaaaaagtatgtctgaattccctggaggacttgttgggccttccctggagattttttttttttttttttttttctgagacagggtctcactctttctcccaggttggagtgctgtggtgctatcacagctcattgcagccttgacctcccaggctcaagtgatcctcccacctcagcctccttagtagctgggactacaggcgtgcaccaccacgcccagctaatttttttatttttcacagagatagggttttgcccatgctgagtttgccattctttaggcctgggttggggtctgagaatttgcatttctaactagtttataggtgatgctgctggttctgggactacactttgaggactgctgtggcttctataagtcttcctttttaaaaaaaaaaaaaaaggctagtcaagttctgaagcaattggttgtgaacacctgcacttgccattcgagcagatattttgctcatgattatttggaccgttttcttcctttcttcttttctttcttcctttctttccttctttccaggctggagtgcagtggttcgatcctagcttattgcaactttgaatgcctaggcctagggaaccctctcgcctcagccttctaaagtgctggggttacaggcatgagccactgtgctgaccttgggatacttttctacttgtttgctttctttaatagatatgagaataatatggatatagtatagcagagtaaattgaagtttgtattaggggattttgatgaatgttgggaaaattttggcaattggctaaattactgaataggatctcattaacctagctaattcaaaattatctatgttgtaatgaaaatggttatagggtattttatctatttatttatttattttttagagatggagtcttgctatgttgcccaggctggactcaaactcctgggctcaaaagtgattcttccgtctcagcctcccaaatagttgccggtaccacaggcttgtatcaccatgccctgtctaggttattgtaaaacatatttgtagcatttatatttgtcgaattttctttactttgctcaatgaagtaaccaaattaggtatccatagtgatcagtttgtgctttcagtatttaagtaatctctgttatactttagcaactggttttgttaagtctgtgcaattagtaaagcaagtggcaaatttgttacgtcatagagattattttcacttttacagaagttggccatcagccctccttctttgagtctcctattagaaatactataaacatcagagagaagaggatgaccttaatatttgcttcccaggctaaatcacagccttgaagcagctatttctttccgaataaaaagtttaatttcacgccctgattagtgccagtacgtgcaggtagatacttatgttatgtagctaaactgatgtgcctttgcaaattacttgccagtcagcagaactatagtttcttatgagtagtttatggtaaattatagttctagttagtaagttctgtgtgtttttttaaagtgtgtatttattagatacgagtaggaatcagtcactaaattttggccagactagcagttgactaacagcttttttcaaaggctcaggtttggactaacagtccagccaattagcagtaggaaagagtgagatcttattttcagttgatttgaaaatatacacaggacctagaaagagtggtttctgatggaaaagacctaaggagagattatttttcttattgagaagtaaaatacattgtagttaaaaattgagacctttgagaggcttaaaagataggaagatcaactgaggacaagacatagaaggttttgaaatcgtgggacactacttaactgaatttttaattgcttaattgaaactatggagttttaaaaacttttaagatgaactggggccaggtttggtggctgtcacctgtaatcccagcactttgggaggctgaggtgggaggattgcttgaggccaggagtttgagaccagcctggtcaacttagcaagacccatgtctctacaaacagaacaaaacagaacaaaattagcgtggcatggtggtgcacacctgtagtcccagctacttgctttgaggctgcagtgggctatgattcctccgctgcattccagcctgggacacagagtgagatcctgtctctaaaaaaaagaaaaaaaaaattagccgggcgtggtggcgggcacctgtagtcccagctactcaggaggctgaggcaggagaatggcgtgaacccgggaggtggagcttgcagtgagccgaaatcgcgccactgcactccagcctaggtgacagaacgagactctgtctcaaaaaaaaaaaaaaaaaagaaaagaaaaaaagtgaaactgactttttttgaacttggatgaaggatagatgagatgaattagaaggaagaaaaatactgtttccttaataaatgtatcatttgtcttatctaaaatgtcactaaatttgcatggagtcataggatttaagagtctagaaggaccatctaattcaaggcttttttttttaatttagtttttctattttctttgttctttctttcttcttcttctttttttttttttttgtgtgttcttctacttgataattcaaggcttcttaacctttttttggttatggacttcactgaaaatctggtatcacaggatccttcctcttcccagacacacacacacacatatgttttgtacaaaatttcaggaggttcagagatccctgaatcctatctatggaccctgggttaagaaccctgatctagcttgttttttttttgattcttgcatagtatatttttatttaaaaggttttgctgataattattattttaatataactaagttgtgacctgttttaataagggtctgactgtaaaacttgagcttcatcataaagtgccattttgagaagctaatgaaatgttgagtatgttgcctagtagtgtcaggaaaaatggtacagagatgacttggctggtagttatcaaaaatcctcccagaacatcctgttctcattcccctagctattcaggcaaggggccacaattaatccctgtctatgatgatgtaattttacttttcaggatatatggacagatacacttaaatcctttgattattattctactgatatttccaggacctttctatttttataagttttattaaagatgtggtataaccaagcaaatgcccagcaaggtcagtttactctagtaagtacactctgcatctagaagcatgtggaataaactctgttctgtcaaggtcagccttaaacattgtcaacatgttcacttatttatgctctgcagttctggggaggcctgggaaacatttatcttcttttctttttcttcatcctcttaaggtatcaacactgacaatgctatctatctaattagctcattcaagaaagacttttttgtgataattttagatcagcagtacactttggccagaaaacctggtttggattttatcttatgttatcccacatgctacttagaaaaagagtttttatgagatatcgataaaaagtattgtggaatacttcttctttttaaaaatgagcacatgaagaaccaaggacttgtttgacttgccagtgtcacaattgatgacagcctgaattagagcccacatttcctaagtccaagtctagttggtgcttttccgagtctttgttttgtttgtggtttagcttgtgtttcttctactgataggtgaattggtggggggtgtttttaattagtacttttgtgatttgtttaagaaagcctcccctaatttaagatcatgaaaatagcctcatattttctactagagactttttgagttttggtttttacgtttagaattttagtctttctagaattgatttttgggtttgatgtgacgaagggattccgtttcacttttttccatatggatttacaatggcccccagcatcatttattggaagaacatgcattctccatcaatctgcagtgttatctccctcataaatcatgtcattacatgcattgatcagtttttggactcattctgttctattgttcatttatttatatcagtgccatactatcttattcatatagcttttttttgggcaaatcttttctattttaaaaaattcatattaaaaatttaacataataagtgtacatatttatggggtatatactgatattgtgatacatatagtgatcagattagtaattagtgtatgtatctcagtcatttatttttttttgtattgggaacattcaatattctcctagctatttgaactatatagtattttattgttaattattgtcattctacagtgctgtagaacactaggacttattcctcctatatagctcacactgctttataatacaccttttttatggtagttaaggtctcataccttattttcttcttggctatttgtggctttttataccttcatgggacttttttttttttttttttgagatagcctcactctgttgcccaggctggagtgcaatggtgcgatcttggctcactgcaacctctgcctcctgggttcaagcgattctcctgcctcaccttcccgagttgttgggattacaggtgcccaccaccacacccggctgatttttttttttcttgagacggagtcttgctctgtcgcccaggctgaagtgcggtggcgcgatctctgcttactgcaaactctgcctcccaggttcaagcgattctcctgcctcagcctcctgagtagctgggattacaggtgtgtgccaccatgcccagctaatttttgtatttttaggagagacggggctttgccatgttggtcaggctggtcttgaactcctgacctcaggtgatctgcctgcctcggcctcccaaagtgctgggatttcaggtgtgagccaccatgcccggcctttggaaatttttatagatagcttgtcaagttcaaaagcaacaaatatctaaaggcaaaaatatactaaacctattgggattcaggttagttgattcttgatagaaaccaaagtatggagttacttcaaaattaaaaactaaaatttgagaacttttagctaggaaagatggctttcttttgttttgtttagaggagaatcttgctctgttgcccaggctagagggtagtggtacaatcatagctcattgtaacatcaacctcctgggctcaagtgatcctcctgcctcagccttccaagtagctaggactacaggtaacaccacaccacacccagctaatttttattttattttattttattttattttatttatttatttttgtagagacagggtctctctctgttgcccagctgttctcgaactcttggcctgaaacaatcttcctgctgtggcctccgaaagtgctgggattacaggcaggtgccaccgccccacctgtgtttattgattgattgagacagggtctcattctgttgcccaggctggagggcagtggcatgatctcagctcactgctgcctcgacctcctgggttcaagtgatcctcccacctcagcttcccaagtagctgggactacgggtgcccaccaccacgcttggctaatttttttgcatttttgtagaggtggggttttgccatgttgcctaggctagtcttgaactcctggcctcaagcaatctgcccacctcagcctctcaaagtgctgggattacaggcatgagcgactgcacccagcccagcctgttttattcttaatgttaagagatagttggatatgatgaaagagcactttattgagccagatcacttaagcatttgacctttagacaagtcttttatttatgttagagtttcttagcccttgggccttggccctcttctctttcctgtctacactttgttcctagatgatcatctattccttttgctttgaaataccatctgtgggctgatgatttctaatgggctaatagtctctaacccatccttttactgtgacttctacctttatgtattcaactgattatccacttgaatgttgcataattgtgattttttgtgtgtgtttttttttttttttttttttttttttttgctgatcttcccatactaataaatggtgccaccatttatccagttactgaagcctgaaacctggaatcatcattggctcctcactttttcttatgccgatatgcaattcacaagattttatctgttctacttccaaaatacatctcaaattcgtctacccctctctgcctacactgctatcaacttactttgggttattatcatttcttttatggaaaagtttaacagttttctagctactctcccctttaaatctagtctgtctccacacaatagccagagtgatctttcagagatctaaaatgttctaatatcttccttttggactaaagctatgcatggtaaactttgttgttttgcctggcagagctggtcctttcccacctatgtctttgaccctgttaggtcattactcccagtcttcagttacagtcaagttacactggccttttgccaaacacctttttttttttttttttttttttttttgagacagggtctttctctgttgcccaggctggagtgccatggaataaacacagcacagctcactgcagtcttgacctcctgggctcaagtgatccttctgcctcagcctctggagtatctgagaccacaggtgcacgccaccatgcctggctaatttttaaattttttgtacagacagggtctcactatgttgcccagcctggtcttgacctcttgggttcaagcgatctgtctacctcagccttccaaagtgttgagattataggtatgagctaaatttgccaaactcttgcaagaccactataaggcctttgcattggctgttttctccaactctgactttttggttgagtccttcgtttatcctttatatctcagttctaatcacctacttagagcctaccctatctaaagtaaatgcccctttccttatttgtctattatttctactagaaaagaaaataaagcccatgatagtaaaattttgtgttttactcttgagtatatcccagtgcatgacatgtggtagacaataaatacttgtgaagtcactcactttcttttttttcattttgtaaaatagaagctgatgataaactgcccatcctgcttcctggagtcattgtagggaataaatcaaacaatgtttatgggaataaatcaaacaatgtttatcagttttgatgtcctggtatgatttttttttttttttttttccgagacggagtctcgctttgttccccaggctggagtgcagtggtgcaatctctgctcactgcaagcttcgcctcccgggttcacgccattctcctgcctcagtctcctgagtagctgggattacaggtgcccgccaccacgcctaattttttgtattttagtagagacggggtttcaccatgttagccaggatggtctcaacctcctgacctcgtgatcctcccgcctcggtctcccaaagcgctaggattacaggcgtgagccaccatgcctggcctggtatgataattttcaataaatgagctttagttttttaaaagacattagagcaaatttgagaaagtacaaaataaaaaaaaagcagcctgccatcccacacaaccacttttatttaattttgtttgtcttaaaaaagaaagaaagaaagaaagaaaaacaacaacttttaagggtgaatgtactgtccagcactctcttctttctaattttcctgtcccaagcagcttccaaacactttaaggaggtgcatcagttaagatagattaattttatactttttaagacttgtagggaattcatttatgtattttgaaacttgcgtggaaagaagtaaatacaaatggttctttatcaaatttagaaattttactcttgataattaaagtttttataagaattttgcctaaagaacttttcttgaaactagcctgtatataatcaggatttcttgatatggaatacaatctgatttgtcttttaaaacaacttgtacaggttactatttatcctgtgtggtaactaccgctcctgctgtgattcaaatatttcagcccttaagcagttatattaggcttggggaatagtgtaatttgaagcccttggaacatctttttgaattagaaaaggaattctctaaataaatatattcaactgggagaactacttttttgaaatttattactttggaatatataaagtttggtcatctttggaagtagagatctaatttaccagcaaatggagtttataatactaaaatatagtattgtttgcaaataaaattctttgtttttgtgtcttaggttaataaattgtctctgagtcaattgttacaacaaataccaaatggaaaaattgctttcatttcttagcataggcacaaccttcgtagttcagccttcccaaaatgctctttgttcatctgatgtatgttggagagactctttataaaaatggcaatgttgacatgtaccttaatttgctatgttcttttaaaaataaatttgggaaatttgctctctagaacagtagcctcctaacccatcagaaacattttaaggatttatcctaaatatttttacttcttaatttgcaaattgcaaattgtactcatgccctgccatcattagctactatattaaggcacaatatatacacttagggtaaataaatataaataagtaaatatatatgtgtaaattgtgtccagatagttgtaatgataatgtctttggtttattcacatatggttagttcaatattatttttaccttgtaaagtgactaatgaagggcttgtgcaaagaattagagaagagtcaattgacagtttacttaaaactaactaatattctttttttttttgagacggaggcttgctctgtcgcccaggctggagtgcagtgccgctatctcagctcactgcaacttctgcctcccgggttcaagtgtttctcttgcctaagcctcccatgtagctgggattactggcgtgcgccaccacgcccagctaatttttgtatttttgatagcgactgggtttcaccatgttggtcagggtggtctcaaactcttgacctcgtgatctgcccgccttggcctcccaaactgctgggattacaggcatgagccactgcacccagtgaaaacattcttaaattctgagcacacttaagttttttgcaatatgcccaaagagaatgaatgagggaagaaaccattggcaacccctttgtgttgtggaattcccaatcttcagtaagtgacatttaaccatttaacatcagattaagggaacacgtatcaaaaaaaattttaaagattattttttaaactaaaaattaattgaaagttttttgttgttgttgttgttttctttttgagacagagtttcgttcttgttgcccaggctagagtgcagtggcggcatggtcttggctcactgcaacctccgcctcccaggttcaagcgattctcttacctcagcctcccaaatagttgggattacgggtgcccaccaccacacctggctaatttttttgtagttttagtagagacagggtttcaccatagtagagacagggtttcaccatgttggccagactggtctcgaactcctgacctcaggcgatccacctgcctcggcctcccaaagtgctggaattataggtgtaagcttccgcacccgaccaattaaaagttttaatattccccctgtggtgctatatatgtatacataggttttcatccatggtcctggttcataactcccatatccctttttatggtcttttgttaataatgttgggtgtgttaggcctcagccgcagacctcaggaaatagtctgtctcctgcccttctttcacctgccccagggcaggactctaatctcccaccacctcctttctgattgtggatcttaagaccctccactgagagggtcccacctcataccctcgtgggaggaaggaatgcttccataaaaactcaagaggactgggtttggaaagcttctggatagctgaacacatggagatccctggagggtggtgtgcccagggagtcatggcagctctgagccccttcgcccataccttgttctatgggtctcttcatttgtattctttgcaatatccttcataataaaccagcagatataagtaagtgtttccctcagttctgtgagccacttcagcaaattaattgaacccacagaggggatcatggtaaccccaacttgaagccagtcagtcagaagctccagaggcccagagttgtgactgatatctagggatatgggggacaatcttggagctctcaagatgaggcccgaggctctcttttaaggggtgttctggataagtcatagcagttaacaagaatgctaggacatacagggacacataattcatcagtcctgtcaaagtacatcacaaaaatccagtatcatgattccaacagcatttcagtcttggggttagggttgaagttagacaaaacaaaaacaaaaacaacccacatttggtcacagagaagtcttctgtgttgatgattattgtagtatgagagtagtggaaaaacacgaggttggaaagagtctttccctacacactcccccaccctggaggatcatcttgcctacctcctggcatgtgcacaccctgctttggaaaccaccttgcctcacacaagggatgaaaatgcattgtggcagaattgagttctttgtcttttctcattttctctccagatttcatatattgtggaaaagcagttgaatgagaaaactaatctttcaaacaagcatagccagtgtaatgcagacttcgtagactgtagagcatgtccctctaaaactgagtgtataattgagtctgtacctaggacttccagggcttttagtaattaaatgatagattttatagaacgcagacattgtttagctaaaaagagatatttccatctcaattctatttagaagatattatggagctagaggtggagatctatgactaagggcatgttgaatttttttatgaaagaaggggactctggtaattaattttttatgataatgtattctttcaatttggaaatggttcgagtacgaactcaattattttcaaatataaattttggaaatgggatatttttagatctaattgccgatgactaatataatgaatctttataaaaatactattttgtatcttggaggttgggggacatgtagatgttgcttaaaatcattgaaaaagtattctttttgcagcatcctgcttgcctggcttgtggatttcaccttgtttctgctggggatattagtttgtttcttaaataaggatttttgtctatttaaagactcagttgtctagtttcaaaggtaaagcttaaagcaggtccttcttccgcttccctactccacaaaatacatagtcacagactgactagtaatgagtaaaacaaaagcaaactgcctcttaatctaggaacagagaagaaataaagaagtccctatttcagagagagtaagggttaaaattcttagcagtcggggcagggtataacactcttgagaagagtgataagggctttcccagtagcctgcagttccctgtagagtagtacatggctagacttgtcagattagggcaagaatagcaatttgaccagtgagttccagcaggtgtagcagcaaaagcacagatttcttacacatacatgtaatgcatgtctgcttatagcggacagcccttgagatgaggtctgaggtgttctgaatgagtcatagcagttaccaagaatgctaggacatgcatgcacagataattcaccaatcctgtcaacatgcatcacaaaaatccagtctcacatgattccaacagcagtagcgcctaaattcacgttattgcactgtaacaaaattgtatcatcttgtgtatagcctaggatctactggcttcagctaatgtagaagtcattatcactaggtggcatttgcttggggagttgaggcctcacacagagggattttcctgaggtttcctaccaatacagcaaactctaaggaaagaagaaggtagggttggagagagatggggttttgtatattatttcaacccattccgttggtttaattttcgtgtgagagtctagccaggcaggctaggataggaaattattttgtctgactctttgccccccttttttcccaacaccctctgtgctgctgttcttcctcccttgactgtaagtagtgtaaccctcccttttgctccagctgctttattttcattattattgtctaggagttcctcattttcctgagtgtggaaaagattctaaagaaaagaccttgatccagtaattaattttgctcttaacatttacagacccttcctctccttaataaaaatggctaaaatacaaattgttaaattgttatttcagaatttgaaataacagtggatttttttctttaaaaaatgaacttaaaatgatcatgctatgaaagatcttagatttatttttggttctcaggtttgattaataaattatatttttcagttcattgcatactacaaaatttattaaattatctcagctgtgattaaaattaaaatgtatcttgttacattagtatgtgaaaattagttctatcctgtaaaaatactaccatattatgaataatcttttacatgcctgtaggggactaatgggaaatttagtaatatttgcatattttttccttaaatagtagtaatatttccatgttttgtttgtaagcgacaaatatgtatatatatattcataggtattttttatatgatgggagaaggttttgtatttttgttttttgcctcagcttttcccagctctagggagaggtttttaatatatctttgtagttgatcaaagttataagggatctgaacttattgatttaagctattaaagataacctttgcatacacaaagttctgttatagcgaatactggtacaacaaagagtcataacaatagagttctttaaaaaaacacactgtctttgctctcatttcccaacatgatggacctagtaatggatatggtgatctagtagccagaatattttaaaatttttatactgccaattagaataatgcttttctttaatttttgtcaatgaatgtgagtttttataaatgctcattttatactgtaaaagtagttgaactttatgaatttctgcaagattctgccactatgcgaaaacttgaatgggaggtgaagatttttttttttttttttttggtagagacatggtctcactgtgttgcccaggctggtctcgagcgaggtaaagattttaaatggagttcagctagtattaagcccactactcacttgttctgtggtactcttaacaaataatgttggattacgacagcaaaatatgtggtatagaactattttcatttttgatctacttaggacaggtattaatggacactttctcatagctcataatcatgttggtattgctgtctcttgtttgtgaaagtctgtggaaacatcagtcactactaacggtagacagtctttagatttcagcagatattcgtcagggtttgttgatgtttgtttttacatgatgaaagtccctatcaaagtaattctatctccaaaagattttttttttttttttgagacagagtctcactctgtcacccaggctagagtgcagtggcatgatcttggctcaccggaacctccgcctcccggattcaagcaattctcctgcctcagcctccaaagtaactgggattacaggcatctgccacctcgcctggctaatttttggtatttttagtagagacgaggtttcaccatgttggccaggttggtctcaaagtcctgaccacaggtgatccactcgcctcggcctcccaaagtgctgagattacaggcatgagccactgcgcccagcctgtccaaaagattttaaagttgggtgttatgttattgaaataaaattcttatataaattctcttatttactttgttagtggggaaatccagtatccttaagaatacaatcctaaaataaagttgttacatattgcagaaaggcagagtgattgtgttgttatggcaactcaaatggggaaaatgaaaacagcccagataagctgcatcctgttgtcatggcaaccacagttgtggaaatgattaaagctagcctagaaaggatgtattgcagctttagtccactgaaagtaaatagtgtaagaaaagacagggagaattggtttttgacaaaagttaaatccctctggtgccacaagttgctagtaccaccatgtgtagacagatctctgtcctttctaattgtgtttcaactcaattttattgcctcagatcataattgtgctatggaggaaagaaatgtaataactatgaaaagcttgtgaataatgatttttttggtagcaaatttagaaagcaaagttaggaaatttatttattgaaaatgacttttaaaaaatagggtgttttcctttcctctttcccccatttctcacccagtgcttaattttcatttttttcataccctgttactgtatcattttagtcttaagtgttgaattgtaatgtaaatatctaataccatggcaattggtaaggcatcacatgcagcattatgattgcctatgaacagatggatttgatgataaatgataaacatcctgtaagtgtgaataaatttattttagctctatctttcaaactttctctgtaatcaaagcttcttaagtgtttttaaaaatgccattatttccttcccaaattccacttgctcatcacagcaagatatttcatcctagtggagtggagacatgttaggaataaacctgatgaaaaccgtggtctttgttcagcagctggctgcttgcacaggtttttgtggtaatggcattggcatctctgtattagagtattgatctgctgcttggtaggtactgtgtaaaataagtcttctagtaaagatgtattaagtggtttaagagcagtttatattacaaataaggtggaagaaggtggagttctgtaagaccggacacatgctataaatatccataaaattaagtattttatctaaaaatgtgtgttgaaaatttctttttttctttttttctttttttgtttttttgagacggactcttgctctgtcgctggagtacagtggcgcgatctcagctcgctgcaagctctgccttccgggttcacaccattctcctgcctcagcctcccgagtagctgggactacaggtgcccgacactgtgcccagataatgttttgtattttttagtagagactgggtttcatcgtgttagccaggatgttctcaatctcctgacctcgtgatctgcctgccttgacctcccaaagtgctgggattataggcatgagcaactgcgcccagctgaaattttcttattttaattcatatttaattgcacatagttgaacattatctgagtgtgagttgcgtacactaataccatcatcctttgccctttagtggaggattttatatttgatgttcctgtgttgtggttgaaaactgtgttgtaaactcgtcagttataagaaataatattgaccataggaacagtgttttaaagtaatccgttgaatattttcatgaaaatccaggttgattttgcctgagcataagttggtcttcatcaataacctcttcactgtatacattgcctggttttgcctggctaaccgaaatctggcctttcatgtaggtatagagaagaaaccttttttgttttttttcttttgagatagagtctcactctgttgcccagactggaatgcagtggtgccatcttggctcactgcaacgtccgcctcctgggctcaagcgattctcctgcatcagcctcctgagtaactgggactacaggcatgcgccaccatccccggctaatttttttgtatttttagtagagatggggtttcaccatgttggccaagctggtcttgaattcctgacctcaaatgatccacccacctcggcctcccaaagtgctgggattacaggcgtgagccatcatgcctatccagaaacctatttttaaaaagaagaaaaagatggaggaggagaagggagaactataactagaatcacctttttttttttttttttttttttagaatttttaaaaagctcattcccttttgctgttatttaatggtagcaggtcatgtatgactcatgacttaggtcatacaacttaggatattaaatggttcagatacccagcaaacagttcaaagattgcattaacaagctagctaacattttgtaaaggagttcaaaatgaaagactgtcagtacctatattccgtgtgcctagctgttgttgccccactggaatgtcacaatgcaaggatgtgaatctccctttctcctaacagaagtttttaaagctaacagattttaatagatttgcaaacagaagtttgcaagcagaagtttgtaaatctgttaaaatgttttacattaaaatttgatgcactgatttttagattggtgtctaaagtaggcaatatcatcaggttgtgcatttgagatttaccagtttacatcttggcttatgataaattggattggaagatcaggtactttattttcctggaagaaaaaaaaattaggtatattcatcattcccatttcacaatttcttgtcatatctcacttgcttcagaaatactcattttggatccttcttgtgaatatgtaactcttaatactaatgtcctgagagaaaggagaatttcttgtctaacctcagtaataaccataccatcacaaaagaaggcctcacaatgtatcaggcaatcaaatagccaataacctattctcctgctaaattccataaactggatggggagggtagataatgttcatttttgttacttaccagggaacatgacacttggtctttgaaattgttatttatttcatatattgtagctgccaatcagtcagtgatttgcaaatagcaaagtaaatacactgctgaaaatgagtttcttctttgtgctgatctgtgatgtgcgggaaatcagatgtaatatggttgcatttatttatgtaggcatctattctctttcttaatgagcaagtaattttcttttctctacttctacacaaaagttaaattaaggagtacccaagagggctgggaaacttggtttgcagtcattgaaatactgctgagtatcgggatcctttcatgagtggagtttccctctccttaagaagaaagctccagatagctcccttttgaactcattgttagagcaaacacatctgtagaggaagatgatccataagtctaatgctaaggatttgcctcctctccctatcaatgagaagggtttgcctcctctccctgtcaaaggattttactctggcttatttggctgtttttgcctgggaagtgaggggcaagagctctgatctttcctatgacggccagcctggccttaatatgtagattattaacatgataccagcctctgttgagtcatagcaactgctatgaacaaacatgtaaatccatctaggggaagaaaagagtgttgcaaatgcctttcatcaaaatggaagactacttcaacttctatttgctcttcttgttataaccaagctttttcttttttcattttcctctgcctttctttccctccttttttccgtccccactatcctccatctttcagaaatatcaaaagctgaatcttcccaccgaacactgcaatcatttgaaatttgtgtataggccagcttcacatcatcagaaattgtgtaaccccatgattcccaggcctcagctggtagtgtagttatttcaaataatatttaatacaataaattctatggcaataaaagaatttggacagtcccttcgaacttattgcaatgagatttgacttgaatttaatacaatgaagtttcagaatagccaagtaattttgttgtggcatgatttaaagggtatttaagtacaggtataggtgattgagtttgtaaaacctaatcagaggtaaattgcagttttactcttatcacgtgaatgagcattcaaaaatacagaaattctttacttagcataaggtgatttttaacagtgtggcaaagagtgtaagtgaacatccttaactttttgttctgtcaaggggagaataaagataccacctggctgtatgtataaatttgcttactaagatggttgattgatttcttttaggtgggtattaaaagtggcttttttggtatagaaaacatgtagcatcaaagcagtgttgtgatgccctgctgtcttctgatgttgaatattttatgggattaaaaacaattgtttttatcttactctttcagattcaacaatcttatagtaaaagcagccatagactaaatatttagaatttattatgctgatacaaatgaaagaaacataaaatacaaatattgagtgaattaagaaaaagaggctgcttgcagtggctcacacgtgtaatcctggcactttctgaggctgagtcgggaggatctcttgaggccaggagtttgaggctgcagtgagctatgattatgccactgcactccagcctgggtgacagagcgagacctcatctcaaaaaaaaaaaaaaaaagaaaaagaaaaacaatgtttctttctagagtgcttagcagggcaaaaaaagaaggaaaaaagaaaaacagaatgttgatgttagaaaaatttggttattgtcttatgctctggagttcttacctcaagccagtgacttttaagatctgttgttttctgtactgaagcagaatagtgaaaatgtttttataggaagttatgaaaaaaagtctatattaatttgctttgggtcattctagtctctctggtaaattcataattaggaaggcctttttaaggctgtatgctagtctcacaggtacacagctacttcatatctgataaatctaaattcatatgtgaggaggttatgtttttttaaagcatattatttacacaattcactggaatggctcctttggaagttgggtgactctcttatgtaattatatacttagtaaccctgctctacaaagcagtagaaattcaagtaagaataatttactgcttatgcatagttattagaattttaaagcatttgtttgttcaaaattctagtttatcagtgttgtatttgactaattgcctacttaataaataatgaatataatttattttagaaggcacccaaattttaacaattgtaaataaacattaggagctgctccccctcttcgctttcttgtttaaagggattctcatccctttagtccaagtttcgtggagaaaataattcctatcttaaaaattctatattagaagtattatagatggacttaaattacagaattgtggaattttattgctgtaaggtagttagaaatatcttattctatccattttaccagcaaagaaggtgaagtgtatagaaattaagtgaacttctcaaagtcatacaattggtttgaggacaagtctgttccacaacctgatatgtcatgccttctcagttgtcatgataattcagcagttcatttcaccagggattccttgaacactgctgtgtgtacaacagtgggctaagcatccagaggttataacaatagtgtgagtttatatggtctaacaataatgatatcagactagtaatattttacatttgaatctcagttttatctggtgttttctaatgtttataaatgttaatgtgtggtggctaaacctttaaatctctttttctctactagattataacctctttaaaagcagggactcatttagcttttgtaaagtcaatccagtttcatttttaaagacttaaattaaaatttctaagcattgatggcattgttggaataaatgtagcttcctgaggtgtcttctctggggacgatacacattttaaaattgtatttctgttttcatcaagtactttccatttcaagtaacagattgcttcattccccctttaagcaagaagggagagtattttaagggtacagagatagctcatggaactaaagggaaaaagatggccagtaaggccccataaggacttggaaccaggcattggaatacctttaggacacaaggcagccgcccttgcattcctaagataaatcctacttagtcatggtgtatattcctttttctgtgttgctggattttatttgccattattttgttgaggatttttgcctatatggccataagggatattggtctgtaatctccattctgctgttgagaccatccagtgagtttaaaaattttattttcagttttctcattcccatttagttcttcccctgaccccctttttttacttccccactttgagacaggtctagctctgttgcccaaaccagagtgcagtagcatgatcatggctcactgcagcctcgacctctcaggctcaagagatcttcccacctcagcccctcaagtagctgggactacaggaatgtgccaccaggcttggctaattttgtaagaaattttctgtagagacagggtcttaccctgtttttcaggcttgtctggaactcctgggctgaagcaatcctcctgccttggcttcccaaagtgctgggattataggtgtgagctactgcacctggcccatttagttctttatatctgttgtttctttgctggtactctctttctttcaagagtgtttttagttattggaacattttaatcctatctatgtgtatgtgtgtgtgtgtatatatatatatatatatatatatatatttttttttttttttttttgagacagagtctcgctctgtcacccaggctggagtgcagtggcgcatctcagctcactgcaagctccgcctaccgggttcacgccattctcctgcctcagcctctcgagtagctgggactacaggtgcccgccatcatgcctgactaattttttgtatttttggtagagacggggtttcaccgtgttagccaggagggtctcaatctcctgaccttatgatccgccctcctcggcctcccaaagtgctgggattacaggtgtgagccaccgcgcccagccaatcctagctatattacagtctttgcctttaaagttaatttcaccgtctgtgccatcttggtattggcatctgttgataccagttgaagttttcccctttttagtataccaagtaatttttgcgttatatccttggcttttttaatattatgcaactcagttttgtttaaattgtattgaaaatgttgatatttttgtcaggcattcaacccagttggcttcagtctacaagttgagatttctgtaggattgtggtttcaatgtctgttacattttgaaagcctttgcagttctattgagatatattccatgcgtgtgccacttgatggccattgtggaatctggatgatagtccatcttgtagttcagttctcaaagtctatgcctggccgagtgcagtggctcacgcctgtaatcccagcactttgggaggccgaggtgggcggatcacgaggtcaggagatcgagaccatcctggctaatatggtgaaactccatctctactaaaaatacaaaaaattagccgggcgtggtggcgggtgcctgtagtcccagctactcaggaggctgaggcaggagaatgggatgaacccaggagacagagcttgcagtgagcctagatggtgccactgcactccagcctgggtaacagagctagaatccatcttaaaaaaaaaaaaaaaaaaaaagtctatgccttactgttttgggttatatccacccatgtgcagcttgggggtgaacataggagttcattaaccactttatggggccattttcttgagttcctccctctgtacaatctccccagtactatctggttccctggggccgcctttttcagtcctccagccagaaagctaggactttatttaatcctgcatctgttactgcatatggggctacgcaatgggaggctagaggaaaaaaaaaaagcaatgaggttttgtctcacccttttaggatcacaactcctctgatcagagaggaaggtttccttacttcagagttttagccttctttgggtctctgcttctgctgtggctttcctcatggaattgctttgagagaatagcaagaactttaaagaaaaatgggagatttttgccattctctctgagtgttacgatactccttctgcactccttaagctagaactagagggcttttcctggagctctctttactgacaccaatacccacttgtgggtttcaggcagcagtccaggctggtggatactggaggaataataaaaagataaattcattattggttcagtgttatgtaaaagtcttctccaattacctgctagtatttaattttttgagtcttcaaatagttgttctatatgttctgtccatttcttagtggttgccttcagtgggaaatacaggatggagtgcacttactccatcttacatggaactagaaccccttctagttaattatccttttgatattgatttatgctagtcaacaacatacactgcaagttcagtcctttgaacttccttcatggcccatcttaaggtctgttttggtaaagtgtagcaagtgtgcttgaaaagaatgtgtgtgtatactgcagttgttgggtgaagtgttctagataaatcattacatcaagtttattattactgtgcttgtcacttctttgttgcttattctatcaatagctgagagagttatgttaggctctcaaactatgtagatttgtgtattttccctttagttctgagttttttgcttattttgaaattgttagtagtggtacatatacttttaggattattctcgatgaattaacctttttataattatgaaatagtcctctttattactgcttatacttttttttttttttgagatggagtctcgctctgtctcccaggctggagtgcagtggcgctatctcagctcactgcaagctccgcctcccgggttcatgccattctcctgcctcagcctcccgagtagctgggactacaggcgcccgccactacgcccggctaacattttgtatttttagtagagacggggtttcaccgtggtcttgatctcctgacctcgtgatccgcccgcctcagcctcccaaagtgctgggattacaggcgtgagccactgcacccggcctactgcttatactctttgttccgaggtaaactttcatgttaacatagccatctcaggtttcttttttttttttttttttttttttttttgagacggagtctcactctttcacccaggctggagtgcagtggtgtgatcttggctcactgcacctccacctcctgggttcaagtgattctcctgcctcagcctcccaagtagctggagttacaggcacgtgccatcacagctagctaatttttgtgtttttaatatagacagggttttgccatgttggccaggctggtcttgaactcctgacctcaggtgatccacccacctcagcctcgcaaagtgctgggattacaggcgtgagccaccgtgcccggcctcagctttcttatgactgtttttatgatacagcttctttaagctttttacttttaatttattggtatacattaatagataattgtgtcggtttttaaattaatcatctgtcctgatcatctgtcctgatcatctgtccttctttgtttatacttgcactgtccaatagaaacatttaccacagatgccaaccaagtatatacttttaaattttcttgtagccacattgaaaatgtgaaatgaagctgggcaaggtggctcatgcttgtaatcccagcgttttaggaggccgaggtgggaggatcagttgaggccaggagtatgagacctgcctgggtaatatagcaagaacttgtctgtaccaaaaaaattaggcgtagtggtatacacctgtagtcccatctacttggaaggctgaggcaggaggatctcttgagctcaggagtttgaggttctagggagctgtgatcataccactgcactccatcctggttgacaatgagaccatgtctcttacaaaaaagtgaaaagaaagttgaaattttcataatgtattttatttaacacaccgtaattttttatttttgtttttatttctttggaaacagtctcgctttgttgcccaggctggagtgaagtggcgtgatcttggctcactgcaaactccgcctctggcttcaagtgattctcgtggactacaggtatgcgccactacacccagctaatttctgtatttttagtagagatggggttttgccatgttgcccaagctggtcttgaactcccgagctcaggcaatccgcccaccttggcctcccaaagtgcaagatgacaggcctgagccactgtgcccagcctaacacagtgtagtttaaacattaatttttttctttttctttttttttttttgtgagacagtctcgttctgtcgccaggctggagtgcagtggcgcaatctcggctcattgcaacctccacctcccaggttcaagcaattttcctgcctcagcctcccaagaagctgggactacaggtgcgtaccaccatgcccagctaattttttgtatttttagtagagacagggttttaccatgttggccaggatggcctcgatctcttgacctcatgatctgcccacctcggcctcccaaagtgctgggattacaggcgtgagccactgcgcctggcctaaacattatttcaaaatataattaatatagaattatgaattagatatttcacttttttgtattaagtttttaaaaatcaatgggtattttaaagttgtaacatatttcaatttggactagccaccattcaagtgctcagtagccgtatgtgactagtggttattgtattggagagtatgtttagaccatacatttagtgtagtgatcagtatggttaaatttaaattgatcattttgctatttatttgttttttcccatctgttctttttcttctttttttttaaatttattttctttttctgagacagggtctcactctgtcacccaggctgaaatgcagtggagtgatctctgttcactgcagccttgccctcccagcctcaagtgatcctctcatctcagcctcctgagtagctgggactataggcatgcaccactatgcctggctaatttttgtattttttacagagacagagttttgccatgttgcccaggctggtctccaactcatggacgcaagcgatctgccacctgggcctcccaaagtgttagaattacagttatgagtcactgggcctggccctttttgcctttaaaaaaattttcctgctttcttttggatttattttttgttactatttaagtattccattttatgccttctattggcttactaggtacctttgttttgttttaatgattgctttagaggtgacaatttgcatggtaaaatattgaggttggccgggcacagtggcccacccctgtaatcccagcatttgggaggctgaggcaggtggatcatctgaggtcaggagttcaagaccagcctagccaacacggtgaaaccctgactctactaaaaatacaaaaaaattagctgggcgtggtggtgggcgcatgaaagcccagctatttgggaggctgaggcagggcaatcgcttgaaccggggagacggaggttgcagtgaaccaagattgtgccactgcactccagcctgggcgacaagagcaaaactccatctcaaaacaaaaacaaaaaacaaaaaaagccacacaaaacattgaggtaaagttcacataatataaaattaaccattttaaagtgaacaattctgtgtagtttagcaactactacctctatgtagttgaaagacatttacatcattccaagtaaaagcttttatccagtaagcagtttctttctattcccttccttcagcccttggcaatcaccaatctgcattctgcccatatgaatttatctattctggacatttcatataaatggaagcatacaatatgtgactttttgtgtatgacttctttcacttaccatatttttgaggtttagtcatgttatagcatttattagtagtttatttttatggctgaataatattccattgtatgtacatacagtcatgtgtcacttgatggggatacattctgagaaatgtgccattaggtgagttcaacattgtgtgaacgtcatctagtgtacttacacaaacctaggtagtatagcctactatatacctgggctatatgttatagcttgttgctcccaggctacctggacagcatgttactgtactgaatattgtaggcagttgttacacaatagggagtatttgtgtatctaaacatacttagacatagaaaagatgtagttaaaatgttggtattatcatctgtgggaccaccatggtatatgcagttcattgttgactaaaaatgtcattgtgcagtgcgtgagttaccagaatttgtttatctgtttattcgttgataagtatttttgggctgttttcaaccttttgccaattttgaataatgctactatgaacatgtgtatacatgtatttgtttacctgtttttaattctttggatatatacctagaagtaggtatataccaaaattgctatggtagttctgtgttttattttttgagacactgccaaattgtttcccgtggttactgaactattttatattcccaccagcaatgtatgaaggttccagtttctccacatccttgtcagcacttgttattttctgttgtgggttttcttgttttaattgtaacgtcaaaagcttttgagactggacaggagtttactgataaagcttcttctagtacatctggatttcctggtatgcttctctcctaatatatctggatggctgctttttagctttctttagttctttttttaaacttaccatactagtgggtgtgaagggtacattatcgtggttttgattttcattttcccaatgaccgctgatgtcaagaagagtaccctggctgcgcagggtggctcacacctgtaattccagcacttttggaggccaaggtgggcggatcatgaggtcaggagttggagaccagcctggccaacatggtgaaaccccgtctctactaaaaatacaaatattagccaggcacgatgatgcgtgcctgtaatcccagctgcttggaggctgaggcaggagaattgcttgaatctgggagtcggagattgcagtgagccgagatcatgccactgcactccaacctgggtgacagagcaagactctgtcttggacaaaaaaaaggaagagtacccttttaatgtgctgttgagagtaatatcttttcagttattttgcccattttttaattgagttgtctttttttatttttttgagttgtaaaagtatattctggatagtcaactgttcttagagatatgatttacaaaacaatatgcatctttaacttaacacagcctggaaatatttcacttcacatatactgtattttcagttttctacattcctatcctttgtgttattattgtcatacgttttgttttcatgtatattatgaacactgtaacttattatttttgcttaaattgcttactttttaaaaaaattttaaatgaaacaattttaaaaatattgacatttgtatttctggcactttttttttttttttttttgagacagtgtcactctgtcgcccaggctaaagtgcactggggcaatctcagctcactgcaacctctgcctcctgggttcaagcagttctcctgcttcagcctcctgagtagctggcattacaggtgcaggcccctacgcctggctattttgttttttcagtagagatgggatttcaccatgttggccaggctggtctcgaactcctgacctcaagaaatctacctgcctcggcctcccaaagtgctgggattacaggcatgagccactgcacctggccatttctggcactttttatagttttgtatgggttggtctattatcattcttcagatatatttggaaatatgcattttccaaatatattttctgcttctgcccatccctgttctctaattttcttttgagacaccagatatgcatgtgttagaccacttacaatttcctataggtcactgaagctttgttcagtttgtttccttagtcttttttctcttagtgctttatttttgcttcctcgggttcactgatcttctacagagtttaaatgtgctgctagtcctatttcatgaaattatcatttcaaacattgtatttttcattctggaactttttatttcattctttttttataccctacatcactatgttcatgttattatagctgttttaatttttaggtctgctaatttcattgtcagtttttttctgggtctgcttccattgactgatagtcctcctagttatgaatcatattttgtgcctcttgtcttgtaattttagatttagttgtagacattgtgatattacatttttgaatatttgtattttaaaaatctttttaaaaggatgttgagtttattttggtgctcttaagttttttgcagatcaacttgatgctcttgtggctgattttaagctttattctgatagttttagtgtagcttttattctagtgtagttcatcccagcaactgagatgtgagctttctaaggctcctagtgaatgtcataagtattcattaggcttctgaaatctgaccagtcagaacagaaatgtgccccaggtctgtgtagtttctagttgctgagcttatagttctgttgtagttttttgcctagtgttgtggaatttcactgtatgtatacaggacttagtattcaggaactgagtcaggggtgtcctattcaggtatttggaacctttttctacataattcattcttcagtattctgcctcactaattctttttagccttcatgtattttgtttcctcaagtaagtggtcccattgtactctgtttgagttcccctttcttgtgcagcagcctggacagtaccttcgggtagaagactaggataattttaagggtcaccttatttgtttcccgtcattcagggattacattctggcattgtttgttgttcagtgtcttgaaatatatgtttcacatattttgttcagtttcttgatggtaggaagataagtttgataccaattattgccttatggtagaatctaaagtctagtgcttgtttttactttagagtttaattttatttaaacttaatgtactagaagtcctcatattacatatttctaatgtgcataaatttcagttagcacaatttagttaagtgacactagtcacccaataccatggttccaatttcagttaccatagtatattaactatgagtaactatgtaaagtacaaacttcattgctagtactccagtccacacatgactatgtgaaaaacagatacacactagtctatttacttcaaggtctgttggcgattaagtttatatacagacaataaagtgtctagttgtattgtctttcccaatgttaagcccacatgatattttatagaaatagataatcaaaagtggaaattggccaacagatatgaaacaaagtaacaaaaaatgataaccctttcattgaaatttgagagaaatgtaaatgaagttatagaagaaatagttgaccataggaaaattgacactgtcaccatttgatagactctagatatgcagccagaggaacttattgaaggtgaacttattaacataaatgagggaagtggtttttttgtttgtttgttttgggtttgtttttgagatggagtcttgctctgtcgcccaggctagagtgcagtggtgcaatctcggctcactgcaacctctgcctctcactgcaacctctgcctcctgtgttcaggcaattctcctgcctcagcctcctgagtagctgggattataggtgcccaccaccacgcctggctaatttttgttttgttttgtttttttgacagagtctcgctctgttgcccaggctggagtgcagtggtgcaatctcggctcactgcaggctccgcctccagggtttacaccattctcctggctcagcctcccgagtagctgggactacaggcacctgccaccacgcctggctaatttttgtatttttagtagagatggggtttcaccatcttggccaggctggtctcaaacacctggcctcaggtgatccacccgccttggcctcccaaagtactgggattacaggtgtgagccactgcacccagcctgagggaagtggttttgatgcaaaagatgaagatgtcccagaggaaatctttacattaaaggaaaaaaaaactttatattaaaagaccttgagatatttcacaaaattgaaagtacaaaggataaaatgttagattgtgaccttgctttgtttctaatcttctcttaaaccaatctaatgaattcttaatttcaactttcgtgtttttttatatacaggattttcatgttatatattttaaattttagattccaattttctggtgtaactttttaatctgttttgttgaatatcttaaatatggttattttaaagtctgtgattacttatcacattgggggctgttgtttttaactgtgttaatatgtacataccataaaattgaccatcttaaccatttttaagtgtacaattcagtagttttagcacattcacatcattgtgcaaccagtcttcagaactttttcctcttgcaaaactgaaattctatactcattaaataacaactccccattacccatcacctctcagctcctggcaaccaccatcctactttctgaatttgactactctaggtaactcatataagtggatttatacagtacaggcatgcactgtataatgacatttcagtcagtgatggactgtgtacacgatggtggtcccttgagattataatggagctgaaaaattcctatcacctagtgacattgtagccaatgtaacgtcatataatgcaaggcattattcaggtgtttgtgttgatactggtgtaaatgaacctgctgcactgctagtcataaaaaagtgtagtacatactattatgtacagtacataatacttgataataaacaactatgttactggtttatgtacttactgtacagtattttttattgttattttagagtgggctacttctacttattaaaaaaaattaactgtaaaacagcgttaggcaggtccttcaggaggtattccagaaaaaggcattgatgtcataggagatgacaggtccatagatgttaattgctcccaaagaccttccagtgccataagctatgaaggtagaagacagtgatattgatgatccttgctctctgtgggcctaggctaatgtaatgtgtgtgttcatgtgttggttttcaacaaagatgtttaaataatatatataatatatattttttaaataggaaacaacttataaagatgtaaggaaaaatatttttgtactgctgtacaatatgtttgtgttttgagctaaatgttattacaaaagagtcaaaaagtttttaaaaactaaaaaaatttataaagtgaaaaagtcacagtaagctaagtttattactaaagagacaaaagtatgttttaataaatttagtctagcctaagtgcacagagtttattggccatcttaaccattataaagtctatagtagtgtacaataatgtcctagaccttcacgtttattgaccactcattcagtaactcacccagagcaacttgcaatcctgcaacctccattcatggttaagtgccctatataggtgtaccattttttatctttttgtctttttttttgagacaaggtcttctgttgcctgggctggagtgcagtggtgagatctcggcttacttcagcctccacattccaggctgaaatgatcctcctgctgcagtctcccgagtagctgggactacaggcatgtgccaccatgcctggctaatttaagtattttttgtagagatggggtttcaccatgttgcccaggctggtcttgaactcctggactcaagggatctgcccacctcagcctcccaaagccaccacacccagccaccacttttattttattttattttattttattttatgttatgttatgttatgttatgttatgttatgttatgttatgttatgttatgttatgttatgttattttgagacagagtttcactcttgttgcccatgctggagtgcaatggcgtgatctcggctcactgcaacctctgcctcctgagttcaagcgattctcctgcctcaaccttctgagtagctgggattacaggcatgcgccaccatgcctggctaattttgtatttttagtagagacagggtttcatcatgttggccaggctggtctgggactcctgacctcaggcgatctgcccgcctcagcctcccaaagtgctgggattacaggcatgagccactgcgcctggcccttttaatcttttatactgtatttttactgtactttttctgtttagatacacaaatactttccactatattgcagttgcctacagtattcggtacagtaacatgctgtccctgcttgtagcacaggagcaatatgctctacctatagtctaggcgtgtggtagtaccttctagatttgtgtaagtacactgtgatcacacagccgagaaatcacctagtgatgcatttctcagaatgtatcccctttgttaagtgtcacatgactgtatttgtctttttgtgactggcttatttcactcagcataatgtcctcaaggttcatccatgttgcagcatgtgtcagattttccatcctttattaggctgaataatattccattgtatgcatatactagattttagttatctacccatctgttgatggccatttgaatctgtctactttattgtttgccttttcccctggtttttgtttgttttttaatttggccatttgatccctttgctttgaatgcttcgtaattattcattgagagctagatattttttaatgaaaatgttagagactctgaaatcattcttcacagggtgttgaatattcttttcacagacatatccctttggttcagttgaggcatctctgtttttggtgcccttcattgttctggttcatgtgactcttccatggtgtcaattgaaagcctgagttgttgttgttgttattgttgttgttgttttttaccagggtaccttgtcctatatgcaccctatactccagtctttggctccacagcatcatgagactgctgaaatacacttcagacttagtttttcagcatcttactctctgcgtgtaaaatttaggagtcaggaaatgccgtaggggaaaaattatacccagaatatcaggttaaccgtaatgcatttcccttctgcctaggatctttgcccctaaagttttggctgtattagttgttctctctctcatggcttccattttctatattttatttagcttctataattttctgcatgaaatttagtctgataataattactacattatgaccaaaagcaaaatcccagtatgtatttttattaatttatattccatgttttatttttaaacattctcaaactacagaagagttgtaagtaaaatgcaaattgtttttttttcataaaccacttgagaataaggttctgacatgatgtcccatcacctctgaattctctgtgtatttcctgcaaaccagaacattctcccatataacccaataacaaccatcagaattaaggaaattattattggcatattattttgtcatctaatccacagatcccattcaagtttctctagtaatctcagtcaatgtcctttatataatagaataaatatctagttcaggatcacatgatacatttagtagtcatacctctttagtctcgtttactctggaacagttcttcagtctttccttggctttcataacattgacatttttgaggattacacgccagtatcttgcagaacatttttcaaattgggtttttctgatgtattctcatgattagatccaaattaggtatcttcgacaggaatatcacagaggtgatgttgtgtttttattgaatagtatcaggtgacacataatgtgaatttcttccaatattagtgatattaatgttgattacttgattaagatatcagggtttttttcccactatagaattaactttatatttttccaattaaaacgaagtagtattttgtggggaggtattttgagactatttaagtatcctcctccttatcaaacttacagtttatattttgtttcattttattttatttcattttagagatagggtcttgttctttcactcagggtggagtgcagtggcgtgatcctcattgtaactcctgggctcaagtgatcttcctgctcagtctcccaagtagctggaactacagatgcgtgtcaccatggcttctttttttcctgttaattctttttgtagaggcaggatctcaaaatgttgctctgactggtctctaattcttggcctcaggcaatctgctgggttacaggtgtgacccaccacacttgtccccagtttattttttatgtcattaatggagtcatagatttcaactttattcagtggcttattttattagttatctattattacataacaaattacctcaaattgagtggcttataataacacatacatttaggctgggcacagtggctcacaccagtaatcccagcactttgagaggccgaggcaggtgggtcatttgaggccaggagttcaagaccagcctggccaatatggtgaaactccatctctactaaaaatacaaaaaattagctgggtgtggtggcgggtgcctgtagtcccagctactcaggaggctgaggcaggagaatcgcttgaacctgagaggcggaggttgcagtgagccaatattgtgccactgcactccagcctgggtgacagagcaagactctgtctcaaaaaaaaacaaaaacacagacatttatatttttttgggggggtgatttacaagtgagttgtatttaaactttaaatggcgaatagttattacaatattaaatttttcaaaaatatatagaaaaatgaatacttaatacttattttcaataaatttttatgagctccagtatttcagagtgccacctcccaaaatgacagcatgatataccttggcaatagtttagacctcttctagaattttctcacatctgctttttttttgccaaacatatatatgtttatattttttctccctggctgtattgctgtataattggcaaacaaaaattattattattattatttttttattctggggtacatgtgcaggatgtgcaggtttggtacgtaggtaaacatgccatggtgttttgttgcacctatcaacccatcacctaggtatcaagcccagcatgcatcagctcttttccctaatgctctcccctgacccgccctcctggcaaacaaaaattacatttaaggtgtacaacatgttgttttcatatacatattcattgtaaaatgcttgtctcaatcaagctaattaacatatctgtaacctagcatacatgtaacatctcacagtttcttttctttctttctttcttttttttttttttgatacagagtctcgctctgtcacccaggctggagtgcagtggcacgatcttggctcactgcaacctctgcctcccaggttctggcaattctcctgcctcagcctctggagtagctggaattataggcacacaccaccatgcctggctaatttttatatttttagtagagacagggtttcaccatgttgaccaggctggtctcgaactcctgacctcaggcgatccacccacgtcggcctcccaaagtgctgggattacaggtgtgaaccacttcgtctggccagtacctcacagtttctttcaatcaggagtctgggcacagctgacctgggccttctgctttagaatctctctcacaaggccataatcaaggtggtgtctagggctgaggtctcatttgaaggttttatttcgagaaaaagccacttccaagcttattgttgttggtggtggtggaattcttttcttcaagggctgttggactgagcctcaattcttagttgtttgttgactgggtcaccgccaggtctgtgccatggggacatctacagtatgactgcttgtttcatcaaagcgtgcaaaccaagaaggcaatagagtctgttagcaagatggaagttgcagtcttaacctaattaggaaaatggcatcacatcacctttaccaagggcatgcataccaagcggtgggaaacatcggggggcatgttagagtttgcctgctaccgttatccattattatcattatttagtttgatattctaattttctcaaatgtagcctgcctcagtctttcactctggcccctgtattattttgacatgtctctgtcattcattgagcacctcaagaagatattccaagctcctcttaaactttcctgtccaagccctcgcattgttctaaggagctctggttccttttagtggagagtgatattttgaatcattaaatgtgtttgttgctattaggttgctcctaggccctctcagttggtagtcagtctgtgtgtgtctgtgggtatatgtgtacatatatatatatatatcatgaatatattatttacctaggaatttctcggtgtaatacattgtaagatttcagcttacaacaacatcctcaattctagttcagcaatgtaatattcattctagttttctttctttctatacttgtaacttgtttttctgattatgagaaacctagctcttattatcctttgtatttgatctgccacctttatttgatcaatcttcctgtataatccatctcctgttgctgacatatctctcgctccatttctcaccccatacttcatatgcatgcctccctcacccttttgggatccgacagcttgcacttggctgccccttccaccctcctcactccactgggtctgaaactcactgctggaccactgcctctccctctcttaatgcatgccttcttctgccgacatgggcaaccctcactgccatccccccaccctccactgccctgtgtggatgtggacatcctcatcattctgctcactgctgttacagttcctacgtggtagccttccttgttccattagggctctgtcacctcatgctgggtccccctcccagcagattttttcctatcactctgcttagtccctgaaactctgtgccctgtccttttccctctcgggaatacccttttcctactacttggactccaaaagcctgttttgggccactgtagtcaactctctgccacttagcttgatgcctcctttgcctgtactcacctattgaactgttcaggtaggaaaggagaagagggagaggtatcagttaaattttatttttgaaaaactcactggtatttttacaacaaatgcttttaacttagtttgttattacttacatagaagtcagttactcccacatctctgtaatcgctacaggtttatactcatattttcatgccatatttttcttacatactagatagaggtttactatcacatcagattcatgatttctgaacttggttactccctgcaccctccaaacgagtttcagtttaccagtgtctgtcactaccactactgttcttctagtcattcaagtttgaaatgttgaagttaattcatttttccttatgatcagttatccagtcctgttgatccttcttttgatgtacgttatcttctccatggccattactttaatgaatataataacctcttgggtgcgatttctttatttagtttgtgtagtcattcctgtgcccctaaaccattttggcttcccatttcttaatgagtgaagtaactccatgtttaacttttaaagtgccattttaatgtaacactattctagatagtcagaatatctagttttgactcccatctttgttgcttactaactactcatcaacgtgtaatttatttaacctccctgggtctgtttatttttattttattatactttaagttctagggtacatgtgcacaacgtgcaggtttgttacatatgtatacatgtgccatgttggtgtgctgcacccattaactcgtcatttacattaggtatatctcctaatgctatccctcccccctcccccctccccccaccccacaacaggccctgatgtgtgatgttcctcttctgtgtccaagtgttttcattgttcaattcccaccaagagtgagaacgtgcagtgtttggttttttgtccttgtgatagtttgctgagaatgatggtttccagcttcatccatgtccctacaaagggcatgaacttatccttttttatggctggctactattccatggtgtatatgtgccacattttcttaatccagtctatcattgttggacatttgggttggttccaagtctttgctattgtgaatagtgccacagtaaacatacgtgtgcatgtgtctttagagcagcatgatttataatcctctgggtatatacccagtaatgggatggctgggtcaaatggtatttctagttctagatccctgaggaattgccacactgtcttccacaatggttgaactagtttacagtcccaccaacagtgtaaaagtgttcctcttctccacatcctctccagcacctgttgtttcctgactttttaatgatcaccattctaactggcgtgagatggtatctcattgtggttttgatttgcatttctctgatggccagtgatgatgagcattttttcatgtgtctgttggctgcataaatgtcttcttctgagaagtgtctgttcatatccttcacccacttgttgatggggttgtttgtttttttcttgtaaatttgtttgagttctttgtagattctggatattagccctttgtcagaggagtagattgcaaaaattttcttccattctgtaggttgcctgttcactctgatggtagtttcttttgctgtgcagctctttagtttaattagatcccatttgtcaattttggcttttgttgctatggcttttggtgttttagacatgaagtccttgcccatgcctatgtcctgaatggtattgcctaggttttcttctagggtttttatggttttaggtctaacatttaagtctttactccaccttgaattaatttttgtgtaaggtgtaaggaagagatccagtttcagctttctatatatggctagccagttttcccagcaccatttattaaatagggaatcctttccccatttcttgtttttgtcaggtttgtcaaagatcagatagttgtagatgtgtgttattatttctgagggctctgttctgttccattggtctatatctctgttttggtaccagtaccatgccgttttggttactgttgccttgtagtatagtttgaagtcaggtagcatgatgcctccagctttgttcttttggcttaggattgacttggcaatgcgggctcttttttggttccatatgaactttaaagtagttttttccaattctgtgaagaaagtcattggtattgatattgattcttcctatccatgagttttttttaattaagttaaattttttttattttccagtttttcataaaaatagagatggggtctagttatgttgaccaggctggtcttgaactcctggtctcaagcagtcctcccaccttggcctcccaaagtggtgggattatacacatgagccaccttgcctgaccctctctgggtcttatttaccttactagtttattatacaggtgaatgaattggggaagagcttgttccgcaattcattgccaaacaatgaattgttagactgacaaagctaactaacaaagcttgttagtttgttatacagagaatgttatacagatgcagcttgttagtttgttatacatatagtaacaagtgctacaataaaattaaagtctgtgactgagcttttctaaatatttgaaaatttacctaaacttatagtagctgttgtctaatgcaatttagtacattgttaaattttttcttgtagttactatttgttagtagtttatctccttgaaatagagtgtaaactacttgagtctgtggatttgtggagacaaacacatttgagtattatttctgccattgtcatttaggcactataacttcactgaacttgagtgtactctcttgttaaggcaaaagtactaataattctttgacaagaaggtaatgcttaaatgaaataatgtacttaagggatctagtacaatgcctggcagacagtttattcccggtaaactttacttatcctctttttgtactccacctgtgcccactttggtaatgaaaaaataaatggcttcccagaacagtttgaaatgcaagtggcattcacagaagcctattcctggtgatgatgccatttatatttttttcttttgcactttgcagcttttagaatccttattttagccgggtgaggtggctcgtgcctgtaatcccagcactttgggaggccaaggcaggtggatcacctgagttcaggagttcgagaccagcctggctaacatggagaaaccctgcctgtctctaccaaaaatacaaaaattagtcaggcgtggtggtgcatgccggcagtcccagctactcaggaggcttagtcaggaaaatcacttgaacctgggaggcggaggttgcagtgagccgagatcatggcattgcactccaacctgggcaacaaaagtaaaactctgtctcaaagaaaaaaaaagaatccttgttttagttttaccacaaccttgtgcaataaggctgggcagatatgattatcctatctgacaggtgggagttttgtttttggagtgaactaaattgggattcttaagaggcaatcattggatttgtaggtaaagtctgaatgtattacatgattatggtatactgcatttctctgaatttcttagttgatatagtagtgaaaagggaattcttctattccatggcttaaggatacgtaaactctcagtacagcaatctttttattgttgattattatagcttctgttactcctagaagttgaccaacagggaccttaatttaggagattttgtcattcagctttcgtatagtaaatgctgaggctagccctttgcctgcagggctatcagtgaagaggatctgtgacattactccagacagccaagtgtagggggaagagttgagattttcagtgttctctgtgtaaatgaattgtgccattgaacctgatgggcactagatactatattcttcttgaagcactggaggcccttcattgcaatcttgttttttcaacttttattttaaaattggggtatatgtgcaggtttgttacagagatatactgcacgatgctgaggtttggagtctgagtgaatctcacccaggtagagagtgcaaagtacccataggtagttttttcaagctttaccccctttgtcctcccaccttttgtattcctcagtgtctgttcccttctttatgtccatgtgtactcaaggttttgttcctatgtataagtgagaaaatgtggcatttggttttctgtttctgcattagttcgcttaggataatggcttctagctgcatccatgttctgcagaggacatgatttcattattttttatggctacttagtattccatggtatatgtgtactgcattttctttatccagtcttccgttgatgggtacctgggttgattctgtgtctttactatcgcattgcagcatttcaattttttttctgattcaggtagtagaaaacatgttcagtcttatttttttctgtgctgtgtatgctttttaaaggctagtgaagtcattcagttggataacaacaattataatacattgttatactcttcaactttctttgattttgcaaaggagagtcaattggggtgacgttaggtgggaactgagctgaagaaactaatatgtgctgtgcagggctggatttgtgtaggatgcagtcattatctgttaactttgtcatagcttttgagactgcatgtaaggagtaggtgatttgcaagttatttaacagttaacagaaggtaaatatttaaacaggagaatgcgtagttgctgcttagtttaaaacctgcttttttttttttttttaattaaaaaaaatgttttttagccaggcgtggtggtgcacgcctgtagtcccagctactgggcaggctgaggcagaaggattgcttaagtccaggaggtcaagggtgcagtgagctgtgatcgtgccactgcactccagcctgggcaagagagtgagactctgtctcaataaaaggaaagaaagggaaaaaaaattaagtatagaaagaaaattttaggaatttaaatataatttgcaaggaaaaacaacaaaaacagtccaaactttaagtagaaaactatgtgcttttcaggtattttaaaggtaaattttaaagggcattatttattaaatgttgaaggacagaaaacatcttacatatttgtcagaaactgaccaatcagaatggccctgaaatgtatagacttaataaggatagtaaccaaaatgacagtcctttccactttgttcctcattgcccaaatttgctattttctccttcttttacgaaatgcttctaaatgtgaagatagaagggaaacaggtagagtaaaagttatagcccactccatttattttgtaataatattttttctcagtgttaagtggcatttaccagtatagataagattaattgttacaaaacaaaccaatttgaagattagtttttaaattgagccataatatataaaatcttatggtaatgtgcagatctgactatattcaagtatagttttcatacccataccaattgtcttgtaataatcgggaatgcatcctctgtgtggtgtttgcaaattaatgctattttggaaatcacaccggtatatctagtggctttcctgggtgtatgtggctcattactgattataattttctttgggaattttagtttaaggggatggggtaagcactttcaaattctttgttgttagtagttttgatggaggatagggataaatgaatgaggaagtgtgttagaacgagtaagtaaactcagataatttatcaagtacatactacaaaaataacgcagatttttatgtaaaacggaggagacaaatcattcacaagaggaaagccttaaaaacttaccaaggagcattcacaaaaataaatatgtatattttaattttaaaaagagccccaagtctgtgaatgaaagggttctggttggtttctagacccagctgtgcttgctgtatgccatgcaggtggctttagtatggttaaaagtgtcgcctgccctcttgtgaagggaagcaggagaagcgacaagctaccttccagtgcctcctcgattttcttccactatttcctttgtccttttcctgtgttttcatgctctatttatttacacccacttctgacttctcttttttctcagattcaatctttccttccgaatgactgtgagatttttttctacccagcacacacagaaacttaaccaattgcgtatgtacagcatttccatttcttttttctttctttttttttttttttttttttttgagacggagtcttgttctgtcgccaggctggagtgcagtggcacaatctcagctcactgcaacctccgccttccgggttcaagcgattctcctgcctcagcctcctgagtagctgggactataggcgtgcaccaccatacccagcttatttttgtatttttagtagagatggggtttcaccgtgttggccaggatggtcttgatctcttgaccttgtgttccacccaccttggcctcccaaagtgctgggattacaggcgtgagccaccgtgcccagcctgtgtacagcatttcttataacaatgagttacttttatgttaaggatttttttttttttttttgagacgggtcccttccttccttccttcttctctttcttctcttactttcttttctttcttctttctttccacagggtcttgctttgttgcccaggctggtgtgcagtggcatgatcaccgctcattgctgccctgatatccctggctcaagcagtcctcccatctcagcctccccaagtagctaggaccacaggcatgtgccaccatgcccagctattttttaaattttttgtagagatggggtctcccacattactgaggctggtcttgaacttctaggctcaagggatccacctgcctcgccctcccaaagtgctgggattataggattgagccaccacatctggctccaggacagtgtctactaccagaacagcatttaataagtatttattgaataaatgattaaaatattagccttaagaaaattttagtatcatttacttaaaaaattagcaaagcattcttaatacgtataaagaagtaatatgagtagaatgtgattctcaacagcaaggaagctttttttaccctattttctccattctctttctgttgccttctccttccaatgtgagaatctctgctattaagaaccgctggcagagactgaaattagtatacataattctaaggagatattgatgtaaatggtcgatatggattggcaggatgacagggagaaggaaattataagtttaaagacaggggtaagatgagtatttgaacaaaatatcaaggtaggtagttagctagagtgccagggccaattagaagattagagaaggtgagttgatgttggcagtgggggaaatgtcagattgacagagtgcttggatttcatacagtagatatctcatcatgaattattgatgagagtgacatgataacaaagtgaagacaattatttttctatttagctgctgtttataaaatggatcgtagcttgaggtgaggaaacgttgaaaacagtgaacaaagttcagagattgttggagtaattcaaagcagtttagctgttttgcttggtatgttatctggtgatgcctttagcagatacccttcttttgaagcccagtgtccactttatgactgagggatggatggaggcaggaggaagaattctgcactagaaagcaacaggccaagattctagtccctacttccctactttgtaaattcataatcatggataaatacttaatttttcctgggcatcagtcaccttacctataaaatgaggataatgtattaagcgtagtcctatgggtggtaaataaaatgaggataataatctaaaatcaggggatatacatagatctcctttggatttatttgcagcccattatctatctatctttatttagataagagacgggatcttgctgtgctgcccaggctggatttgaactcctgggctcaagcgatccacccatctcagtcttctgagtagcttggaccacaggcacaaacctcttgcatggctctcattgtccatttatcaattttagatggtgtaaacagtgaataccatattttgtttcccaatattactttctacaactatattgttttaaggagaaaaaagtctatgacaatataaaatatttcaaagtctgtaattttaaggtttaatgttacctatattgactactatattttaaaatatgtatccctgtttttatatgtgccatgattaggtatttagttttttagttattattagactgtaatagcactcaagttgatggataaaatttcatcctgggatacttttagagaaacatgaagaatataaaaatagttttgaaaagtatggtttctttcttacaaagctgtagctgcaataatactaatgtcagttacttagagctactagaaatgtgtaatttctaccttttttgactactgaatataccatatgtattatatatatgtacattcttaggtatttttgtttgtttgtttagaaggttttaataccaacagctttctaggtgtcgtcttcttcctcttcctctcccctccccccctcccctccctcccttcctcctcctcctcctcctcctttttcttcttcttctctctctctcctttctctctcttttctctctcctttttctctgtctctcctttctctctctctgtgtccctgtctctctttgttgttgttttcccttctgtttgggttgtttcttcccctcgccttataccccccaccccccacagaccccaatccatctggaaagatgaagaggcagctgctatggtaactgtgcattttggttaatgaatagcagactaacaagatacataaaacatacgcaaactgtgcagagtttgttgctgtcaaagccgtagggatacaatactttttcttttccttctaaaaaaaaaaaaaactctcttaactgtggtgttttgttttctaatttaccattcctaatattgtaatgtttctgtgaactcctcctctttctgcttagtctgcacagtattacaccctgtggtgagtttatgggagctgagttgaggtgcatagaggaaaataattgatcaactggattaagaagtagatttcctttagactgatacatagaagaatagggacaaaatgtttttgactaaatgtttggttttttgaacgataacttctttttttacctcctttccttttggccactactgccccttttgggattctctctggggttaaagccagtaagtagtgtgtttcttaaagatgtttctatcataaaggtcagctgcaactggaatattgcgttcagccaagccttaaaaattcctgtaatctgtgccatcctgtctcatactgtcccatctcatagttgtcctctctctgcagtgctctatgcccaggtctctgtggctgggctgctccagcctggcggacagcatgccttcgctgcgatgcctgtataacccagggactggcgcactcacagctttccaggtactttctctgtctctgtgggttatttgcgggcattagtgtatgtgtctaattcattagtatgtgcctcctcctttcccatactttacttatattcatcttttctccttcatattgcctgtatctcacatcactcagtactcctttaatgattagtttataatgtagacccagactgatccactcttaagacaatgtcatcatgattggttacaaaaattgacatagtacagcttgactgttggctttcagatcaagtagaagtatgatagtagattttaaagtaatctcaataaatagcagttcaatacgtaatatttgctctggacctacataaagccaattagtataatcaatcaattaattacaatcagtttcctgaacattttcttattttttttaaatgattactcaaagtataaagtgccctcttcagagtatctcctggtaattatactactaagtatatattttttataactgttttatttatatcttgattaacatttctaatttctaggtggaaaaacctttgagacctttaggtacagtattcaccttgagacactctagctagtgtttcatgaattaacagattccagttcccctcagcctttcttttttttttttttttttttttttgagacggagtcttgcttcatggcgcaagctggagtgcagtggcgtgatctcagctcactgcatcctgcgcctcctgggttcaagcaattctcctgcctcagcctcctgagtagttgggattacagttacgcgccaccacgcctggctaatttttgtatttttagtagagactgggtttcaccatgttggccaggctggtctcgaactcctgacctcaggtaatccacccatctcggcttcccaaagtgctggaattacaggcaagaaccaccgcacacagacccctcagcctttcttagaggccaggatgtcagttccaggatgtgcgagaaacttatagagaaataatgtggaaaattgtagacaaaaacgtaggaaagagtttggtgctcattgcttacagattagggtaccatacatgattgttttcttgactgagtcttatctgcgtacctcaggtatttggaatttgtgtttagcattttatagtaatacacaacaaattagtttttatattaatatttgcctgcttttaacctgttgttcatatctatttagaagaatttcaaagataggctgtaagtgtcagaaggcttgtgactaaattttagctaaaagaggggaacttaggttttccacattcctaacctatgctaagagttgttaatttttaatgatactatttagtgatcataaagctggatattttcatttttcctttacaaaatttaatatcttaagattttcagttttcctttacaaaatttaatattaaacttccttggcttatactatgagatacaatatagtaaagcatgcaggttctaaaattagctaaatcaagtcttgaatattgtctttgtcactagtggtatgatcctgaacttatttccttatctgtaaatggatactatagtaagggcatgcagtgatggtagctgcttttatcatgatcgttataaacattattgctattattggagagtaattgatatcctgagactgcttatttatttcaaagtgaaatatcttttttttcctttttttttttttgagacagtcttgctctgttgtccaggctagagtgcagtggcacaatctcgactcacagcaacctctgcctactgggctctagttgccctcctacctcaaacttccgggtagctgagactacaggcacacgaccacacttggctcatttttctattttttttgtggagatagggtttcaccatgttgtccaggctggtatcgaactccccagctcaagtgatctgcctgcctcagcctcccaaagtgctgggattacagatgtgagccactgcacttggctatatcctatatttttaactacatatcatactgacaaggttctgccattgaagaatccatagtctagtttgttggtttttttgttttgttttgttttttaaccttttcggggttgcagttagtttaggcgatctgcaaagtctgagggaattgtagtgcctaaaaggctgctcctacttcagaaactagtttcatgtttagaggcccccacaaccactcttaggtttgataacttgctagaaaggacttagaattcactgaaaacaattatactcacagtttattacaggaaaaggacacaggttaaaattagccaaaagaagagacacatagggcagaatctcggaaggatccaattgtagaacttcctgtcatcctctccccatggagtcatggatggcattactgcctcccagccgcagtgtgtgacaatactcacagagtattaccaaccatgaaattgacctgagcctttggtgtccaggtattcactggggctctatcacatactgctcacatggctgacttctagtctcttatttcctcctggtgttgaaacttataggtatggtttagtgcccccaacatgaatcacatttgtccagtcgctaaatctctcaggcaagcagagatactctcaccagacaagaagttccaggggcccagagaccgctttccagtagccaagaggaaaggccattcctttctttggtgaagagtaattcttcactacacaggggtcatggatctctttgggaatctgatgagaactattgatcttgggtatttggcaacattgtgttgaatactttacatacatatatagatgtttattatatttctattttgtgaaatgattgagagctattaaatcacataattctgaaagtgtaatctcccaagctgataaattctaggaagggaatgttcaaggagctgtaagaatatataaaagggggacccaatctaacctgaagtttgaggtaaagaagatcaggtaatcaatgtttaagagctgaaggatgaataggaattaactcgataacagggaggaatggaggagaaggaggacatttcaggcctaaggaagagtcagtgcaaaggccccaagagccagtgaggcttggtgcatttaaggaccctactgaaaacaagactgttgtttcagagaataaagagaaaggggagaatagagtgagaaaagactggggaagcttgatcactgaggtcttatgggccattcaaagtgtgtagtttagtcttgattctaagaatagtaagtcactgaaaggatttaagcacaagttttacctgatctgatttgcattactctggctataagaagatgcatttagatatgttactctggctataaaaaggataatttcagtagttgaagagagagatgatggcagcttggttttggacccaggatctttaaattcttaaaaaattattgaggaccccaaagtgcttttgtttatatggcttatatctattgatattcactatatttgtaataggaattaagaaaaaaaaattaaatattctttaattcacctaaagactataataaacctgtggcatataatgcaaataacatttttatgaaaaatatatttttcaaaaaaaattaagactagtgtattacatttttatgaatctctttaatgtctggattaagaaaagacagctggattctcatgtctgcttctgcactcaatctattgtggtttgttattttggttgacatatgtgagtaatatctgacctggcataggtatatagtttgaaagggaaagatattttaataccattttcaggtagttgcagtttcttgaagattagttgcagtatggtatctgaagccttatcaatgaacttcctctgttattgtattaaaatccattggtctcagtttttttcaataaattatgctggaacaattggatatccttgtgcaaaacaatgaacctcaacggttatactgcactatatacataaattaatttgaaatggatcatagacctaaatcggagttaacatgtataaaactaatagaaaatgtggcaaaaataatcattgtgactttgggttaggcagagatttcttagctaagatacaaaaaatatgaaccataaaagaaataactgataaattggacttcatcactgtttaaaaattctgcttttcaaaagacactttaaaaaaatgagcaggaaccaggtacagcagtgcatgcctgtagtcccagctactcaggaagctgaggcgggaggattgcttaagcccaggagttcagggctatagtgcctgtgaaaaaccactgcttaagaacagcctgaccaacatggctgaaaccccgtctctactaaaaacgcaaatttagtagagacggggtttcagccatgttggccaggctgttcttaaactcctgtcttcaggtgatctgcccacctcggcctcctaaagtcctgggattactggcatgagccactgcacctggcctcaacaagattattattatgtcttatgtagcaaaaatgggcttatgtactggttttaccctatcaattcaataatttgttctatgtcaggttcagcacacacaggtgcttgataatactggttgactaataggcagaaactggatttgaatctagtatcttctctgcccacctactggaattacagcagtcttagtgcatttgcatccttctggtttaggttttattttatttacctagatttttatttaggtaaattatttacttagatttttatttaggtaaaatttacatacagtgagatacatggatcataagtgtactcttaggtgagttttgacaaatgcatacttttgtgtaaccttcaatttcaagatacacaacagtttcataatctgagtttcctcatactcctttccagtctgtacccatcccccatatgcaattactgttctgatttgtcaccaagaatttgtgttgcctattcttgaacttacttcatataaatgccatcatatagtgtacattctttgtgtctgttttctttcaatcagtatgatgtttttaagatttatccatgttacgtatatcagtagttctcttttattgttaaatatatttcattatattagtacaccacaatttgtttatccattcatttattgataggtatttggattgtttccaattttggcctattattaataaagctactataaacagttttgtataagtcttttttttggcatgtatttttatttctcttaggtacatgtctaagaatggaatttgttgggtcatagagtaagtgtatttttaactttaaaagagacagtgaagcaattcttcaaagtggttgtcacaggaatacccatttttactaatattgacaaatatgttaatgaaatgtctcatttaatgtaatggcttcatgactttttttttttgatcattggattcttttagtaagtttgaagcatcttaagtcaaaattcttatggcaataaagaaggagaagctatggagtcattgctgaatttgttggattattcccagtagctcaaattgaaaccacagcattgagatggtttgaaaactagtgacagggaagatgctgaaaaaagttgttagaataaattctatggggatatgtttagtttgaggatatttttattttcatcattccattgatttatcctggaaagtgtatgagtgattagaagatttctgttgattaccagtagatatatttgatggaatcatttgctcattcccagcaaatggtgatcctataatctataatattaaatgagaatgagcaatagagttaaagtaattaaaaatagctgagtaattaagattctttattttgctttagatattgaaagagaagagaaatgaaattctgactgtaagaatataagtaaggggccgggcacggtgatgcacgcttataatctcagcactttggaaggccagggctggcggatcacatgagcccaggagttcgagaccagcctgggcaacatagtgagaccctgtctctacaaaaaattagctgggtgtggtggtactcacctgtcccagctatctggaaggccaaggtgggaggtcaaggctgcagtgagccatgattgcgacactgcattctagcctgggtgacagagtgagaccctgtttcaattaaaaaaaatagatagatagatagatagatagatagatagatagatagatagatttatatggccctagaatactttagctatcaagtgtaaccagtaattttaggaaaatcttgagctaagtgaaacgtgatattttaacattagctagggttccatgtcaaaggttgaaattgtattgaattcaggagagatgttgtattttattccttaagaatgcttacaagtctactgaattttaccatgtacaaagtgaaatgttaaaatggaacaatacaggaaaattaggcattattcattatatatatggaaaacttaattttacatttgagattttagaggaatatggattatcgaattgaatatacattaacattcaaattctattacaaaacaataccataaggaaaattatcctgtgacagaaatgcttctcattctgtagctgataccctctctattgtatatgaataatttctgtgtagcacaatttctgtataataaatgtagttattttttatgtatatgttaacatttgacttgtatttatcccagctacacccttcaccttaggggtttgcagggaatgacaaatcaaacatgtttttgtttgtttgtgcagaaatgttttgttctcctaataaaatgaattattgtttattatggaatatgtacattatttggtaaatatataaacaagagtatcacccatatgccttccactttaagataattattgctagattaacatgttagtgtcctttgatctgaaatgacttatccatccatgtgtgcctgtgcgtgcacacacacacacgcccaaataatggtttcatttttaagtattttattacatttaattaaattatgagatatacagttaaaacatttaatattcattgtagaaaatagaagtagaaagaaggaaggattttaaatgtcctcccagagattaccgtttcagtgatactagtaatttctgaatttcacctatatcatattgctcaaattctacattcatcatctggtaatactgattttggtcactgtttatctcatagatagctgctcacatgtttttgaattgaacaaagtttgaatttggcttatatctgaccaccacctccctctcatgtaattgttagtcatttcaaattttgcagttccccaaaggtgcagtgtgttcttttatatatctgtgtctttgcatataccgttctgcttacctgaaaaaacccctccacaaacacctattgtcccttacccactctctgcctttgtctacctaatcttcaagattcagctcaagctgagctagaattaaagtcttccctgatctttatctttgctctcttaaactagtcagaggatctgtacccagagcatgcatggaattctgtgccctgtaaaattgacatgaagaaaaggagtattcattttcgtacttgattctttaacaaaaaattcctgattgggtctaactttttacgtgtgttggattagatggtcatatacagaagggaaagaatagcaatataagtcttctcacgtctgtaatcccagcactttgggaggccaaggagggcagatcacaaagtcaggagattgagaccatcctggctaatgcggtgaaaccccgtctttactaaaaatacaaaaattagccgggcgtggtggtgggcgcctgtagtcccagctcctcgggaggctgaggcaggagaatggcatgaacccgggaggcagagcttgcagtgagccgagatcgcgccactacactccagcctgggcgacagagcgagactgcctcaaaaaaaaaaaaaaaaaaaaaaaaaaaagtcttctcattagcaatataagtaatctaattttatgtttttatgtctcacacatacacatacatatatactacattgtgtcaaattagtaagtacaaaacttttgtgtatgaatttcagttttctatttaaaagaaagtacataattagttttaccaaaatatagttgctactgttcattgtagtttctaccctttatatgagccattgtttgggggagtacttgttttgttactggtaataaactacaagggaaatttgtaatataatattagtatatttcccctagatttttaaaaagcaggtcattatttttttaagcacttcaactgcagcacagtgcaatcttttggggagaattggtaaaatgaggataaaattagtacaggattccagcagcttgaaaataacacaatatttgaccaaaatctcttttgtattccctactctggttcaattccagtagtcctggaaatgtgcctatggactatttacagtgagattataaaactgaatcatgattttggtgaatagaagccagagcatgtggctacagcaccccagctggcagtaagctctccctaggtttatgaatgtagttagatggtccccaactgtttacaagacagcagaggtgagatatttgattgacaagtcagaaatgcattagatcattctctctgccagtctctggttcatgctgttaaaaatgtcagcctccaagtttgaatggcagcctgagggccttagaagctttttgttttctgagatggaaacacaaattggatgtgtgcctgagcgcttcatcctgggctgtaatttcatcttttagctaagaaccacaaggtacacgagcaaagcaccctgtaaacaataatactgtggaaaaaaaataaacaaggtcgtgtttctggtacgttgatccgatggtgtcctgacctctatcacgttgaacatctccactctgattgctgttccctttggcattacaatgagagaaagagagactgacatactatgaagaaaagatttaaagttgcagtatcgttgcacattccttgtattggctatgaaatattgaactgtcagaatgtgacacttggttttttaagcaacctttcttgtttgaggtgtttgcagttcattcctttctcccccatttgtctgctttcattgatagggttggaagtagttgccttaaatgcatgaaaagggacagtgttaaagagaagtggtgctgatggagccaaacaaacttaacactagaaaataaatgcaggctgtggggcaaaggagataaagttgggttagtgtattattaatagtggaatttatggaacaccctattgtaaggaagaatcaggttaggtcccatttctgtttttgtggaggcaggaagttgggaaggtggtattgggtaaagagatgcagtgacatagtttgttaaactgatagcctactatatggcagtattgccaggccaatcagaattcacccagctattttatttattgctcttattatccagtgtctttaacaagtggtgaaattatagaagactttaaaatttggggaagaaaaatatttttttaatgtggaaaatgtgtatttatagtaagaaagctcattaggtaatatggaagaaacattatgcttatattagtccagcttatgccaaatgaatagaaaatcttccttataaaaccaccatatatttcttggaaaatattttgtagtaataaaatgagttttctattatgttttaaattacatcttttttttcaagctatgagtaggagtttataaattacaatacatcttaaaacaacatatatattttttcttctaaggaagcactattgatgtatgctttcattttcatcccttttggggcattgaatttacaagtaaagttttaactgagaatgaatggccttttgcagttcttctggagtatggaaaagagtttgtattgaaagttcctcaatggctgggcactgtggctcatacctataatctcaatactttgggaagctgaggtgggtggatcacttgagctcagaaattcgagaccagcctgggaaacatggtgaaaccccatctttaccaaaaatacaaaaaattagccagtcatggtggtgccagtctgtggtcccagctactcgggaggctgaggtgggaggatcgcttaagccttggaggtggtggttgcagtgagccgaaatcatatcactacactccagcctgggttgacagagtgagactccatctaaaaaagaaaaaaaaaggcaactatttagcttagccctctcctctgaaaatgtgaaaggcaagagctgttctgcatcagtctagtgaaatgcactggaaaaatggtgttggtaattcctgctttgaggtcatgctagaaagagagaagataatacttgtaaaatataagtcctgctcctttgtagccagatttttgtccttacttaaaaatattgtgctcagaaagtaataccaaaaggagggatattaagaactagttattgttgtttttaagtattgctctgaatttttaaagcataaacattgatgtagatttgcatttaagctatgagaacccactgtcttgactcagtgggggagttttcaaaaatcattcttgtagaaattgatttctcattggctgatttctacaggatgaatgaaaacaaaccattttttgcagtcttagaagaataagaggaatgcaagtgtttaagaaatgagactgaaatatgctttatggagttttctaaatctggtacaaagaaactacaaaatttcttcttatgtattatgcatcaatacagtgaaaatgcctcacagcttatgggctttttacaaccacaccttcacaattaatgattagctttattatttaaactccaggcttgcctcatgagcaaacatcagtgtattcatagaaccatagaatttcagcattggaccagacatcagaggccatctagtcacatacgtctcataatgtagaaatcctttatgaaatgtgtttggaagggagtcatctaatctctccctgatcactaccattattggtgaatcaaacttcttgaagcatcttgcttttactttgttggttctactagaaagttttttcttggccgggcgtggtggctcatgcctataatcccagcactgtgggaggctgaggcgggcggattgcctgagctcacgaatttgagaccagcctgggtagcatggtgaaacccagtcactactaaaaatccaaaaaattagccaggcgtggtagtacatgcctgtgatcccagctgcttgggaggctaaggcacgcgaatcgcttgaacctgggaggcggagatagcagtcagccgagatcacacccactgcactgcagcctgggtgacagagtgagactgtctcaaaaaaaaaaaaaaaaaaaaagtgtaataagtcagaatacaatgtagacacgtcttgttttgaacacaatttaaataatgtaatttaattactgcctaagattgcatatacttctttgatttgaatgatggaaaaatttctaggaacttagcctgggtttgtttcctcatcttttctttgaagccagaaaagcatagaaaagcatatgtaagcactttgacaaatgacataatgtagcggcatatcagagtggcacaggtattttaaacctagctccagttcctgaagatggtgaacatctgcttagaggtactgtagagctccacaatgcactaattgaattactcttttctggagttgcgactgcactaattgaattagaatctctctctctctctctctctgtctctgtgtgtatgtgtgtgtgtgtgtgtgtgtgtaaatgagataattccaaccttaacgggagagactatgagagacatgactgatggtgtgtactgtgctgctatctaatggcagcctatggaactactacgtggtctccagggaagagaaaatacagcgtgacctcagtctaaccccatccagtttagttcagaaggtcccaggatgtaattttgtaattctaaattgaaaaggaaagaatgtgataaatttctgtattaaaaattaagatatattttattaggcataaagtttttaagtactaagttacaaatattcaactgaattaaaaatttcctttaactggtgaaaaaaaatcgagttggtgggtcatcttttttctcattttgtccttcagtgacataaacgtaaaaaggaattaacgtttttgaaatgtcttagcatcatagaaaggataaatgatacagggcttgttcatatttttaaatacaatttttttcctggttgttagaaataaggtgttaccagattttgcttgtatgtgattatgcttatattaattatagcagtatcaaagtaagttgtacagatctcacttgctcttttttttttttttttttttgagacggagtctcgctctgtcacccagggtggtgccatctcggctcactgcaagctctgcctctcgggttcacaccattcccctgcctcagcctctcgagtagctgggactacaggcacccgccaccatgcccggctaatttttttgtatttttagtagagacggggtttcaccatgttagccaggatggtctggatctcctgacctcgtgatccgcctgcctcggcctcccaaagtgctgggattacgagcatgagccaccgtgcctggcctctgttgttctacttaatagtttaaaaattaagtttaccacaaatttgggcaagttttaaaccctcctaagtgaagtcagttattttgttcctttaaaagaaaaaaagaatcttagtcacaatttactgatttttgtaaaacatgcaaatgtagtcctgcgcaacattaaaagcaaataaatacactgaggacaactcaacatgaaatatattttgattcagtttaactctaggcattctaacttgtaaaaatggcccttaacagaaaaatacatatgtataatcacttgatttatagaatgtgtatgtgtgcatacaaaaccacttcagtaaaagtgctgttggttaccattctgagcatttaaaacgatcactttccatttgatcatattaaagatatagaaacaagtatatagcatagaaaagttttaatttcttctatgtaatcttcattattaaaatatgtttgaatatgccattattttgtaggctaatttgttcttcattgtgagattgaggtacttagatttcttgtatgaatagctctcactaaaatgactataatttgtactttttatattgtccttagggacattttactgatttagaaaatccttttgacatcaagtagatgtaaggctttacaaataacatggccattcacaactagccacaactccgattcgattcacagagtaccttttatttgccaattactgtacaaagtcttaggcataaattaagattcagaacctatcctcaaggagcttatagttatttgttatacatgtattaagtacttatataccagtcactgtgcatataattactagtgttaaccattagtcatatgtatttttttctgatttattgagctagaggtctggcttagtagcagtcctaaggaaatggtatacttatgttcatatcagatatatctcatctcagcaaaaaagtgataatgtatatttcagactagtctgtgtcttaaatggttttctcttgcctttacataccttctaagggaacagtgatgtttgtgatagctgtacatgtagcttaaaaagagatgataatatttgttacaatgcctcctactggttgatcatagattttcaatccttgttgtcttcagaactggtagttcccactggtgatttgatagtttggggcttctactgaggctataactgagaaagagtctattgcatacaaggtataaagtgcttctttaaacagtctgtttctagaacctaaattgtcctgggaccagctcttgatataaaaattcatagaaacctgtttttcacagagtgtggtaactccttgccatagtgctgtagtgttaaaattcacattggccaggttgttctgtaaattaaacactgacagctaccctcaggggaacagccaatgtatttatgatgatgtgctgattacacaaaatacactgcaagcagaaaacagctgcagagaataaacctcttaaaaagaatacaattacaaatagcaccctcagtatttctagtggtgagtgtagaatacagcatgctaatgcaagtttcttactagtccgcctgaaaacaaaaaatctgaaggagataaattatggttgaatgcacatgcggtgccagcatagcagtgaacaaatttcctttctcaagagcatggctgtaagtgcacagatttcaggtgtggagtagtctaaccaccctccctcattttgttaggttttattagtggttttctcatatatagtagggcatggccttgaggttataggggctctagacatttgaaagatattacacaatgaatggggcaggagggtaactaaattgtggttacaaatttctggtagaaactcgatatgttagggtttagttatcgacatttcatttgaagatacgactatatattttcagtgttattaatggcattgaagatggtgcccttggaattaataaaaggagtcatgactctctggtaagatctttctgatttcttagattctgtttttcaagaataatggtgttttaggacattggaatagctgattgtatatttgtaggagtatcagctctcaaatatgtcccttttcattcctgcatcttactggtcacatgcatacaggtaagaagattagaaaaaaaattttgttttccctatttgagattctctctgttagagcttagggtcagtatctataaaatatatttcaactgctgagcatgctagcttctgtttaaatcagtagaaaatatgttgatctttcaagacataaatttactcaagccaactgtaaggtatagcgcagggacatagtgattggagacagttcacttcacccgcctgaaactaagaatcaactcttcagtgtatggatcactggtatgtaataatcgactattatcggtctgtctattggtctctttttaaatcagtttggaacctcctggagttattttcttgctctactgacatcaatcccatgtggcagaggagttgtgtataatcgctttggtttaatcaatagaataattgataaaccagataagatttaaactgattatagccccagcagaattccccagaggccttggactctcttaattttgacatgtgtgttgtgtaccctgaggatgaagtgcagtttgaattatctgcttttatttgcttaatgacggggagggtgttaaagtcaaatgtttaattaacccagcaatgggctgcgttgtcacttacacacagctgattgagatatctcatggagaatactgaataggaatgataatgtggcactgggacggaagattgctttttcaatccatttgctgggtcactgctttgaatgtcttattggatgaaaggcattcagcctggagaaaaaattcagcatttaagtacattttgttctcttccccccccacccccccaaccccctccgtgctcagaagttaactaaaacagatatgttctaggtttattaagccatccatgtactagtaagagatcaggatagccagtagcctcaagctacataatttcctgtggaaacggaaaaatcctactagcctctaaggtattctaaatgtgagctcttttgtccctcacatcctgtgtcccttgccattattgtgaggttgtctttggttacttgtctcttgcctttttctgtagtgtttgctagatgtgcagctacctctagggccaaaggcagaccttttcctcccaaagaagcaaattatccagtacattttttgctatttgatatacctggcttctatttggttgtaattgtgactaagaattataatgagactgttgaactattcagagagatgaaaatttgaggcattacaaattcttgcttttttggctactgctattgtaaaaacagttgatgctgtgtatatttcattttgttgagaggcactttgctttctatatggactaaaaaattaggccaggaaagattgcaatattcaacaccatcaaaaatgaagtctaggcaactggagttttaatgacttgctgcccacaaaatatccctgactagctttataatggaatgtaaaaactcattgaaggcatatgagcaaaactttaaaaaaaattaaccatgactttccttctctgtagttcttatgtttcttccctctatcccccaaagatctaaaccaggaatttactaatttttttctttgctttagtcatttgtattccagagagcacaatagggagaaggatacaagattgatttttttatgtgtgtcctcttgaaagcagagtctggggcatgaatactgtggggggtggtgggggggccggttacaaagcaatagaagcatgcagctagtgttcgcgtgcaggttggactttttgcgggtcaaggcagaccagacgagtagcttatcttgagggacgcaagtaatagaccaaatatagagcagctatttcaggaatcatgtaggtcatttaattatccattatgattgagtggctaatgctcttttggcaattacatgacctctgttattcttgaaacctatccaggccctcgtgggtcaagtgacccacaagtcagtgctctcagacttgattccactcagaaagaaaggagatgttgggaaccactggcatttagaaatggccatgttttctttactgaccactacccagaatgtcctttgtacagcagtgataggcaactggttttgaagtcaactattccttcattgtatataggagcaaaagatgcattatacattggtttccacaagagggtattttggcaggagatactttaataccacaattagctattatggtattcactaattctgtactgtaagaacaactactatgatattaaaattaatgtttgatatctgtcaaaccaattatctattaccaaactctgtagtggtattttccattccataacgcaacaagtgctattgatgatagctaataacagatattagtatattattaattactaatagtaattatagtaacagattagtaataataacaaaatgccattgatgatagctaataacagattttaaaatatcattcattaaaattagcctaatttgaatttcagtgctacaacgattattaaattaaaaggccactttaaaattaggttctggtcaaagacagaataagttggaaacatcttgattgtttatcactttttttctttaatcaaccaagtattattaatatttccaaaaaaaaccaatttctgctaaatgatagtaaaattttctataattcagtgacttgtggggtaattttgagaacagaaaatgtacatttcttgtgattctttaaatcgaagatagttacggtgtggaaagcaatggcagcataatcaaattaattgtaggatttgtcagaaatgcacaaaattctgcatagttagcaaagtggtagattagaggtatacagccattctctagcattccagtaacttaagaccttaggcttaagagaaataattttggtattctttaagtagaaactatttgcattgctatagaaaaaggcagttccttctattggagaaaaaacatcttttaaaaatttgttacttacacatcaaagagcattgctttaaaacaacaacaacaacaaaaactcaacaaggttgtttatccctggagcagtaaaattagccatccttcccaataaatttattaaattacccctggtagaactccaagctaatctgttttggttttattttcattttgttgtttggtgatgttaacaaatgaaaaattgaagacatgaattggtgtgtataacctttgacccttcagaaatagaagacttctcactcaaattttaaatccttaagccaatactaccttagggtctggctacttagagacccatgagaatgcagttaatctgagttatatttgctgttttctgtttaaaaacatattttctctcattctagttttttcatttctgtggtggagatgaacagaaaatggaaagcaggatttacagcagaagttacagattaaactcaagtatcccaaataaggagtataattagtctgcttaccattttaagaggaaagcaagggatataatgtatggtgtataattttttttttctccctatatattacttttctttaaggcatacccttcaatatctatgctgagacatgtttttcagccttgggaaccaaaaatttatagaaataagtgagaggaatggtatttgtaattttaaagacccgaagagacattaaggcagtatcattagttgggaaggacacagtataataataagcctatataataatttcttaattaggaaaaaaaataatgattaaacaagaccagtccatattagagacatacacctaaacacagatcttaatctagcccagtctagctttcagaaatgtagtttatttacttgggatggttttacgtctcgggatattagcttttatcaagtttaaaggaatcttaaatttctttcaagatattgttgaattgtaataaaatggtaataccaaagcaaggaagatatccaaggggatgaaagtcatttagcaaaaagaaacaaaaaaccaggaaacaaggatgacagaaaaaaaaaattcatcagagagaaagaattttgtcatacgtcctaagggttctatagttctcagtcctattttgataaaaaaactacttaagaaaatctacagaggtcgagttacaaaaataaccagatgtccttattagtggaagcaaatgtttgcctcttaatttacacaaaactatatgcagaggatctctggatgaaatatttttgtaaatatggcagcaaagaaaatcatggcacaaaaaaatctgtccaaaacacataatcgtgaaggtaatgtcttaaagaggaaagcagttttttaaaagattcctatagatttaaaggtaaaaggtaagttaagctagttatattttggtttacatgatacgtattcttggctttttattatgtatgtctttctatctgaaatccccctggtgaattttaattcattttgccttgcgtatttctctactttgtacattgttgttgcattttgaacagtgtaaacgtatgtgtggattgcttttttttttccctgaaagaatggttgtccttttagttccatcacgaaaaacacaacctacagtggtataagatgcctgctttgcaagcctgtttgggattttaaaatattaacccacattttaataagtagatgtagttttgtaattgcattcgtacattaagcaggataaaaatgtaaaaaaaaaaaactacttgaaagggtaaggtaggaagtgtttttttttgtttgtttttaaattaaggctttagagccaaaaaaaaaaacctgtaaagtttaaatggactattacttctgatgtggagcatattagcataattacaaactcttttatatactcatagtcattgctaagttgatgttcaaacctttgattaagaagtcacaaagctgactgtgttcagacagctgtgtaatatcgctcctattcacaaaacagataactgttttagccccctcccttttttggtccccatatttattgctacaaatttgtctttctcctatagctagacttttaattaatggtgaaacattaaaatgttgtattgtgatattttcggtgacttgaaagttaagagaaagcagcactgctcattcatgcccttgccttgtcactccctggtgcagttcatctcttctatccttcttatcagagtatctcagtgcttagttgagcttgtttatcttaaaagagcaggaggcaggcttttagggaataagctacatgttccagtataacaggcaccaatgctgtttgacttgaaaaacatttgatctcttacattaacagcccatgtcactgtaataggtagtacagccgagttgttcagttttctattattttagctttgaaataactgttagtgctgccccaaaatcttcgtgtataaaattgtatattggctgccccccaggactcgtaagtaaacaaggtgatatgtgtggccagaggggagggtatttgttggctttgttttagataataactgatcctatctaaagatgttttctgtctgatccctgatagtgggtgctgcatgacgttgtgtaaattcgcagacctagcaatattttaaggcagatttctgtttgttattaatatatgtgctcagtaactattaattatgaactttcatttttttctctgataatgaaacatttagtttttatgaagcttaatgtcaaagatcctgcacaatttgcctaagtatagcagtttgcacagcagtttttgaaaatgggcaagcaagaatttaaagggaatgtttgttagacttaaaatattactttatttaaaaataattcagttgtgggtataatttctgtgccaggaatagtttgacagttgtaatcaggtagcagtattaaaagaacagaaaacaaaattcgtataatcaggttgatgttttcttcctctttaagagcacttctccttttaatagtggtagaatggcagcaaataattttaatccttcctttcttccttcctctattttcaagaatctgatttttctcattcttatttttttctgttacagcattaccaggccacccagttactttcttagaatttaacctaaattagatacatcagccagaacaagcataattggttgaaaggcagccatctatctagggagttcttctaaatactgaatgtgtcatgcgctttgacataacatatctgtaatctctgaatacagaaagcactttctgtgttagctgtaggtgttaaagcagtagtgtgttttaagaatgtgtgctgtgcaaattctggcttgtgaggtaatgacaagtgtttgcctgcatagacaatatattttttcccccctgaggtccccacacacctagtttccctcaagctcatcatctctgtcaggttaatcaataggcaccgtatggcagagggtcagtaatcagtgtcatcgtgcctttaaatcgtgttgaaaatttgcttaaagcctgggccaattaacatcgagatgatgaatggatgggaagatgggaagagcctgccgctcaggggctttgtgaggaggagatgctcagctgttgagcagcagacaccagcgaataaaatcagccattcatgtgagctcagtccacccactcttaatgataatgtcaatctagcaaaatatatacacattggagttgtcacgagttcataaatcaaaggagtttgtcaaaggcattcagattaacgaggcagcagcaataacaagtcaaatttgcatagagaattgctcgaatctcagtaaattatgatcctgtttttcatttgattatttgctaatgtctcaagagggagaatgattatattagcatgcaaaatctactccagaagtagaaatctgaggtgtagaagaccagtgcactatgacaattaatcagtttctgcatactagcataaatgcacaaggcccagaaatgaacttcttttttattattatttctctttgctactgatccaaatggttcagcttgacagagactttatattgctttaacagtgttctgaattgtgcctgcaggcaagacatagttatgcagctataaccaacctatccatctgccaaccagattggaattctcctatccaaggcttccattaacccccactgacagctccaaacaggattaagaatttggaagcataaaaaatagttgttctttgcaaatatacacaatccctctgcattttgagaaaggatgcatctgtagtgttatatgattagtgtcggacagtgtggcggggagaaagcctgcttggcagttttttgacttctgtcacagggagtaaggcagtgctaatggaagtcctctttggttgtcccagagaatgttgtccattctatctagttgttagcactgtgcttggaattggtatattactagaaaagagcactccttgaaagccttaactggtgaatctgttgagtttagcagtatagggaggccttgatgtggttgtggtttaatagagtatgtcaaatgataaacatgctggagaagcaatgtgcatgaaaacatgccagagaatatcttaggaggacactttaggtcctccctaaaatgagtccttgaataggattttccgaacagcttctgaacttaaatgacctaagttttccccattgtatcctaaaaggattaattaaaatttgtttaaacacacacacagtgtttttttttaatgtcacctttcatacaagagtttgagtgattttgtccatgtagctaaaatatctgttaaccttgtaaaataataatttctgtttttgtaaattgtaaatttatatttggaagctaaattagctccaagtcacataataagttaatgggaaaaagtattaatccaattactaatttaccattgaagttcactatactgtgtttgcaattagttactagaaatcggtctcaggattttttccttcaggtgggttgtcattctatacgatgatgagcagatgatttcatttttaaaatgtgttcaaaatcagttataatccaccacaatttacctgctttgctaaaatgatagaattatcccagttacagagtccttcaaatcctccaatggtaaattagtgaagtatgtggcattggtgtgaaatgttcgcttgtagctttggagctggttattttatttataacagatgtctcttcaaacaggttcaggctctgttgcaccatccaaccttgagcaagatgcttactcaaagattattgtaagtcattatgagtggcttgacttttcatcactgtgtaaattagtttaattttttatttgattatataatcaactcttaattatccattttatcaggagttgtgtgttcaaatagataactgaaaatagtaaataagccacttactaggtcatggggaatattgccccagctatgaacctgctgtgtgctgccatcaaaacatctttacttcttgaattggacagtcaaaaatacaaacagcctcaaagttaggaatgctttggttaagggttgccaaactttgtctgtaaaggggcagataataaacatttgaggctttgtgggagataggatctttcttgtggccacttacctcttccgttgtagtgtgaaagcagccacagacaaatcgtaaatggatgggcatggctatgggccagttaaactttatttgcaaaaatatgtgtcaggccagagcttgtaagtgctgttaactgatcatactggcattataagtagtgggacagtaggactgcagttgggctgccactgaagttcctctgctattaaaaacaaaacaaaacaaaacttttttttaagctagctggacagtctgggtttagggtttcaattattcattgagcatctgttatctgtatacttacgtaatgtgttagtgggtagagggagctacaaagacttttcccagtaatctttcaatcttactggttagtcgaaagtaacagtgcagacatttatctaattaagtgcctgttgtgtggatcaagattaaaatttagttagggaatttccagtagagtaaggtggagtagttttatggtttcttggagaagatgacagttaaacctcattttaagaatgtgtaagacttgaatagatgagataatcttgtgtttataattgttgagtgaactagactggagttaagaatccttccaggccagactctgtggctcatgcctgtaatcccagcactttgggaaacggaggtgggaggattgcttgaggctgtgagtttgagaccagctgggtaatatagtgagaacccctgtatctacaaaaaaacagaaaaattagcctggtgtagtggcgtatacctgtagtcttagctagtagggagcctgaggcaggaggattacttgagcccaggagttggaggttacaaggagctatgatcatgtcattacactccagcctgatgtgatagagcaagaccctgtctttaaaaaacaatcctttcaaccccgaaatttcaagatcatatcacctgttggtgagactatgaagaaacttgcttaactggggcagaaaagatgtgttgtgggaaataacttggtgtaatatagtagggaattctggatggtcctgaaaaccaggcctagaacttcatatttgatttcatagaaataaagagccactaaaaatattttagggaaagaccattacgacagtagcagtgttaagaaagattaacctggcaataatattcaatccaagaaactttttttttttttttctttgagacagggtctcactctgtcgcccaggctagagcacaatggcatgattacaccccaaactcctgggcttaagcgatcctcccgccttagcctcctgagtagctaggacgacaagcatgtgccactatgcccagctaattttttttttttttttttatgtagaggtagggtcttgctatgttacccaggctggtcttgaactcctggccccaagcaatcctcctgtctctacctcccgacaagaaaacattttaaaattcacattatattctctagctttgtgctgaacctctgaaatataagatgaaacagaaactggccctgccttgaaggaatttacagtagtgtggggtgggaagcatgttcatgtagagatataaagagatataaagaattaagtgccaattggaagtgaagtttttcttcggagtaattaattctaactgcaggttaggcgtaaggggataaaggcttctcagagaaggtatcattttagctgactcttgaatcaggatttttagtagataaagagattgggaaagaagcctgttacatgttaagggactagaattaacaaaaacacagagatgaaagagtggtttccttattttggtgaatgataaataatgtcatgtaaatggtacagagactttgatgaagtgttaagttggctgtcttatggatgctgtactaagaagtttgggtttatcctgttattgccaaaaagctataaaaggcttttgaacaggaaagtaacctttttagaatgatgattctaatggccgggcatggtggcttacgcctgtaatcccaggactttgggaggccgaggtgggtggatcacttgaggttaggagttcgaggctagcctggccaacatggtgaaactctgtctctactaaaaacacacacacacacacacacacacacacacacacaaaattagctgggcatggtggcgcatgcctgtaatcccagctactcgggaggctgaggcaggagaatcacttgaacccaggaggcagaagttgtaatgagccgaggtcgccactgtcctccagcctgggtgacagaacgagactctgtttcaaaaaaaaaaaaagaatgatgattgccactctagtgtatagaatatatcatttggatttaggcaaggatgtcaatgtcagaaggctgtctcaatagtaatagcactggtaagaggtgttgtgggtctggactagagtagaagcagtggaaatgcaaaagtagggtcagatgtattaaaatagatgattcaaagaaaaagtttatagactgaaaattagctagatatgttcaaagaaaaaaaaggaatgagtaaaaactgactctgaggatttaagtctaggataaaaagaaaagttgggaggaaaagagctgacctagaaatgagtggagatggtaaaagagtgctttaaatttagatgtgttgattttgagacagtttaagcttatcacctgaatacttttttaatataattactttcttttttattcgcccagtttggttgtggaaacattttatccaaaatgcatccctgaggtctaatgcaggagctttagcagtatttcctttattgaccttttcctacccaaatctctgttactgtatctgcaggtgttacagcccaaatgcatctagtttggagttaaattcaaagttgacagggagactttcattctgccctttcaattctaagctagtaagcactgagctaagaaataaatatttgagttaatataaaaggtaacaagttgtgcactgggctaagaaataaatatttgagttaatataaaaggtaacaagttgtgtagaatcttttacaaaaatattttaatatactatagtccccacttattcatagggggtatgttccccagtggatgcctaaaccacagatagttctgaactccatgtatactatgttttttcctatggacacatacctatgataaagtttaatttataaattagtcatagtaagagattaacaacaataagaataaaatagaacagttataactatactgtaataaaagttacatgaatatgctctctcaaaatatcttactgtactgtactcacccttcttatgatgatgtgagacagtaaaatgtctatgtgatgagatgaagtgaggtaaatgacctaggcattgtgacacagcattaggttactactgaccctttgacagcatgctacctgctttaggtgatcctggattattgagccatgaagatgttggtggtgggatgtcaggagcagacaatgtcaatgactcatggtcaagtagcatgtacagtgtggatacactggaccaagggataattcacatcctgggcaggacagagctaccagaaaggtgcacaattgaaaactatttctaaaaatttccattcaatattttaggacctcagttgactgtagtaactgaaattgcgtgagtgaaactgtggataagggaggactactgtaatgctattcatagactattattactcaaggactacaaacacattctgcaatttatttactataatgaaactttccatctgagtattgggaatctgttgttctgagcagtcaagtttgcttagggttggtttaaagttaagcagtagaatataacgttaattacatttgatggaattttccccctaaaatttatttttcacttaacttttctcccatttcttaacattttattatggatttaattaattaattttttattttgacataacttcagatttatagacaagtgaaaagaatagcacaaagaatctccttacaccctttcacatagatttacctaatgttaacatgttaccatatttgtattatatctgcttataaatacatatacacacgcacatacatccatttatgtattattttttctgaacaatttgaaagttacagacgtaatgttccatcccccctaaatgtttcagtgcgtgtttccagaaaaacaaagacattttaataaaaataatcacagtacaaattatcaaaaccaggaaattgaatggataaacaaaactgtggcacatccatacagtagataatactacttggcaataaaaggaaaagaaatactagtatttacaacaacatgagtagatctcagatattttatgctaagtgataaaagccagattcaaaggttacgtacgatataattccatttatatgacattctgaaaatggcacaaattattgagccaacaaatcagtgattttcagtggggagagggttgactattaaggagaatttcaagagaattttgggagtggtggaatttttcattttttaatggcggtgttatacaactgtatgtttttgtcaaaacttacagagctgtataccaaaaagggtaaatttttctgtatgtaaattttaatggtggggaaacaatcaggaaattaatattgatacagtgttattagttcacctacagaacttactaaaaagtttccaattgcctcaacagtgtgtgctatacctctttagtttcctttaatctgaaacaattccttagtctatttcatggccttgacatttcttaggtacaaactagtaactttatggaatgaaatactcatttttgggttagcctgatgttttcttataagtagatttaagttttgtggttttgacaaggatacctcacaagtgatgtgctgttttcagtacatcatattaaaaggcacataatcttaaggtggcatctgctggatttctccactatgaggttactcttttttcattgtaactatcaagtatcttatagaaaaaatattttgagattatgtgaccatcctgttaacttgtcaaactttcactcacttattgtagttttaaattttacttaggtttttgagatggtgtcttgctgtgatgcccagactgctctcaaactcctggactcaggcagtccctctgcctccacctcctgagcagctgggattacacgcatatgccaaagtactaggctcacttgctaattttagcacccaatgatgattcttccttatattaatcacttatccttaaatagaatttattggatataatttagcctgatgatctaggaaaattatgcacatagcttattgggaatcctcatagataaagatgcaaggaataactgtgttgctgagctttcctgggtgatgttggacaggctttgagaactgttgaggtgactacttaggtatacatggctatttcatcattaccccttaccctcaagactgtagacctagtaatctcattcactggcattctgcttctactctttagtattaggagggttcctaatccttgttcctgatatcatgactgtttaatgtccctacctctatttttttgtaacaacattataagttggattttttgtttgatttgatttctcatgatggatggcccagagtaaaagtgttgggttaatctgtattaaaagaacataccaatgtttatgggtttcccccattttttgtttaagagttatttttaacaataccatttaaatattctttgccctagtgggatagaaaggggaaaggaactcctaagaagctctgtgttctatgttaggttagtaacaccctttaagctccctttgtgttttcattctttagacattttcataatacccacccagtggttatccatctaaatctgataaaatagagggtcagtaaaaagaaaattgtgagtatgggctagtcaatactcaggctgttaaggttgagatgactatttttcactttataattcagtatagaggagtttgccagcaattgtgtatcagcccaagtacctgtataataaaaatgtgatttatagtatctttggtatgacaaacttccagcaaaaagtaattaggctccaagttatatgataacatttcaaaaaacataattaattttgaaatacaggatcttacactgaattaaacaggtttagtttatctgatctttttatttatttatttaaaggaggaatttcatgacctgaaagagagttacttgcaaattctaagtttataattggatactggcttaagcttctattatataaggcatttaattttggtatttaaaacattgatctttacatttaaaaaaaaaaagttaaacatacaacttgatgttatggggtaaataaatgttgacctttccctttctttgtttgatactcttacatagcatgtattgccagtcgcctcatttgtcaagctttgtagtcattaattcaattatatccttcctccattttttggtagatgatctccattcctttttttccaaacagggaggaaaagaagttagaactctgaagttcttgagtctctgtccctttctttgtaatatagcatgctttttctttaattttagggacttttacaagggatcatcacaaatgtaaaatatcaagttaaacctcataagatatttctgcccaaaagaaacacattagggtactggcctgtcaggcttactaaaggtgacacacaggtgtcagccacagaggtgaaagggcctcagaatgacacagtacgttttttatctctcagtatctttcaaaatgtaatatctaatagaaaccaaaaaagtgaaatttacatgtaggtttagaacacagtaatgattgtatattaataatttcatgcttgtatgaaaattttcagataaactctcatgttaaaaataatttctgaacctacaaataaactaaccctcctgttagaacgttatgactatatgtaatgtaaggaatatattaactgtaagttttttgttgttgttgttttgagacggaaccttgctctgtcactcaggctggagtgcagtggtgtgatctcggctcactgcaacctcggcctcctgggttcaggcgattctcctgcctcagactctcgagtagctgggattacaggcacccaccaccacacttggctaattttgtatttttagtagagacacagtttcagcatgttggccaggctggtctcaaactcctgacctcagatgatctgcccgccttggcctcccaaagtgctgggattacaagtgtgagccaccgcacctagcacaactgcagggttttaaatattaatgttattaatgttactaatgttgttgctgaaaatggaactcaaataatatgtaatttggattttctgtattttgccttgtagatagtgatttacatatattgactagcagatttttagtacttatgaactcattttcagttggattgttgtttttttccccctcctaagtatataaaaaccccactgacattttagggcctctagctgctgtttgaggtgacagtgccaaggaatggactctaatcctaaactactgagtaaatgtttttttaagtcctatgctacttttatcaaagaaaataaaatcaaatctgagaagagggggaagagaaataactatttttaggacccagacttggagatctgtgccaaccaaacatctactataatcgagagaaggtaataatcatggttttagttgtcatcagctaagtgtgggctggaactttcttgtatccagtgtcaacctgtgtcaaagtgcaagctagagatctaatgaatatgatctcctacacaatgcttaaagatacatgaaatacttcccatctaaatccttacataatttatttatatacatgggcatatgttttcttttacatatgtgtatatctgtatgtatacaaatcttcaagtgaataattgtataaatatatgtatgttctaacttacagaattagaaatgtaattcagtttactcccaaaggataagattgaagataatgagaactgaattaaagcttactttctttcacagaattcctcagagagagaagactgtaataatggcgaaccccctaggaagataataccagagaagaattcacttagacaggtatgaaattcagccttacttaaaataaaaagctaccaacagcaaaacaaaagacaggaggaaacccttgatttgccattctttaagcactggagcttatattaagagtactcggacgttggcctggccatagccatcactttcaatcaggtgacatggttttcccagttatttaaaaaacattctaggtatacatgtacaggacagctggttggcatttttaaaaaagtataaaaacagatctgcctgtaataaagttagcccttttagtatgagcaatattttgtttgctttttctagaagaaaaggccattgttaataataacttaaaaaaacagcagccgggcaaggtggctaacgcctataatcccaccactttgggaggctgaggcaggcgaatacctgaagtcgggagttcgagaccagcctgaccaacatggagaaacccagtctctactaaaaatacaaaaatttgctgggcatgctggcgcatgcctgtaatcccagctactcaggaggctgaggcaggagaatcacttgaaccccagaggcagaggttgcggtgagctgagattgcgccattgcactccagcctgggcaacaagagcaaaactccgtctcaaaaaaaaaaaaaaaaaatagctcaccactgtgccccaatagaaggtaacacattttacttgtgaaagttcaataccattgtgttcttgtaaaaattagaatgtccttggcaaaaacaagaaacgcaagttcttatgatgttgccagagaataagtgtgccacctattcatttttatttttattattttattttatttttatttttgagacaaagcctcactctgtcgcccaggctggagtgcagtggcgtgatctcggctcactgcaacctctgccttctgggttcaagcgattctcctgcctcagcctcctgagtagctggaattacaggtgcctgccaccatgcctggctaatttttgtattttggggtttttttttttttgagacacagtcttgctctatcgcccaggctggagtgcagtggtgtgatcttggctcaccacaacctccacctccagggttcaagcgactcttctgcctcagcctcctgcgtaactgggactacaggtgcccactaccacaccgggctaatttttgtatttttagtagaaacggggtttcaccatgttggccaggctggtcgcaaactcttgaccttgtgatctgcccacctaagcctcccaaagtgctgggattacaggcatgagccactgttcccgacctaatttttgtatttttagtagagacagggtttcaccatgttggccaggctgttctcagacccctgacctcaggtgatctgcccagcttggcctcccaaagtgctgggattacagacatgagccaccacacctggccctgtattcatttttaatataaaattggatacaatgagcctgagcagcagtaaaaataattctaatttacttggatttatagcattgttctaggaaataggagatctaatatttgttgagcacccaccgtgaacatgatgcttatttgatttaaccctcacaataaccctgtaaagtttttagatatgatgtgacttccaatttatagatgaagaaaatggagggttagagaggttagatgacttgtctagctaattagtgatttgatactcagatctcagtgtttccaaagcgtttctacttgtgccttctgacttcagtttatatatagtgtttagagggaaagtacttgaaactgtgacacattcattttttaatttactatatgttaaatgttttttggatgaacacttcttttttttataaaaataattgtttagtaaatagaattgaatcatccaggaagctttaaaaaaaaaaacaaacaaaaatccacaaatgatcagtaattgatgttgagacagttacaattttaactgtttggagaatcaacacctgatctgttcatctaaaccaataggacaatactgaataagataaattgggaagtaggaacactctgcccactatacagaaacaactgtcggaaaacaatgacacaacaaaagttttggcaactttatttaagctaacaaacgaattttctctctgcaaagttataaattaattttaataggctgatccagatggtccatttggaaaatggataggctgatctgttgaaaattaaactaaatttatctctctcatacttcaaactgaagcaagagagagaatcatgcctattaagtccagcacatacagatggaccagcaggtcacacatgggactaatctgattcattttaaaaataaatgcatacattattgaatcattttctacttgcaagatctgttgtgtgcaatattcgaaagagatttaatgttgtttttttcattgccgttttagcaggttctcttccccactccccctgcccactttaatttaacaaccttcccccccaccccccccatggtgctttgaaatgatttttctaatatctgtcattcagtgttgagatccaagctctggagattaattaggtcatgaggctttttctcctcccttctttgtaaagggttttatctccattctctttgtgaagagcatgaactcaatgttcttggaaagagaaatggcctttagaaacagggaagtaggagatcctcctggggccctcagagtcttttagcttctgggtgttttagcagccccatgaatgcagatttgtaaatttattgcagtgccatctggttttttgctcgaaccagattactgttggcttgtgtctgtctattgtggtggtcactccctaggagcttgccctctctatcttagggaagagtgatgaatagcaggggtcaatagaagcgggtcacagggcagctgtccaggactgccctgaacttgattaccccattgctgattttttttaaggtaggacatagtatataagctgtttaaactccctcttttctctattgcatatgacaataatgaagtgccatttgctattttgtttttttgtttttgttttgttttgtttttcctgtagtcaacttctgtagacaaaaagatgtcaaggccgccttatacctagtattgatacaagtaggatttgcatctcattaacttgagattcttttgcagatatttctaatgggatttcagaaactcactattgattataaaaagttcagttatcttctagcaatttaacattgtttttaactaatattatagttgacatatattattcaaaaatagcgttttgccattgttgataggacataactactgcatgttaatttggagagctatttaaatattggaggagcaaacaactttataccaaaaatttggcaagttgaacaaattccttgaaaaatacaacttaccaaaactcttaacacagggtgaagcaaaatttgaatagcctgatgtctattaaataaatttaattaatcatcagaagggacatgtggttttactggtgaattcaacaaatatttaaggaagaaatgatacgaattttatgccagaccctttcacagaatagagaaggaaagaacactccttgacttaaaaatccaccataacagtaattccaaaacccgacaaagatattaccagaacaagaaataatgaaggtggaaattaagagacactgttccctgtgtctgtcaccaagtcattttgtatacctgctttttcgtttcatttccagcatctgaagatggaagagtttggggtagggagaggaagtagagcagtgtatccttgtaaagaaagttaattttcttagtttcagaataatctcatttcttggcattaaatatgaacttttatttaaaggatgtacaaaatagctacaatttttgttttactcctaaaaatgtgaagtcaaggaaaggatagccactgttttcctaccttttattcctatctgcaatcaagggcaaaggcctgggaggatacatgaaagtactcattactttttgaaaattgtggcattacaacgttcaactctttgcttctcattggtgctaataggatctgtcagccctgcctttctctgtaattgagtaaattgtgaccgttgtctaatccctctcccatcccccatttcctttgtgtatgtgtccacttaccatcctgagaacgtgggcagtgataaataaagcattgagtagagctctctcaactctctgaaagcagcatgatgccagccctctagttatatttctttaagtgtttaggtttttctgtattctttctcttgtgtagctggaaccctggggatgcaaagccatgagagaggccaagaagctaacaaagtagctgtctcccttgttagcttgttcctttattctttaaaaacaagataaaaaccatctggctcagggcattacattttcctcccccatgcacctctatagatggagacttcacctgcagtgagggtttacattgattagggagggagcagtaattcaagcttccatcctcttcaaggatactttgcagtctttaaaggtgctgacccactgagttagactgtcaagggaggataaaaaagtatcttcatcccaggaggtaacagctgccaggttttcaacaccttgcacgctgctggaaaaatgtcacaattgtcagctgaaagaaaaatgactgtgttgtcatcttctgttaatgactgggccttataaaaggaactacataagtcttttagaaggaataagtagctgttttccttttctaccatattcccctcccctgaaaaaattcctgcgttctaaacattgccttggagtagatccacaaaaaacagcagtgaagaacttaaatcagccagtataagcatggaagtctgatgggcatagctcctttatacagttggatgagtaggaggaaaaagcacatcactgacacagaaaatgacattatagtgtgtattaacaaaacaaccacaacaacaaaaagtcattcataagccagtgaactgagagaaaacatactgtatttctgttctttggaggacaatttattttcaagcagcatccagatgggtaaataccaagacatttcttttttcaagagagctccttttcttcctttaaaaaaaaaaaaaacacagaatttgcttcctttaatagctctgtaatgttcatatatgatggcattcccttctttctgatttgattgatgagggaaaaaggtttaatgaagtccctgatatcaggcaggcagggttttttttttttttttctctctatttgttttaggttagtcactttaattgtattgagtaattagaaggtacacacagccaagggagctttgttctgataattgctcgagaaaacccattccctatctgccgttgctttgtgttaagacacttctccctctagtggcaatagtaagcactttggcttggcagtaggcaaggtgtaattgcaatatgacaaactatgcttaagggactgtcttgtaaatactttcgtttggggtttgcattatttcattatatatgtgtggttggttgttgttggttttttttactctataaaacttgctacctctttttgccctcctaaagtgctttgggctttgggtaaaaaaaaaattgcctgagatgtttattaataaaaaaaatcacaatgcattctgggtaatgttttgcagcttgacttaattttagtcatctgttttaattacctatttataaaaatgcctttgcatttgtagacattatttaatactttggaagaagcacctcatttgaaataaataaataaattgtacttattttaaatagtccatgtaaaagatcttaaaggtaattaatgtaggtctcttaagtaagacaaaagtgatctttccaaatctgacgaagtgatttgtttatataacttcccacttctgttgaatcctttagagtctaataacttttttaagaaaacacggtttggcaatttgtgcctagctacaaaaacccttcttcaaaaaggagcaatttaataaccggctttcttaaaattactttgaggaaggaagaccgtatggggggttggtgctttgttttatttgtattttaatgtaatcattctttgataaattgtgtaatcactgacttagtaggaaaaatattattgaactcctgggttgcaatgaccataaagagtgtattttcatatagagagttgtgatactgggaataaattataaaggaaacagtttatatgctggtcaaagtccatatgggcccaattcattttgttttcagtgcttactctggatgtaccattaaaaaaggcggggggtggggtgggaggaagcctgttgtgctcatctgcatgagccctaaaaaaaaaatctgccctaaaaacaacacggaatgatagcagatgcagctttgcatctattgaacaagattcagtagcatctgtgtggcatttttaaaacccacttccagcttccttagatattgctttttggtttgctttttctataccatattcttgtgtgggacatgatttgatgttaccatgtatctggaagtccctgtcttcctatacccccactcccagtcactaacgattttcattatactatatcttgttatgctatagggctgctgaacagatttctaagcagctttttgcaaggttaaaacaatgcagcccagtaacaagtttgtgtaattttaaatatataccttctagtaaataagggcaagtctggcaatcaatcccttttagtgtgttatatgtttcacctgacaactaaaccttctattgattagccattactttgttagataatcctatgtcattgaatccattgtaaaaaattaaactctttaaaatgttttaccctagcagcagtgtgaaaattgaaaacttgttcagaattacagcctgctttcacaaagaaggtagttttcagcaaggcatcttactagtttatgcttatgtgctttatatgcgatataaaaacgtattaaagtactccaacgcaaaactctctgcctctggttcagcaatgaagctaccttttcaagtgttgcatggggacagaacctatcttgcctgtggctattatattcactagttggatttcaaactggagagagtcttacaggaaaatattgaatggaaaatattgaatgttttagccttttaattgcagagtggtaaaggaactatgacaaattttagtttattgatctgtgttacttccttgggagatcagcaaagtcatttacccattttacagatggaatgtctagaaaataaagtcctatatatagccctactctggaaactccctcaggcctggcacagagtttctgaatctatctaatggtcccctaaatatgttattacatattcattcatgaagggaaaagagggtaattttgaaggaaaataaattttctttttataacttagtattttcagaaaaatagcatgatacatttattgatgactggacaaacctctgtaaaaaatttactcctaagatacttctattggaagttttcatacagtgaattttacagatattaattgtataagtctgaatttttgataaatctaaccacctgtgtaaccaccaccctaattaaactatagaatattttcataacctaggaatgtctcttgttctcctttctacttattttctgcaccaccaatggatcaaatactgatcagcttactgtcactgtaattttgccttttctagaattttgtgtaatggaatgctatatttttggggtctgacattcactttgcataatgtttgtgagattcctctatgttgctgtgtatatcagtagtttattctctttcattgagttgaataaatatatcgcagtttgttttctgtctccttttggtggatatctgagccatttccatcattataagtgaagttactatgaacgttcttctataaaggtttttggtgagcatatgttaagtactttttcatgtgcttattggttattcagacattttctttgtgaagtatcttttaagtttttagccatttttaaaaattgcattgtttgcctttttattattgagttgtagactcaactgtattgaattctggataccattcatttgtcagatatatgtactctgattatatctcacagtctatggtttgcctgtttatggtatgttttgatgagaagtttctaatagttggatgaaatccagtttaccaatttttctttctttttttttttttttttttttgagacggagtctcgctgtgtcgcccaggctggagtgcagtgacacaatctcggctcactgcaacctctgcctcccaggttcaagcaattcttgtgcctcagcctcctgagtagatgggattacaggcatgcgccaccacatgctaatttttgtatttttagtagagacggggtttcaccatgttggctaggctggtctcgaactccagacctcaggtgatccgaccgcctcagcctcccaaagtgctgggattacaggcgcgagccaccgcgcctagccggttttttcttttagaagggatacttcctttggtcctacctaagaaatctttgtctaccccatgattgtgaagatattcttctaagttttcttctgggagctttataagtttactatttatacttaattctatgatccatctcaaattaattcttatacgtgccatgaagtagagtttgggcttcattatttttgccgtaatttcattcagttgtttcagcaccattgttgaaaagactttcttttcccccattgaattacatgaattcatttgtccaaaccatttagttatataagagttatattctcaaacctcctgaagaaaacgttgctgctggacccagagcagtgggtgacagtgcctaaggtactgacccatccctattttatgtccctgtagacaaggcggacaagaaaaatgataggtgtctatccttgcaccaaataccatagtgtcttgattattgtcattttatataatgggccatgaaatcaggtagtgtgagttctctagatttgttgttttattttttgttattccagatagttcacatttctatataaattttagaatcaaccttgcactttctattaaaaagcagtctgtgaggggctgggtgtggtggctccctcctgtaatcccaacactttgggaggccgaagtgggaggatcgctggagcccactgagttggaggctacagtgagttatgatcacaccactgcactccagcctgggcaacagaaagagaaactatctccaaaaatagacagacagatagataactactttttttttcatctgagatatataggattttgcccccgttattctgttaatacgacaaattaccttgatttttgttaagagtttttgtgtctgtttcatgtgaggtactggtttgcagttttcttttttaagtgtttgccaggttttggtatcagagttatgctggtcttataaaatgaattgggaaatcttcctcccatcctcctctgttttctaaaagcacttgtgtataatcctggtggtgtttcttccttcagatttcatagaattc

SEQ ID NO: 69 - DNA, 190882 bp, Homo sapiens
gaattcaggagagatgttgtattttattccttaagaatgcttacaagtctactgaattttaccatgtacaaagtgaaatgttaaaatggaacaatacaggaaaattaggcattattcattatatatatggaaaacttaattttacatttgagattttagaggaatatggattatcgaattgaatatacattaacattcaaattctattacaaaacaataccataaggaaaattatcctgtgacagaaatgcttctcattctgtagctgataccctctctattgtatatgaataatttctgtgtagcacaatttctgtataataaatgtagttattttttatgtatatgttaacatttgacttgtatttatcccagctacacccttcaccttaggggtttgcagggaatgacaaatcaaacatgtttttgtttgtttgtgcagaaatgttttgttctcctaataaaatgaattattgtttattatggaatatgtacattatttggtaaatatataaacaagagtatcacccatatgccttccactttaagataattattgctagattaacatgttagtgtcctttgatctgaaatgacttatccatccatgtgtgcctgtgcgtgcacacacacacacgcccaaataatggtttcatttttaagtattttattacatttaattaaattatgagatatacagttaaaacatttaatattcattgtagaaaatagaagtagaaagaaggaaggattttaaatgtcctcccagagattaccgtttcagtgatactagtaatttctgaatttcacctatatcatattgctcaaattctacattcatcatctggtaatactgattttggtcactgtttatctcatagatagctgctcacatgtttttgaattgaacaaagtttgaatttggcttatatctgaccaccacctccctctcatgtaattgttagtcatttcaaattttgcagttccccaaaggtgcagtgtgttcttttatatatctgtgtctttgcatataccgttctgcttacctgaaaaaacccctccacaaacacctattgtcccttacccactctctgcctttgtctacctaatcttcaagattcagctcaagctgagctagaattaaagtcttccctgatctttatctttgctctcttaaactagtcagaggatctgtacccagagcatgcatggaattctgtgccctgtaaaattgacatgaagaaaaggagtattcattttcgtacttgattctttaacaaaaaattcctgattgggtctaactttttacgtgtgttggattagatggtcatatacagaagggaaagaatagcaatataagtcttctcacgtctgtaatcccagcactttgggaggccaaggagggcagatcacaaagtcaggagattgagaccatcctggctaatgcggtgaaaccccgtctttactaaaaatacaaaaattagccgggcgtggtggtgggcgcctgtagtcccagctcctcgggaggctgaggcaggagaatggcatgaacccgggaggcagagcttgcagtgagccgagatcgcgccactacactccagcctgggcgacagagcgagactgcctcaaaaaaaaaaaaaaaaaaaaaaaaaaaagtcttctcattagcaatataagtaatctaattttatgtttttatgtctcacacatacacatacatatatactacattgtgtcaaattagtaagtacaaaacttttgtgtatgaatttcagttttctatttaaaagaaagtacataattagttttaccaaaatatagttgctactgttcattgtagtttctaccctttatatgagccattgtttgggggagtacttgttttgttactggtaataaactacaagggaaatttgtaatataatattagtatatttcccctagatttttaaaaagcaggtcattatttttttaagcacttcaactgcagcacagtgcaatcttttggggagaattggtaaaatgaggataaaattagtacaggattccagcagcttgaaaataacacaatatttgaccaaaatctcttttgtattccctactctggttcaattccagtagtcctggaaatgtgcctatggactatttacagtgagattataaaactgaatcatgattttggtgaatagaagccagagcatgtggctacagcaccccagctggcagtaagctctccctaggtttatgaatgtagttagatggtccccaactgtttacaagacagcagaggtgagatatttgattgacaagtcagaaatgcattagatcattctctctgccagtctctggttcatgctgttaaaaatgtcagcctccaagtttgaatggcagcctgagggccttagaagctttttgttttctgagatggaaacacaaattggatgtgtgcctgagcgcttcatcctgggctgtaatttcatcttttagctaagaaccacaaggtacacgagcaaagcaccctgtaaacaataatactgtggaaaaaaaataaacaaggtcgtgtttctggtacgttgatccgatggtgtcctgacctctatcacgttgaacatctccactctgattgctgttccctttggcattacaatgagagaaagagagactgacatactatgaagaaaagatttaaagttgcagtatcgttgcacattccttgtattggctatgaaatattgaactgtcagaatgtgacacttggttttttaagcaacctttcttgtttgaggtgtttgcagttcattcctttctcccccatttgtctgctttcattgatagggttggaagtagttgccttaaatgcatgaaaagggacagtgttaaagagaagtggtgctgatggagccaaacaaacttaacactagaaaataaatgcaggctgtggggcaaaggagataaagttgggttagtgtattattaatagtggaatttatggaacaccctattgtaaggaagaatcaggttaggtcccatttctgtttttgtggaggcaggaagttgggaaggtggtattgggtaaagagatgcagtgacatagtttgttaaactgatagcctactatatggcagtattgccaggccaatcagaattcacccagctattttatttattgctcttattatccagtgtctttaacaagtggtgaaattatagaagactttaaaatttggggaagaaaaatatttttttaatgtggaaaatgtgtatttatagtaagaaagctcattaggtaatatggaagaaacattatgcttatattagtccagcttatgccaaatgaatagaaaatcttccttataaaaccaccatatatttcttggaaaatattttgtagtaataaaatgagttttctattatgttttaaattacatcttttttttcaagctatgagtaggagtttataaattacaatacatcttaaaacaacatatatattttttcttctaaggaagcactattgatgtatgctttcattttcatcccttttggggcattgaatttacaagtaaagttttaactgagaatgaatggccttttgcagttcttctggagtatggaaaagagtttgtattgaaagttcctcaatggctgggcactgtggctcatacctataatctcaatactttgggaagctgaggtgggtggatcacttgagctcagaaattcgagaccagcctgggaaacatggtgaaaccccatctttaccaaaaatacaaaaaattagccagtcatggtggtgccagtctgtggtcccagctactcgggaggctgaggtgggaggatcgcttaagccttggaggtggtggttgcagtgagccgaaatcatatcactacactccagcctgggttgacagagtgagactccatctaaaaaagaaaaaaaaaggcaactatttagcttagccctctcctctgaaaatgtgaaaggcaagagctgttctgcatcagtctagtgaaatgcactggaaaaatggtgttggtaattcctgctttgaggtcatgctagaaagagagaagataatacttgtaaaatataagtcctgctcctttgtagccagatttttgtccttacttaaaaatattgtgctcagaaagtaataccaaaaggagggatattaagaactagttattgttgtttttaagtattgctctgaatttttaaagcataaacattgatgtagatttgcatttaagctatgagaacccactgtcttgactcagtgggggagttttcaaaaatcattcttgtagaaattgatttctcattggctgatttctacaggatgaatgaaaacaaaccattttttgcagtcttagaagaataagaggaatgcaagtgtttaagaaatgagactgaaatatgctttatggagttttctaaatctggtacaaagaaactacaaaatttcttcttatgtattatgcatcaatacagtgaaaatgcctcacagcttatgggctttttacaaccacaccttcacaattaatgattagctttattatttaaactccaggcttgcctcatgagcaaacatcagtgtattcatagaaccatagaatttcagcattggaccagacatcagaggccatctagtcacatacgtctcataatgtagaaatcctttatgaaatgtgtttggaagggagtcatctaatctctccctgatcactaccattattggtgaatcaaacttcttgaagcatcttgcttttactttgttggttctactagaaagttttttcttggccgggcgtggtggctcatgcctataatcccagcactgtgggaggctgaggcgggcggattgcctgagctcacgaatttgagaccagcctgggtagcatggtgaaacccagtcactactaaaaatccaaaaaattagccaggcgtggtagtacatgcctgtgatcccagctgcttgggaggctaaggcacgcgaatcgcttgaacctgggaggcggagatagcagtcagccgagatcacacccactgcactgcagcctgggtgacagagtgagactgtctcaaaaaaaaaaaaaaaaaaaaagtgtaataagtcagaatacaatgtagacacgtcttgttttgaacacaatttaaataatgtaatttaattactgcctaagattgcatatacttctttgatttgaatgatggaaaaatttctaggaacttagcctgggtttgtttcctcatcttttctttgaagccagaaaagcatagaaaagcatatgtaagcactttgacaaatgacataatgtagcggcatatcagagtggcacaggtattttaaacctagctccagttcctgaagatggtgaacatctgcttagaggtactgtagagctccacaatgcactaattgaattactcttttctggagttgcgactgcactaattgaattagaatctctctctctctctctctctgtctctgtgtgtatgtgtgtgtgtgtgtgtgtgtgtaaatgagataattccaaccttaacgggagagactatgagagacatgactgatggtgtgtactgtgctgctatctaatggcagcctatggaactactacgtggtctccagggaagagaaaatacagcgtgacctcagtctaaccccatccagtttagttcagaaggtcccaggatgtaattttgtaattctaaattgaaaaggaaagaatgtgataaatttctgtattaaaaattaagatatattttattaggcataaagtttttaagtactaagttacaaatattcaactgaattaaaaatttcctttaactggtgaaaaaaaatcgagttggtgggtcatcttttttctcattttgtccttcagtgacataaacgtaaaaaggaattaacgtttttgaaatgtcttagcatcatagaaaggataaatgatacagggcttgttcatatttttaaatacaatttttttcctggttgttagaaataaggtgttaccagattttgcttgtatgtgattatgcttatattaattatagcagtatcaaagtaagttgtacagatctcacttgctcttttttttttttttttttttgagacggagtctcgctctgtcacccagggtggtgccatctcggctcactgcaagctctgcctctcgggttcacaccattcccctgcctcagcctctcgagtagctgggactacaggcacccgccaccatgcccggctaatttttttgtatttttagtagagacggggtttcaccatgttagccaggatggtctggatctcctgacctcgtgatccgcctgcctcggcctcccaaagtgctgggattacgagcatgagccaccgtgcctggcctctgttgttctacttaatagtttaaaaattaagtttaccacaaatttgggcaagttttaaaccctcctaagtgaagtcagttattttgttcctttaaaagaaaaaaagaatcttagtcacaatttactgatttttgtaaaacatgcaaatgtagtcctgcgcaacattaaaagcaaataaatacactgaggacaactcaacatgaaatatattttgattcagtttaactctaggcattctaacttgtaaaaatggcccttaacagaaaaatacatatgtataatcacttgatttatagaatgtgtatgtgtgcatacaaaaccacttcagtaaaagtgctgttggttaccattctgagcatttaaaacgatcactttccatttgatcatattaaagatatagaaacaagtatatagcatagaaaagttttaatttcttctatgtaatcttcattattaaaatatgtttgaatatgccattattttgtaggctaatttgttcttcattgtgagattgaggtacttagatttcttgtatgaatagctctcactaaaatgactataatttgtactttttatattgtccttagggacattttactgatttagaaaatccttttgacatcaagtagatgtaaggctttacaaataacatggccattcacaactagccacaactccgattcgattcacagagtaccttttatttgccaattactgtacaaagtcttaggcataaattaagattcagaacctatcctcaaggagcttatagttatttgttatacatgtattaagtacttatataccagtcactgtgcatataattactagtgttaaccattagtcatatgtatttttttctgatttattgagctagaggtctggcttagtagcagtcctaaggaaatggtatacttatgttcatatcagatatatctcatctcagcaaaaaagtgataatgtatatttcagactagtctgtgtcttaaatggttttctcttgcctttacataccttctaagggaacagtgatgtttgtgatagctgtacatgtagcttaaaaagagatgataatatttgttacaatgcctcctactggttgatcatagattttcaatccttgttgtcttcagaactggtagttcccactggtgatttgatagtttggggcttctactgaggctataactgagaaagagtctattgcatacaaggtataaagtgcttctttaaacagtctgtttctagaacctaaattgtcctgggaccagctcttgatataaaaattcatagaaacctgtttttcacagagtgtggtaactccttgccatagtgctgtagtgttaaaattcacattggccaggttgttctgtaaattaaacactgacagctaccctcaggggaacagccaatgtatttatgatgatgtgctgattacacaaaatacactgcaagcagaaaacagctgcagagaataaacctcttaaaaagaatacaattacaaatagcaccctcagtatttctagtggtgagtgtagaatacagcatgctaatgcaagtttcttactagtccgcctgaaaacaaaaaatctgaaggagataaattatggttgaatgcacatgcggtgccagcatagcagtgaacaaatttcctttctcaagagcatggctgtaagtgcacagatttcaggtgtggagtagtctaaccaccctccctcattttgttaggttttattagtggttttctcatatatagtagggcatggccttgaggttataggggctctagacatttgaaagatattacacaatgaatggggcaggagggtaactaaattgtggttacaaatttctggtagaaactcgatatgttagggtttagttatcgacatttcatttgaagatacgactatatattttcagtgttattaatggcattgaagatggtgcccttggaattaataaaaggagtcatgactctctggtaagatctttctgatttcttagattctgtttttcaagaataatggtgttttaggacattggaatagctgattgtatatttgtaggagtatcagctctcaaatatgtcccttttcattcctgcatcttactggtcacatgcatacaggtaagaagattagaaaaaaaattttgttttccctatttgagattctctctgttagagcttagggtcagtatctataaaatatatttcaactgctgagcatgctagcttctgtttaaatcagtagaaaatatgttgatctttcaagacataaatttactcaagccaactgtaaggtatagcgcagggacatagtgattggagacagttcacttcacccgcctgaaactaagaatcaactcttcagtgtatggatcactggtatgtaataatcgactattatcggtctgtctattggtctctttttaaatcagtttggaacctcctggagttattttcttgctctactgacatcaatcccatgtggcagaggagttgtgtataatcgctttggtttaatcaatagaataattgataaaccagataagatttaaactgattatagccccagcagaattccccagaggccttggactctcttaattttgacatgtgtgttgtgtaccctgaggatgaagtgcagtttgaattatctgcttttatttgcttaatgacggggagggtgttaaagtcaaatgtttaattaacccagcaatgggctgcgttgtcacttacacacagctgattgagatatctcatggagaatactgaataggaatgataatgtggcactgggacggaagattgctttttcaatccatttgctgggtcactgctttgaatgtcttattggatgaaaggcattcagcctggagaaaaaattcagcatttaagtacattttgttctcttccccccccacccccccaaccccctccgtgctcagaagttaactaaaacagatatgttctaggtttattaagccatccatgtactagtaagagatcaggatagccagtagcctcaagctacataatttcctgtggaaacggaaaaatcctactagcctctaaggtattctaaatgtgagctcttttgtccctcacatcctgtgtcccttgccattattgtgaggttgtctttggttacttgtctcttgcctttttctgtagtgtttgctagatgtgcagctacctctagggccaaaggcagaccttttcctcccaaagaagcaaattatccagtacattttttgctatttgatatacctggcttctatttggttgtaattgtgactaagaattataatgagactgttgaactattcagagagatgaaaatttgaggcattacaaattcttgcttttttggctactgctattgtaaaaacagttgatgctgtgtatatttcattttgttgagaggcactttgctttctatatggactaaaaaattaggccaggaaagattgcaatattcaacaccatcaaaaatgaagtctaggcaactggagttttaatgacttgctgcccacaaaatatccctgactagctttataatggaatgtaaaaactcattgaaggcatatgagcaaaactttaaaaaaaattaaccatgactttccttctctgtagttcttatgtttcttccctctatcccccaaagatctaaaccaggaatttactaatttttttctttgctttagtcatttgtattccagagagcacaatagggagaaggatacaagattgatttttttatgtgtgtcctcttgaaagcagagtctggggcatgaatactgtggggggtggtgggggggccggttacaaagcaatagaagcatgcagctagtgttcgcgtgcaggttggactttttgcgggtcaaggcagaccagacgagtagcttatcttgagggacgcaagtaatagaccaaatatagagcagctatttcaggaatcatgtaggtcatttaattatccattatgattgagtggctaatgctcttttggcaattacatgacctctgttattcttgaaacctatccaggccctcgtgggtcaagtgacccacaagtcagtgctctcagacttgattccactcagaaagaaaggagatgttgggaaccactggcatttagaaatggccatgttttctttactgaccactacccagaatgtcctttgtacagcagtgataggcaactggttttgaagtcaactattccttcattgtatataggagcaaaagatgcattatacattggtttccacaagagggtattttggcaggagatactttaataccacaattagctattatggtattcactaattctgtactgtaagaacaactactatgatattaaaattaatgtttgatatctgtcaaaccaattatctattaccaaactctgtagtggtattttccattccataacgcaacaagtgctattgatgatagctaataacagatattagtatattattaattactaatagtaattatagtaacagattagtaataataacaaaatgccattgatgatagctaataacagattttaaaatatcattcattaaaattagcctaatttgaatttcagtgctacaacgattattaaattaaaaggccactttaaaattaggttctggtcaaagacagaataagttggaaacatcttgattgtttatcactttttttctttaatcaaccaagtattattaatatttccaaaaaaaaccaatttctgctaaatgatagtaaaattttctataattcagtgacttgtggggtaattttgagaacagaaaatgtacatttcttgtgattctttaaatcgaagatagttacggtgtggaaagcaatggcagcataatcaaattaattgtaggatttgtcagaaatgcacaaaattctgcatagttagcaaagtggtagattagaggtatacagccattctctagcattccagtaacttaagaccttaggcttaagagaaataattttggtattctttaagtagaaactatttgcattgctatagaaaaaggcagttccttctattggagaaaaaacatcttttaaaaatttgttacttacacatcaaagagcattgctttaaaacaacaacaacaacaaaaactcaacaaggttgtttatccctggagcagtaaaattagccatccttcccaataaatttattaaattacccctggtagaactccaagctaatctgttttggttttattttcattttgttgtttggtgatgttaacaaatgaaaaattgaagacatgaattggtgtgtataacctttgacccttcagaaatagaagacttctcactcaaattttaaatccttaagccaatactaccttagggtctggctacttagagacccatgagaatgcagttaatctgagttatatttgctgttttctgtttaaaaacatattttctctcattctagttttttcatttctgtggtggagatgaacagaaaatggaaagcaggatttacagcagaagttacagattaaactcaagtatcccaaataaggagtataattagtctgcttaccattttaagaggaaagcaagggatataatgtatggtgtataattttttttttctccctatatattacttttctttaaggcatacccttcaatatctatgctgagacatgtttttcagccttgggaaccaaaaatttatagaaataagtgagaggaatggtatttgtaattttaaagacccgaagagacattaaggcagtatcattagttgggaaggacacagtataataataagcctatataataatttcttaattaggaaaaaaaataatgattaaacaagaccagtccatattagagacatacacctaaacacagatcttaatctagcccagtctagctttcagaaatgtagtttatttacttgggatggttttacgtctcgggatattagcttttatcaagtttaaaggaatcttaaatttctttcaagatattgttgaattgtaataaaatggtaataccaaagcaaggaagatatccaaggggatgaaagtcatttagcaaaaagaaacaaaaaaccaggaaacaaggatgacagaaaaaaaaaattcatcagagagaaagaattttgtcatacgtcctaagggttctatagttctcagtcctattttgataaaaaaactacttaagaaaatctacagaggtcgagttacaaaaataaccagatgtccttattagtggaagcaaatgtttgcctcttaatttacacaaaactatatgcagaggatctctggatgaaatatttttgtaaatatggcagcaaagaaaatcatggcacaaaaaaatctgtccaaaacacataatcgtgaaggtaatgtcttaaagaggaaagcagttttttaaaagattcctatagatttaaaggtaaaaggtaagttaagctagttatattttggtttacatgatacgtattcttggctttttattatgtatgtctttctatctgaaatccccctggtgaattttaattcattttgccttgcgtatttctctactttgtacattgttgttgcattttgaacagtgtaaacgtatgtgtggattgcttttttttttccctgaaagaatggttgtccttttagttccatcacgaaaaacacaacctacagtggtataagatgcctgctttgcaagcctgtttgggattttaaaatattaacccacattttaataagtagatgtagttttgtaattgcattcgtacattaagcaggataaaaatgtaaaaaaaaaaaactacttgaaagggtaaggtaggaagtgtttttttttgtttgtttttaaattaaggctttagagccaaaaaaaaaaacctgtaaagtttaaatggactattacttctgatgtggagcatattagcataattacaaactcttttatatactcatagtcattgctaagttgatgttcaaacctttgattaagaagtcacaaagctgactgtgttcagacagctgtgtaatatcgctcctattcacaaaacagataactgttttagccccctcccttttttggtccccatatttattgctacaaatttgtctttctcctatagctagacttttaattaatggtgaaacattaaaatgttgtattgtgatattttcggtgacttgaaagttaagagaaagcagcactgctcattcatgcccttgccttgtcactccctggtgcagttcatctcttctatccttcttatcagagtatctcagtgcttagttgagcttgtttatcttaaaagagcaggaggcaggcttttagggaataagctacatgttccagtataacaggcaccaatgctgtttgacttgaaaaacatttgatctcttacattaacagcccatgtcactgtaataggtagtacagccgagttgttcagttttctattattttagctttgaaataactgttagtgctgccccaaaatcttcgtgtataaaattgtatattggctgccccccaggactcgtaagtaaacaaggtgatatgtgtggccagaggggagggtatttgttggctttgttttagataataactgatcctatctaaagatgttttctgtctgatccctgatagtgggtgctgcatgacgttgtgtaaattcgcagacctagcaatattttaaggcagatttctgtttgttattaatatatgtgctcagtaactattaattatgaactttcatttttttctctgataatgaaacatttagtttttatgaagcttaatgtcaaagatcctgcacaatttgcctaagtatagcagtttgcacagcagtttttgaaaatgggcaagcaagaatttaaagggaatgtttgttagacttaaaatattactttatttaaaaataattcagttgtgggtataatttctgtgccaggaatagtttgacagttgtaatcaggtagcagtattaaaagaacagaaaacaaaattcgtataatcaggttgatgttttcttcctctttaagagcacttctccttttaatagtggtagaatggcagcaaataattttaatccttcctttcttccttcctctattttcaagaatctgatttttctcattcttatttttttctgttacagcattaccaggccacccagttactttcttagaatttaacctaaattagatacatcagccagaacaagcataattggttgaaaggcagccatctatctagggagttcttctaaatactgaatgtgtcatgcgctttgacataacatatctgtaatctctgaatacagaaagcactttctgtgttagctgtaggtgttaaagcagtagtgtgttttaagaatgtgtgctgtgcaaattctggcttgtgaggtaatgacaagtgtttgcctgcatagacaatatattttttcccccctgaggtccccacacacctagtttccctcaagctcatcatctctgtcaggttaatcaataggcaccgtatggcagagggtcagtaatcagtgtcatcgtgcctttaaatcgtgttgaaaatttgcttaaagcctgggccaattaacatcgagatgatgaatggatgggaagatgggaagagcctgccgctcaggggctttgtgaggaggagatgctcagctgttgagcagcagacaccagcgaataaaatcagccattcatgtgagctcagtccacccactcttaatgataatgtcaatctagcaaaatatatacacattggagttgtcacgagttcataaatcaaaggagtttgtcaaaggcattcagattaacgaggcagcagcaataacaagtcaaatttgcatagagaattgctcgaatctcagtaaattatgatcctgtttttcatttgattatttgctaatgtctcaagagggagaatgattatattagcatgcaaaatctactccagaagtagaaatctgaggtgtagaagaccagtgcactatgacaattaatcagtttctgcatactagcataaatgcacaaggcccagaaatgaacttcttttttattattatttctctttgctactgatccaaatggttcagcttgacagagactttatattgctttaacagtgttctgaattgtgcctgcaggcaagacatagttatgcagctataaccaacctatccatctgccaaccagattggaattctcctatccaaggcttccattaacccccactgacagctccaaacaggattaagaatttggaagcataaaaaatagttgttctttgcaaatatacacaatccctctgcattttgagaaaggatgcatctgtagtgttatatgattagtgtcggacagtgtggcggggagaaagcctgcttggcagttttttgacttctgtcacagggagtaaggcagtgctaatggaagtcctctttggttgtcccagagaatgttgtccattctatctagttgttagcactgtgcttggaattggtatattactagaaaagagcactccttgaaagccttaactggtgaatctgttgagtttagcagtatagggaggccttgatgtggttgtggtttaatagagtatgtcaaatgataaacatgctggagaagcaatgtgcatgaaaacatgccagagaatatcttaggaggacactttaggtcctccctaaaatgagtccttgaataggattttccgaacagcttctgaacttaaatgacctaagttttccccattgtatcctaaaaggattaattaaaatttgtttaaacacacacacagtgtttttttttaatgtcacctttcatacaagagtttgagtgattttgtccatgtagctaaaatatctgttaaccttgtaaaataataatttctgtttttgtaaattgtaaatttatatttggaagctaaattagctccaagtcacataataagttaatgggaaaaagtattaatccaattactaatttaccattgaagttcactatactgtgtttgcaattagttactagaaatcggtctcaggattttttccttcaggtgggttgtcattctatacgatgatgagcagatgatttcatttttaaaatgtgttcaaaatcagttataatccaccacaatttacctgctttgctaaaatgatagaattatcccagttacagagtccttcaaatcctccaatggtaaattagtgaagtatgtggcattggtgtgaaatgttcgcttgtagctttggagctggttattttatttataacagatgtctcttcaaacaggttcaggctctgttgcaccatccaaccttgagcaagatgcttactcaaagattattgtaagtcattatgagtggcttgacttttcatcactgtgtaaattagtttaattttttatttgattatataatcaactcttaattatccattttatcaggagttgtgtgttcaaatagataactgaaaatagtaaataagccacttactaggtcatggggaatattgccccagctatgaacctgctgtgtgctgccatcaaaacatctttacttcttgaattggacagtcaaaaatacaaacagcctcaaagttaggaatgctttggttaagggttgccaaactttgtctgtaaaggggcagataataaacatttgaggctttgtgggagataggatctttcttgtggccacttacctcttccgttgtagtgtgaaagcagccacagacaaatcgtaaatggatgggcatggctatgggccagttaaactttatttgcaaaaatatgtgtcaggccagagcttgtaagtgctgttaactgatcatactggcattataagtagtgggacagtaggactgcagttgggctgccactgaagttcctctgctattaaaaacaaaacaaaacaaaacttttttttaagctagctggacagtctgggtttagggtttcaattattcattgagcatctgttatctgtatacttacgtaatgtgttagtgggtagagggagctacaaagacttttcccagtaatctttcaatcttactggttagtcgaaagtaacagtgcagacatttatctaattaagtgcctgttgtgtggatcaagattaaaatttagttagggaatttccagtagagtaaggtggagtagttttatggtttcttggagaagatgacagttaaacctcattttaagaatgtgtaagacttgaatagatgagataatcttgtgtttataattgttgagtgaactagactggagttaagaatccttccaggccagactctgtggctcatgcctgtaatcccagcactttgggaaacggaggtgggaggattgcttgaggctgtgagtttgagaccagctgggtaatatagtgagaacccctgtatctacaaaaaaacagaaaaattagcctggtgtagtggcgtatacctgtagtcttagctagtagggagcctgaggcaggaggattacttgagcccaggagttggaggttacaaggagctatgatcatgtcattacactccagcctgatgtgatagagcaagaccctgtctttaaaaaacaatcctttcaaccccgaaatttcaagatcatatcacctgttggtgagactatgaagaaacttgcttaactggggcagaaaagatgtgttgtgggaaataacttggtgtaatatagtagggaattctggatggtcctgaaaaccaggcctagaacttcatatttgatttcatagaaataaagagccactaaaaatattttagggaaagaccattacgacagtagcagtgttaagaaagattaacctggcaataatattcaatccaagaaactttttttttttttttctttgagacagggtctcactctgtcgcccaggctagagcacaatggcatgattacaccccaaactcctgggcttaagcgatcctcccgccttagcctcctgagtagctaggacgacaagcatgtgccactatgcccagctaattttttttttttttttttatgtagaggtagggtcttgctatgttacccaggctggtcttgaactcctggccccaagcaatcctcctgtctctacctcccgacaagaaaacattttaaaattcacattatattctctagctttgtgctgaacctctgaaatataagatgaaacagaaactggccctgccttgaaggaatttacagtagtgtggggtgggaagcatgttcatgtagagatataaagagatataaagaattaagtgccaattggaagtgaagtttttcttcggagtaattaattctaactgcaggttaggcgtaaggggataaaggcttctcagagaaggtatcattttagctgactcttgaatcaggatttttagtagataaagagattgggaaagaagcctgttacatgttaagggactagaattaacaaaaacacagagatgaaagagtggtttccttattttggtgaatgataaataatgtcatgtaaatggtacagagactttgatgaagtgttaagttggctgtcttatggatgctgtactaagaagtttgggtttatcctgttattgccaaaaagctataaaaggcttttgaacaggaaagtaacctttttagaatgatgattctaatggccgggcatggtggcttacgcctgtaatcccaggactttgggaggccgaggtgggtggatcacttgaggttaggagttcgaggctagcctggccaacatggtgaaactctgtctctactaaaaacacacacacacacacacacacacacacacacacaaaattagctgggcatggtggcgcatgcctgtaatcccagctactcgggaggctgaggcaggagaatcacttgaacccaggaggcagaagttgtaatgagccgaggtcgccactgtcctccagcctgggtgacagaacgagactctgtttcaaaaaaaaaaaaagaatgatgattgccactctagtgtatagaatatatcatttggatttaggcaaggatgtcaatgtcagaaggctgtctcaatagtaatagcactggtaagaggtgttgtgggtctggactagagtagaagcagtggaaatgcaaaagtagggtcagatgtattaaaatagatgattcaaagaaaaagtttatagactgaaaattagctagatatgttcaaagaaaaaaaaggaatgagtaaaaactgactctgaggatttaagtctaggataaaaagaaaagttgggaggaaaagagctgacctagaaatgagtggagatggtaaaagagtgctttaaatttagatgtgttgattttgagacagtttaagcttatcacctgaatacttttttaatataattactttcttttttattcgcccagtttggttgtggaaacattttatccaaaatgcatccctgaggtctaatgcaggagctttagcagtatttcctttattgaccttttcctacccaaatctctgttactgtatctgcaggtgttacagcccaaatgcatctagtttggagttaaattcaaagttgacagggagactttcattctgccctttcaattctaagctagtaagcactgagctaagaaataaatatttgagttaatataaaaggtaacaagttgtgcactgggctaagaaataaatatttgagttaatataaaaggtaacaagttgtgtagaatcttttacaaaaatattttaatatactatagtccccacttattcatagggggtatgttccccagtggatgcctaaaccacagatagttctgaactccatgtatactatgttttttcctatggacacatacctatgataaagtttaatttataaattagtcatagtaagagattaacaacaataagaataaaatagaacagttataactatactgtaataaaagttacatgaatatgctctctcaaaatatcttactgtactgtactcacccttcttatgatgatgtgagacagtaaaatgtctatgtgatgagatgaagtgaggtaaatgacctaggcattgtgacacagcattaggttactactgaccctttgacagcatgctacctgctttaggtgatcctggattattgagccatgaagatgttggtggtgggatgtcaggagcagacaatgtcaatgactcatggtcaagtagcatgtacagtgtggatacactggaccaagggataattcacatcctgggcaggacagagctaccagaaaggtgcacaattgaaaactatttctaaaaatttccattcaatattttaggacctcagttgactgtagtaactgaaattgcgtgagtgaaactgtggataagggaggactactgtaatgctattcatagactattattactcaaggactacaaacacattctgcaatttatttactataatgaaactttccatctgagtattgggaatctgttgttctgagcagtcaagtttgcttagggttggtttaaagttaagcagtagaatataacgttaattacatttgatggaattttccccctaaaatttatttttcacttaacttttctcccatttcttaacattttattatggatttaattaattaattttttattttgacataacttcagatttatagacaagtgaaaagaatagcacaaagaatctccttacaccctttcacatagatttacctaatgttaacatgttaccatatttgtattatatctgcttataaatacatatacacacgcacatacatccatttatgtattattttttctgaacaatttgaaagttacagacgtaatgttccatcccccctaaatgtttcagtgcgtgtttccagaaaaacaaagacattttaataaaaataatcacagtacaaattatcaaaaccaggaaattgaatggataaacaaaactgtggcacatccatacagtagataatactacttggcaataaaaggaaaagaaatactagtatttacaacaacatgagtagatctcagatattttatgctaagtgataaaagccagattcaaaggttacgtacgatataattccatttatatgacattctgaaaatggcacaaattattgagccaacaaatcagtgattttcagtggggagagggttgactattaaggagaatttcaagagaattttgggagtggtggaatttttcattttttaatggcggtgttatacaactgtatgtttttgtcaaaacttacagagctgtataccaaaaagggtaaatttttctgtatgtaaattttaatggtggggaaacaatcaggaaattaatattgatacagtgttattagttcacctacagaacttactaaaaagtttccaattgcctcaacagtgtgtgctatacctctttagtttcctttaatctgaaacaattccttagtctatttcatggccttgacatttcttaggtacaaactagtaactttatggaatgaaatactcatttttgggttagcctgatgttttcttataagtagatttaagttttgtggttttgacaaggatacctcacaagtgatgtgctgttttcagtacatcatattaaaaggcacataatcttaaggtggcatctgctggatttctccactatgaggttactcttttttcattgtaactatcaagtatcttatagaaaaaatattttgagattatgtgaccatcctgttaacttgtcaaactttcactcacttattgtagttttaaattttacttaggtttttgagatggtgtcttgctgtgatgcccagactgctctcaaactcctggactcaggcagtccctctgcctccacctcctgagcagctgggattacacgcatatgccaaagtactaggctcacttgctaattttagcacccaatgatgattcttccttatattaatcacttatccttaaatagaatttattggatataatttagcctgatgatctaggaaaattatgcacatagcttattgggaatcctcatagataaagatgcaaggaataactgtgttgctgagctttcctgggtgatgttggacaggctttgagaactgttgaggtgactacttaggtatacatggctatttcatcattaccccttaccctcaagactgtagacctagtaatctcattcactggcattctgcttctactctttagtattaggagggttcctaatccttgttcctgatatcatgactgtttaatgtccctacctctatttttttgtaacaacattataagttggattttttgtttgatttgatttctcatgatggatggcccagagtaaaagtgttgggttaatctgtattaaaagaacataccaatgtttatgggtttcccccattttttgtttaagagttatttttaacaataccatttaaatattctttgccctagtgggatagaaaggggaaaggaactcctaagaagctctgtgttctatgttaggttagtaacaccctttaagctccctttgtgttttcattctttagacattttcataatacccacccagtggttatccatctaaatctgataaaatagagggtcagtaaaaagaaaattgtgagtatgggctagtcaatactcaggctgttaaggttgagatgactatttttcactttataattcagtatagaggagtttgccagcaattgtgtatcagcccaagtacctgtataataaaaatgtgatttatagtatctttggtatgacaaacttccagcaaaaagtaattaggctccaagttatatgataacatttcaaaaaacataattaattttgaaatacaggatcttacactgaattaaacaggtttagtttatctgatctttttatttatttatttaaaggaggaatttcatgacctgaaagagagttacttgcaaattctaagtttataattggatactggcttaagcttctattatataaggcatttaattttggtatttaaaacattgatctttacatttaaaaaaaaaaagttaaacatacaacttgatgttatggggtaaataaatgttgacctttccctttctttgtttgatactcttacatagcatgtattgccagtcgcctcatttgtcaagctttgtagtcattaattcaattatatccttcctccattttttggtagatgatctccattcctttttttccaaacagggaggaaaagaagttagaactctgaagttcttgagtctctgtccctttctttgtaatatagcatgctttttctttaattttagggacttttacaagggatcatcacaaatgtaaaatatcaagttaaacctcataagatatttctgcccaaaagaaacacattagggtactggcctgtcaggcttactaaaggtgacacacaggtgtcagccacagaggtgaaagggcctcagaatgacacagtacgttttttatctctcagtatctttcaaaatgtaatatctaatagaaaccaaaaaagtgaaatttacatgtaggtttagaacacagtaatgattgtatattaataatttcatgcttgtatgaaaattttcagataaactctcatgttaaaaataatttctgaacctacaaataaactaaccctcctgttagaacgttatgactatatgtaatgtaaggaatatattaactgtaagttttttgttgttgttgttttgagacggaaccttgctctgtcactcaggctggagtgcagtggtgtgatctcggctcactgcaacctcggcctcctgggttcaggcgattctcctgcctcagactctcgagtagctgggattacaggcacccaccaccacacttggctaattttgtatttttagtagagacacagtttcagcatgttggccaggctggtctcaaactcctgacctcagatgatctgcccgccttggcctcccaaagtgctgggattacaagtgtgagccaccgcacctagcacaactgcagggttttaaatattaatgttattaatgttactaatgttgttgctgaaaatggaactcaaataatatgtaatttggattttctgtattttgccttgtagatagtgatttacatatattgactagcagatttttagtacttatgaactcattttcagttggattgttgtttttttccccctcctaagtatataaaaaccccactgacattttagggcctctagctgctgtttgaggtgacagtgccaaggaatggactctaatcctaaactactgagtaaatgtttttttaagtcctatgctacttttatcaaagaaaataaaatcaaatctgagaagagggggaagagaaataactatttttaggacccagacttggagatctgtgccaaccaaacatctactataatcgagagaaggtaataatcatggttttagttgtcatcagctaagtgtgggctggaactttcttgtatccagtgtcaacctgtgtcaaagtgcaagctagagatctaatgaatatgatctcctacacaatgcttaaagatacatgaaatacttcccatctaaatccttacataatttatttatatacatgggcatatgttttcttttacatatgtgtatatctgtatgtatacaaatcttcaagtgaataattgtataaatatatgtatgttctaacttacagaattagaaatgtaattcagtttactcccaaaggataagattgaagataatgagaactgaattaaagcttactttctttcacagaattcctcagagagagaagactgtaataatggcgaaccccctaggaagataataccagagaagaattcacttagacaggtatgaaattcagccttacttaaaataaaaagctaccaacagcaaaacaaaagacaggaggaaacccttgatttgccattctttaagcactggagcttatattaagagtactcggacgttggcctggccatagccatcactttcaatcaggtgacatggttttcccagttatttaaaaaacattctaggtatacatgtacaggacagctggttggcatttttaaaaaagtataaaaacagatctgcctgtaataaagttagcccttttagtatgagcaatattttgtttgctttttctagaagaaaaggccattgttaataataacttaaaaaaacagcagccgggcaaggtggctaacgcctataatcccaccactttgggaggctgaggcaggcgaatacctgaagtcgggagttcgagaccagcctgaccaacatggagaaacccagtctctactaaaaatacaaaaatttgctgggcatgctggcgcatgcctgtaatcccagctactcaggaggctgaggcaggagaatcacttgaaccccagaggcagaggttgcggtgagctgagattgcgccattgcactccagcctgggcaacaagagcaaaactccgtctcaaaaaaaaaaaaaaaaaatagctcaccactgtgccccaatagaaggtaacacattttacttgtgaaagttcaataccattgtgttcttgtaaaaattagaatgtccttggcaaaaacaagaaacgcaagttcttatgatgttgccagagaataagtgtgccacctattcatttttatttttattattttattttatttttatttttgagacaaagcctcactctgtcgcccaggctggagtgcagtggcgtgatctcggctcactgcaacctctgccttctgggttcaagcgattctcctgcctcagcctcctgagtagctggaattacaggtgcctgccaccatgcctggctaatttttgtattttggggtttttttttttttgagacacagtcttgctctatcgcccaggctggagtgcagtggtgtgatcttggctcaccacaacctccacctccagggttcaagcgactcttctgcctcagcctcctgcgtaactgggactacaggtgcccactaccacaccgggctaatttttgtatttttagtagaaacggggtttcaccatgttggccaggctggtcgcaaactcttgaccttgtgatctgcccacctaagcctcccaaagtgctgggattacaggcatgagccactgttcccgacctaatttttgtatttttagtagagacagggtttcaccatgttggccaggctgttctcagacccctgacctcaggtgatctgcccagcttggcctcccaaagtgctgggattacagacatgagccaccacacctggccctgtattcatttttaatataaaattggatacaatgagcctgagcagcagtaaaaataattctaatttacttggatttatagcattgttctaggaaataggagatctaatatttgttgagcacccaccgtgaacatgatgcttatttgatttaaccctcacaataaccctgtaaagtttttagatatgatgtgacttccaatttatagatgaagaaaatggagggttagagaggttagatgacttgtctagctaattagtgatttgatactcagatctcagtgtttccaaagcgtttctacttgtgccttctgacttcagtttatatatagtgtttagagggaaagtacttgaaactgtgacacattcattttttaatttactatatgttaaatgttttttggatgaacacttcttttttttataaaaataattgtttagtaaatagaattgaatcatccaggaagctttaaaaaaaaaaacaaacaaaaatccacaaatgatcagtaattgatgttgagacagttacaattttaactgtttggagaatcaacacctgatctgttcatctaaaccaataggacaatactgaataagataaattgggaagtaggaacactctgcccactatacagaaacaactgtcggaaaacaatgacacaacaaaagttttggcaactttatttaagctaacaaacgaattttctctctgcaaagttataaattaattttaataggctgatccagatggtccatttggaaaatggataggctgatctgttgaaaattaaactaaatttatctctctcatacttcaaactgaagcaagagagagaatcatgcctattaagtccagcacatacagatggaccagcaggtcacacatgggactaatctgattcattttaaaaataaatgcatacattattgaatcattttctacttgcaagatctgttgtgtgcaatattcgaaagagatttaatgttgtttttttcattgccgttttagcaggttctcttccccactccccctgcccactttaatttaacaaccttcccccccaccccccccatggtgctttgaaatgatttttctaatatctgtcattcagtgttgagatccaagctctggagattaattaggtcatgaggctttttctcctcccttctttgtaaagggttttatctccattctctttgtgaagagcatgaactcaatgttcttggaaagagaaatggcctttagaaacagggaagtaggagatcctcctggggccctcagagtcttttagcttctgggtgttttagcagccccatgaatgcagatttgtaaatttattgcagtgccatctggttttttgctcgaaccagattactgttggcttgtgtctgtctattgtggtggtcactccctaggagcttgccctctctatcttagggaagagtgatgaatagcaggggtcaatagaagcgggtcacagggcagctgtccaggactgccctgaacttgattaccccattgctgattttttttaaggtaggacatagtatataagctgtttaaactccctcttttctctattgcatatgacaataatgaagtgccatttgctattttgtttttttgtttttgttttgttttgtttttcctgtagtcaacttctgtagacaaaaagatgtcaaggccgccttatacctagtattgatacaagtaggatttgcatctcattaacttgagattcttttgcagatatttctaatgggatttcagaaactcactattgattataaaaagttcagttatcttctagcaatttaacattgtttttaactaatattatagttgacatatattattcaaaaatagcgttttgccattgttgataggacataactactgcatgttaatttggagagctatttaaatattggaggagcaaacaactttataccaaaaatttggcaagttgaacaaattccttgaaaaatacaacttaccaaaactcttaacacagggtgaagcaaaatttgaatagcctgatgtctattaaataaatttaattaatcatcagaagggacatgtggttttactggtgaattcaacaaatatttaaggaagaaatgatacgaattttatgccagaccctttcacagaatagagaaggaaagaacactccttgacttaaaaatccaccataacagtaattccaaaacccgacaaagatattaccagaacaagaaataatgaaggtggaaattaagagacactgttccctgtgtctgtcaccaagtcattttgtatacctgctttttcgtttcatttccagcatctgaagatggaagagtttggggtagggagaggaagtagagcagtgtatccttgtaaagaaagttaattttcttagtttcagaataatctcatttcttggcattaaatatgaacttttatttaaaggatgtacaaaatagctacaatttttgttttactcctaaaaatgtgaagtcaaggaaaggatagccactgttttcctaccttttattcctatctgcaatcaagggcaaaggcctgggaggatacatgaaagtactcattactttttgaaaattgtggcattacaacgttcaactctttgcttctcattggtgctaataggatctgtcagccctgcctttctctgtaattgagtaaattgtgaccgttgtctaatccctctcccatcccccatttcctttgtgtatgtgtccacttaccatcctgagaacgtgggcagtgataaataaagcattgagtagagctctctcaactctctgaaagcagcatgatgccagccctctagttatatttctttaagtgtttaggtttttctgtattctttctcttgtgtagctggaaccctggggatgcaaagccatgagagaggccaagaagctaacaaagtagctgtctcccttgttagcttgttcctttattctttaaaaacaagataaaaaccatctggctcagggcattacattttcctcccccatgcacctctatagatggagacttcacctgcagtgagggtttacattgattagggagggagcagtaattcaagcttccatcctcttcaaggatactttgcagtctttaaaggtgctgacccactgagttagactgtcaagggaggataaaaaagtatcttcatcccaggaggtaacagctgccaggttttcaacaccttgcacgctgctggaaaaatgtcacaattgtcagctgaaagaaaaatgactgtgttgtcatcttctgttaatgactgggccttataaaaggaactacataagtcttttagaaggaataagtagctgttttccttttctaccatattcccctcccctgaaaaaattcctgcgttctaaacattgccttggagtagatccacaaaaaacagcagtgaagaacttaaatcagccagtataagcatggaagtctgatgggcatagctcctttatacagttggatgagtaggaggaaaaagcacatcactgacacagaaaatgacattatagtgtgtattaacaaaacaaccacaacaacaaaaagtcattcataagccagtgaactgagagaaaacatactgtatttctgttctttggaggacaatttattttcaagcagcatccagatgggtaaataccaagacatttcttttttcaagagagctccttttcttcctttaaaaaaaaaaaaaacacagaatttgcttcctttaatagctctgtaatgttcatatatgatggcattcccttctttctgatttgattgatgagggaaaaaggtttaatgaagtccctgatatcaggcaggcagggttttttttttttttttctctctatttgttttaggttagtcactttaattgtattgagtaattagaaggtacacacagccaagggagctttgttctgataattgctcgagaaaacccattccctatctgccgttgctttgtgttaagacacttctccctctagtggcaatagtaagcactttggcttggcagtaggcaaggtgtaattgcaatatgacaaactatgcttaagggactgtcttgtaaatactttcgtttggggtttgcattatttcattatatatgtgtggttggttgttgttggttttttttactctataaaacttgctacctctttttgccctcctaaagtgctttgggctttgggtaaaaaaaaaattgcctgagatgtttattaataaaaaaaatcacaatgcattctgggtaatgttttgcagcttgacttaattttagtcatctgttttaattacctatttataaaaatgcctttgcatttgtagacattatttaatactttggaagaagcacctcatttgaaataaataaataaattgtacttattttaaatagtccatgtaaaagatcttaaaggtaattaatgtaggtctcttaagtaagacaaaagtgatctttccaaatctgacgaagtgatttgtttatataacttcccacttctgttgaatcctttagagtctaataacttttttaagaaaacacggtttggcaatttgtgcctagctacaaaaacccttcttcaaaaaggagcaatttaataaccggctttcttaaaattactttgaggaaggaagaccgtatggggggttggtgctttgttttatttgtattttaatgtaatcattctttgataaattgtgtaatcactgacttagtaggaaaaatattattgaactcctgggttgcaatgaccataaagagtgtattttcatatagagagttgtgatactgggaataaattataaaggaaacagtttatatgctggtcaaagtccatatgggcccaattcattttgttttcagtgcttactctggatgtaccattaaaaaaggcggggggtggggtgggaggaagcctgttgtgctcatctgcatgagccctaaaaaaaaaatctgccctaaaaacaacacggaatgatagcagatgcagctttgcatctattgaacaagattcagtagcatctgtgtggcatttttaaaacccacttccagcttccttagatattgctttttggtttgctttttctataccatattcttgtgtgggacatgatttgatgttaccatgtatctggaagtccctgtcttcctatacccccactcccagtcactaacgattttcattatactatatcttgttatgctatagggctgctgaacagatttctaagcagctttttgcaaggttaaaacaatgcagcccagtaacaagtttgtgtaattttaaatatataccttctagtaaataagggcaagtctggcaatcaatcccttttagtgtgttatatgtttcacctgacaactaaaccttctattgattagccattactttgttagataatcctatgtcattgaatccattgtaaaaaattaaactctttaaaatgttttaccctagcagcagtgtgaaaattgaaaacttgttcagaattacagcctgctttcacaaagaaggtagttttcagcaaggcatcttactagtttatgcttatgtgctttatatgcgatataaaaacgtattaaagtactccaacgcaaaactctctgcctctggttcagcaatgaagctaccttttcaagtgttgcatggggacagaacctatcttgcctgtggctattatattcactagttggatttcaaactggagagagtcttacaggaaaatattgaatggaaaatattgaatgttttagccttttaattgcagagtggtaaaggaactatgacaaattttagtttattgatctgtgttacttccttgggagatcagcaaagtcatttacccattttacagatggaatgtctagaaaataaagtcctatatatagccctactctggaaactccctcaggcctggcacagagtttctgaatctatctaatggtcccctaaatatgttattacatattcattcatgaagggaaaagagggtaattttgaaggaaaataaattttctttttataacttagtattttcagaaaaatagcatgatacatttattgatgactggacaaacctctgtaaaaaatttactcctaagatacttctattggaagttttcatacagtgaattttacagatattaattgtataagtctgaatttttgataaatctaaccacctgtgtaaccaccaccctaattaaactatagaatattttcataacctaggaatgtctcttgttctcctttctacttattttctgcaccaccaatggatcaaatactgatcagcttactgtcactgtaattttgccttttctagaattttgtgtaatggaatgctatatttttggggtctgacattcactttgcataatgtttgtgagattcctctatgttgctgtgtatatcagtagtttattctctttcattgagttgaataaatatatcgcagtttgttttctgtctccttttggtggatatctgagccatttccatcattataagtgaagttactatgaacgttcttctataaaggtttttggtgagcatatgttaagtactttttcatgtgcttattggttattcagacattttctttgtgaagtatcttttaagtttttagccatttttaaaaattgcattgtttgcctttttattattgagttgtagactcaactgtattgaattctggataccattcatttgtcagatatatgtactctgattatatctcacagtctatggtttgcctgtttatggtatgttttgatgagaagtttctaatagttggatgaaatccagtttaccaatttttctttctttttttttttttttttttttgagacggagtctcgctgtgtcgcccaggctggagtgcagtgacacaatctcggctcactgcaacctctgcctcccaggttcaagcaattcttgtgcctcagcctcctgagtagatgggattacaggcatgcgccaccacatgctaatttttgtatttttagtagagacggggtttcaccatgttggctaggctggtctcgaactccagacctcaggtgatccgaccgcctcagcctcccaaagtgctgggattacaggcgcgagccaccgcgcctagccggttttttcttttagaagggatacttcctttggtcctacctaagaaatctttgtctaccccatgattgtgaagatattcttctaagttttcttctgggagctttataagtttactatttatacttaattctatgatccatctcaaattaattcttatacgtgccatgaagtagagtttgggcttcattatttttgccgtaatttcattcagttgtttcagcaccattgttgaaaagactttcttttcccccattgaattacatgaattcatttgtccaaaccatttagttatataagagttatattctcaaacctcctgaagaaaacgttgctgctggacccagagcagtgggtgacagtgcctaaggtactgacccatccctattttatgtccctgtagacaaggcggacaagaaaaatgataggtgtctatccttgcaccaaataccatagtgtcttgattattgtcattttatataatgggccatgaaatcaggtagtgtgagttctctagatttgttgttttattttttgttattccagatagttcacatttctatataaattttagaatcaaccttgcactttctattaaaaagcagtctgtgaggggctgggtgtggtggctccctcctgtaatcccaacactttgggaggccgaagtgggaggatcgctggagcccactgagttggaggctacagtgagttatgatcacaccactgcactccagcctgggcaacagaaagagaaactatctccaaaaatagacagacagatagataactactttttttttcatctgagatatataggattttgcccccgttattctgttaatacgacaaattaccttgatttttgttaagagtttttgtgtctgtttcatgtgaggtactggtttgcagttttcttttttaagtgtttgccaggttttggtatcagagttatgctggtcttataaaatgaattgggaaatcttcctcccatcctcctctgttttctaaaagcacttgtgtataatcctggtggtgtttcttccttcagatttcatagaattcacaaaccacttgggcctgtagttttctttgtgaaagattttttaaacttattatttaaatttatgtggcaagatgttttagagcaatttgaatttcttttagaggtatagagctgttcagattttctgtttcatgtgtcaattttggtaatttgtgtttttgaagaaatgtttcctgtttattcaacagattataatatgttaatatcttttattttaatactgtgattgtttcatattgggctactgaaagcctctttcggcaggcttccatgccccctttgacgtatcttcatcgttctgagtatttccatcttatagtttccctggtcagtcctggagtcaaccatatttccatgaatgtatgattccctttagtgcagaatggtatttaaaaaccaagattcaaacactgacttttcttttacatctatatttatatactttgaaaccattagttcacattgataactccaattctaattcaaccccacagggtttgttctagatttctttctttccatatttcatttttctcccttccttccttccttccccttccttcctttttcttttcttttcttttcctctcttctcttctcttctcttctcttctcttctcttctcttctcttctctctcttctttctttcttgtttttggtagagatggggtctctccctatgttgtccaggctggtcttgaattccagagctcaagcaatcctcctgcattggcttcccaaaatgttgggattataggcatgagccaccccacccctttcctaacataggaaacctggtttaagatttttttcctttcagcactttaaaaatattgttcccagctgggcgtggtggctcatgcctataatcccagcactttgggaggccaaggttgggtggatcacctgaggtcaggagttcgagaccagcctggccaatatggtgaaaccctgtctctactaaaaatacaaaaattatctgggcatggtggcgcacacctgtagtcccagctacttgggaggctgaggcaggagaattgcttgaacccgggagacggaggttgcggtgaaataaaaatattattcgcttgtctcctagccttcatttttttatgaaaagcctgacattatttatatcgttactcctagatacctaacatcccctttttccttggctccgttcaaggttttatctttatcactcgttttcagcagttctgactgtgatgggcctatatgtgttgttttctttgtatttttaacatgactggggtttgctgatctgaaatcagaaagccgctagttttcacaaaatttggggaagtatttgatcactatttttataacttctttgctgtaccgttctcttctcccttccttggactccagccacgcatatattctagataatccagaattgtcccacacagtgactaagaccgatcttttttttttcttttcttaatctcctttttttctctctgttcttcagtttatatgatttcagtttatctatctttttttttttcggtttatctgtcttcattgaccttttcttctgtcacttccagtctgctttttaagcctctccagtaaattttttgatttttttgagatagggtctcactctgttgctcaggctgaagtgcagtggcatgaacatggctcactgcagccttgaccttctgggctcaagcaaccgcccaccccagcctcctgagtagctgggactacaggtgtgcaccactatacccaactaatttttcttttttctctttttttttttttttttttttttgagacagaatctcaatctgttgcccaggctggagaacagtggtgcaatctcagcttactgcaacctccgtctcccgggttcaagcgattctcctccctctgcctcccaagtagctgggattacaggcacttgccaccatgcccagctaatttttgtatttttggtagagatggggtttcaccatgtttgctaggctggtctcaaactcctgacctcaggtgatctgcccgcctcggcctccaaagtgctaggtgtaagtcactgggcctggccaattttttctattttttgtagagacaggatctcactacgttgcccaggctggtcctgaactcctgagctcaagctatcctcctgcctcggcttcccaaagtgctgggattacaggcatgagccaccatgcgcagcctgaatttttcatttcagataatgcacttttcagttctagaatttctatttagtttatttttggtttttcattttctggtagaatttttcatctgtttattcattgtgatcatatcttttattgctatgttcaagtttgaacatatctattatagcttctttagagctataatatgtgctaatttctacaactaggtcttctcagggttggtttttggttcatttttctcttgacaatggatcccatttatctcctttttctcatttttagtaatttttgatcatataaccaacattataaatggtacattgcagaaactctgaattcattttttcttcctctgattaaattactggctgatcactatgaccttgtggaggcttggttttgtatttgttaaggtcaggtgtattttggttttgcccttagtcctaagacatactcttgaatctaaactcatggtctctttgaatttttaatggaaagcctaagatgttattacatccctctaacttgatagaagtcaaactctaaactctttctccccccatgagcagcagctggaatatctgcacaggcctttcaaccctccagctgttgctctccattgaaatccttggaatctccccttcatgtacgtagtttgggtgttagccatagatttgaggggaatttatatgtaattttttagtcttcctccttcccctgtggttctctttcatttctgggatttctgttctctattgccagccactatggcagttttgaactcttatcacttgatatctcaagccaatagactgtggctttcagattgaattctagtcaccctgcaccaagtggactcgtgagtgccttcaggggaaaagcacataaacacacatctcacccagtgtggttctcttctttcaagatcaggccactccttccccattttccgtcttttttaagtcgatctccagtgcctttatgtagctttaaaatgtttttcctatctgcaagagggtttatctgatacaaacatttctgccattactggaagcggaactctttgagtcaagttatatttttttcagcaaatactgattacttcataaatttatctttaaaacatagtgaattttattttaaaaatatttatgtttgtgtgtgtatgaatagtaaatgtttgtggaattagacaacgcaaaagaaataacaaatctagagcccagaatttacatgcaccaatatttaaatctgtacactaatttctaatgctctattttttcatatatattttgaaataatttttacttaaattataagaataaaacaagttggtaaattttttaaggtttagcctgtttaaaagaaaaacagctgggcgtggtggctcacgcctgcaatcccagcactttgggaggccaaggcaggtggatcaattaaggtcaggagttcaagaccagcctggccaacatggtaaaaccctgtctctactaaaaatacaaaaattagccggccgtggtggcacatgtctgtaatcccagctacttggtaggctgaggcaggagaatcactcgaacctgggaggtgcaggttacagtgagccgagattgcaccactgtactccagcctgggagacagagtgagactccgtctcaaaacaaaaacaaaaacaaaaacagaactgactttataatatcgatggggagttatatatctctactattttccccattttttcttaaattttatctattttctttccaaagaatgatagttgaccaaaatcagattctttaaaatatctcttcatgctgatataaacaaatgagtaaataaataaatgaggggtgaaatcacatcttttccttacagaagaattccagttaatgtggaaggaaagacaaaaataataaattcactattagaatacacagtaaaaattaccataggcatgattagcacccaatggatgctaaaattagcaagctgagatgcaagtagaaacagaatatttgcatagtctccaagtattttgccatatatatatatatatatatatatatatatattcagtaattcctaaggggaaaataatgtttatactggagaatcttggcagacatgtccttagctgtataatcaaggctaacatcaccagaaataccagcataccttctgatttgatgcagtgagaggggcacatcacctctaaagtatctttccccaaaataacctcaatctgatcatgagaaaatatcagacaaacccaacttgaggcacagtctgtagattaactgatcagtgctgtttagcagtgtcagtcatgaaagacaaggaaagactgagggattgttgaaaataagaggagccctaagagacatgacaaataaatgccatgtgggatcctagattagatgctgaacagaaaaaggacattagtggaaaaactggtgaaacctgagtaagttctgtactttatatagtaccaagttaatttcttagtttcgataaatgttctgtaattatgtaagatattaacatatggagaagctgggtgacaagtatataggaaatctttactttttctttctttctttttttaaagagatgatgtcttgatttgttgcccaggctggagtgcaatggcataatcatagctccctgcagtcttcaactccagggctcagtcagtcctcctgagtagccaggactacaggcctgtgctgccacgcccagttaatttttttttttttttaaatagaaatgtgggcttgtatggaactcccggtttcaagtagccctcctgcctctacctcccaaagtgctgggattataggcatgagccactgtgcttgaactttactatttttgtacttgttctataaatctaaaattatctcaaaatgttaaaaaattgaattctttgttactgttggttttgagtgtcttaagatttttcttcttaaatccaacacaagtatttatagcaatggttctcgaagagtgttcctggatcagcagcactaacgtcaactggggccttgttaaaaatgcaaatgttcagaagctctggggatggaaacctagcaatctgtgtttgttttgttttgagacagagtcttgctctgtcacccacgctggagtgccgtggcacgatctaggcttactgcagcctctgcctcccgggttcaagcgattcttctgcctcagcctcccgagtagctgggattacaggcatgcaccaccacgcctggctaaatttttttatttttttattttctttttttgtatttttagtagagacggggtttcaccatgttggtcaggctggtctcaaacttctgatctcaagtgatcctcctgccttcgccccccaaagtgctgggattacaggtgttagccaccaggccccaccgtgatctgtgttttaacaagccctccttccagatgattctgatgcgcactaaagtttgataaacataatttataccatcagtaaaaacttaagactaaaaggaaacatttctattaatatattgtccagtaattaataagtttgcttttcataaagtataactatagtattaccaatgttttgttttgtttttggtagagacagggcctcgctgtgctgcccaggctgatctcaaactcctaggctcaagtgattcccctgcctcggcctcccaaagtgctgggatcacaggcatgagccactgtgcccagctatcaccagtttttaaaatccatttcctatgatttttttctttcttttttatttggagacaatgtcttgctctgttgcccaggctggagtgcagtggcgtgatctcagctcactacaacctccatctcctgggctcaagcgattctcgtccctcagcctcctgagtagctggaactacaggcacccaccaccatgcctggctaatattttgtattttagtagagacagggtttcaccatgttgcccagggtggcctcaaactcctgagctcaggcgatcttcccacctcggcttcccaaagtgttaggattacaggtatgagccaccgcacctggcctgatttttctattttatctcttcaacattaccagatgtacttaagggataacttctaaggtctagataggcccagtgaggctgctcttgcctgtaatcccagcactttgggaggccgaggcgggtgggtcacctgaggtcagtagttcaagaccagcctggccaacatgatgaaaccccatctctactaaaaatacaaaaaattagctgggcatggtggcaggcgcctgtaagcccagctactcgggagactcaggtgggagaatcacttgaacctgggaggcggaggttgtagtgagccgagattgtgccactgcactccagcctgggcagcagagcaagactccatctcaaaaaaaaaaaaaataggtaagtgttggtttatcttttttcaatgttctttcaattttggtttatttctcttttctttttaaagccaaaagtcaaagcttgtattgagattcttttataaaaatatttcatgattagttttaaaataattttttttttctggatggtttaaaattttttcatttattgttctgaataagaaacatgtcagctgagcacaatggctcgtccctgtaatcccagcacattagaaggctgaggcaggaggatcacttgagctcaggagttcaagaccagtttaggcaacatggcaaaaccccatctctacaaaaaatacaaaaaattagctgggcgtggtagcgtgcccctgtagtcccccacctactctggaggatcacttgagtcccagaggcatagattgcagagagccaagatctcaccactgtacttccagctggggtgacagagtaagaccctatctcaaaaaaaaaaaaaaagaaaagaaaaaaagagaaagaaacatgtcctctgtgggaggctgaggcaggagaatcgcttgaaccccggaggcggaggttgcagtgagccgagatcacgccactgcaccccagcctgggtgacagagcaagactccatctggggaaaaaaaaaaaaaaaaaagaaacatgccctctaactaccttcagatcttgatggttttgaaagtttagaaggaaaaacaacaaaaataaatcttttctcagaacggtaactgctgttttaaacagaactaagctcttccaatttgcattttaaaatgctacataatcagtacccccagcttccattaatcattaatacagtgaagccactgctgcttacatacttgttcatgggcacatcagtggcttttgtagcctctatctttgccctcctccttttctaacttacctctcagttcccataagtcttaacttatagataaaatctatttgtgttttgacttgagaaatagagcagaatttgaaaacaggatatggcagtatttcaatattttaaaaacctgtttccaacaaattctctttacagacatacaacagctgtgccagactctgcttaaaccaagaaacagtatgtttagcaagcactgctatgaagactgagaattgtgtggccaaagtaagtaatattgctcatcaatgtatattacaccacaccataacagtgccatatctgtaggcatctttactcagtattgcttaaggattattacaggattatatagttaagaaaaaaatacaaacaggcatcattttatctagaacagattgcaagttagattctccacctcttaattgcaacagaatgttttgcttatgaattctggtcactctttagactgattcacatttgtttcttgacactagttgtagattatcacatatcagtaggatttgtataagataatgtacaattgttttgataagtttatggtttttaaatacagttacgtatagagtacatcacatcattgcaaggactgtgaaatatgctatagacaacccaattattatatcactattattatttattgagtggctaatgttggaaatactgcttttgttgatcttgatccacatggacaagtatgtttagtcatgtgtatgggctacctctttttcatgtatatatgtcatctctatagcctagatgtaaaattaatcttaaatattagagatctgatgctttttatatctatcataactcacattttccaaatatctgtaattactgaggaattttgactaaaattcaagtgtcagacattttaggaataagtactattaagtatgggctttgtttcttttacttgaattatctgcaaaaatattgcctttatatctattcatagatttgctactgttacaacattcccaacttgaactattttagtttaacctattttattatagatccaggccctcagtttcttactgttattattagagcttaggactggtgtcatgtcattgctatctttgctacaaaaatctaatgacagttgtcttagtccatgtgagctgctataacaaaaatactgtaagctgggtggcttataaacaaaactaatttttttcttataggggctgagaagtccaagatgagagcactagcagattcagtgtctggtgagggcttgctctctgcctcatagatggtgccttctcactgcatcctcacatgatagaagagactagctagatatccgaggtctcttttttttaagggcactaatcccacttacaaggggtctgccttcatgaattttggagaacacaaacgttcagaccatagcaaaagcagagtttttgtttatttttccttaaaacatgcagtagtctctgggcctgctctatcaactggaaatgtatcacacaaaatataaccatcgaaatcatacatataagaaatatcagaatttatttaaaattacagtttaaaaaggtagagttcatcagttaaatgtctcaaatccaaatatgttaatattttgctataaaatgtaattataaattacatatttttcagtcatttagtcacaactaacaagtgctaattgaccctattttattttgttttgttttattttatttttagagacagagtcttgctctgttgcccagggtagagtgcaatggcactaatcctagctcaatgcagcctttacctccagggctcaagccctgatcttcctgcctcagcctcccgagtagctgaaaacatgagtgcatgccaccacacccagctaatttttggttttcggttttttagagttgttttgttttgtagagatgaggtgtcgctgtattgcctaggctggtctcgaactcctggcctcgagtaatcctccccactaggcctgccaaagagttgggattacaagcgtgagccactgcacccagcccaagtctactttatatcctgcttttgtgcatggaaacagggatacacagttatttgggcctttaaaaatattctttctttctttttttcttttttttgtttttggccatgctgctcttagtttcatcacaagtgggtgacttctggctaaataaggtaaaattttagcatgagcaccaatccaaggacagggtgatgattttaatgagtttcactgagagctggccaagtgagcatctgttccttttgttttctccatactttgtaagccaggatctctaatctaaataggttggtgtgtgtctatatgatgtggagttttttttttttaattgtttttttctcccaccctctgctttattggtacatggttaaaaatcttctgccatctagcacaattatttaatttcttccatgcttttggatcttgagtgagaaagtaagtttgctcattgctgctcatcagtgtgtttcacttgctcccaggtggtgaccttctcattgcattgttgcttattttaacattattctgacacctatatcctttcgtcatcctcttaaataatctaatttaatgatgatgtctatcatttcctattggaacccagttaaatcactggttccttttattggcccacatcctgtcttctggttcattgcttcagatttgagccaaataatcagttggtcaatgtcaaataaaaacacatagctgaaaaattttctttcttgcaacagtctccagtgaggtacccatagcatgagaatactgaaaaaggttttccttttttttgtgagatggagtctcactttgtcacccaggctggagtgcggtggtgccatcttggcttactacaacctccacctcctgggttcaagccattatcctgcctcagcctcccgagtggctgggattacagaagtgtgtcaccacacccagctaatttttatatttttaagtagagacagggtttcgccatgttggccaggctggtctcgagcttctgacctcaggtgatctctctgcctcagcctcccaaagtgctgggattacaggtgtgagccactgtgcctggccaagttttttcttttttatttacatgtgttttgtgtgtctcatgatccctgtttcttttttgtttgtttgtttcttttttttttttttttttttgagacggagtcttgctctgtcacccaggttggagtgcagtggcatgatctcggctcactgcaagctccgcctcccggtttcacgccattttcctgcctcagcctcctgagtagctgggactataggcgcccgccaccacgcccggctaattttttgtatttttagtagagacggggtttcaccgcgttggccgggatggtcttgatctcctgacgtcgtgatccgcttgcctcagcctcccaaagcaatgggattacagtcgtgagctgccgcatccggccaactgtttctattggcctctattgcttgacctttgaatggaatgacttgtcattatttttgttggtctgcaagcttgtccctatttcctgttcttcacctttagcccttaactgaatagtttcatctgctgcattgatatggctgcagtgttttctcaacttggtacaagtgtctgttgttgattcagattgtactccattgtggcctgaatctgtaaccatttccatgtgagaacaactgtaatattgtgatatcaaccatttttgtcctttagttcaaagagtgactttggcttggctagagatactaattataggccaaaaccttattatttattgaatatggttcatgtaagttttagagaagacattaatactatttatttccctaaaagcagcaatggtattatgtttggacccctataataccttgattgtaactctttgccagaaatatcatagtcttatgatagctctatacgaagggtaccaattagtcctctgtagaatacaagaaacaaagctgtaaaacaaattacaaccaccctaagttggcaataatcttgttagtctttaacttgaagaaagaggcctaagaaaaaatttaaaactaaaaatggccgggcacggtggctcacacctgtaatcccagtactttgggaggccgagacgggtggatcacgaggtcaggagttcaagaccagcccaaccaacatggtgaaaccctgtctatactaaaagtataaaaattagctgggcgtggtggcacatgcctataatcccagctactcaggaggctgaggcaggagaatcacttgaacctgggaggcagaggttgcagtaagctgagatcgtgccacagcactccagcctgggcgacagagtgagactcagtctcaaaaaaaaaactgaaaatgtaggagggtctattttatccctataacttaatccaagtaatatttggaggcattgagatacctttttgttttttttcagaattctttctcctggttatggccctgtgtttcatgagatttgtgtttggagcatgatgagctctgtgtttattgtagctttaaatggacagtcattattaactgtcaacttagtctttaaaatccataatcacattgtgcttattacttgtcaaccttcatgattttttttaattggtaaagaaaactcactggaaggctgaaaagcattacttttttatgttatcttgctattggctttattaaactattactgcaaattttggtcttaggtttttttccctaatttacccttacccacacccacagatacacaaatacatgcagttaaaattgaattgtttgaatacatctatccagattcctggcccagataagagaagtttttcctctttatgtttgggaaataaaccccttcagtagccctttgtggatgttctgtattttagttgttattggttgttgtcactgtttttttatttgagactaataatctgtttgaaactgactgagacagaaaaatgtgatgttcctttccactcactccagattttgatagaagacttgttttatttatttccaaaattatatccgcaggaaacaagctgtttaaattcagattatgctgaagcaaaatggtcctggtatgagaagcaacgtgctgttttacgagcacagagtcccttttctcataactgattgatagtaaatattttcctgaagaattattgccaaccatgaacagtgcaactgtttcactttttttccatgctacttgctgtaccagccattgtcggtaattaagatctacaattcacaatgcagacgtttgcacttcctctgggtctgtgctatttataaggcatttcagctgttcagagtttcttttgagttttaaactacatgttaacaggcttctttaagatactgttccacaagtagcatgtcatatggtccgttcttcacacaggcgcctctgtcaggtctaaacattagctttacagagaacatactaagatataaccacgtcattgaggctgatgtggttggaaaaactgtggagtataatgtgttacacattgggcttattgctctttcaaaaagataggaaggaacttcagatgtaatattctttttgaaaatcttaatattcatatgagcttaatgtgttaattgggttacagagatatacacagttaaatgacttttccaagttcactttgcattaataagagaagccaggacccctcttatagacaagagtttgtgtgtttgtcagattaaggatgtaagaatacattttcttctagatgtgcgtgccgtttaagaaaaatacagacatggggcaccaaaacggatcagcagattgactgcacatttgttgtgtaatcagcttcaggaaccctaagtagcatatgccattggttgaggaaagtgtaaacaggaatcttggtctgtgttaaagttggtaaaatttaaaccattttcaaccaaaaagagacttaaaaaaaaaagtccagaccccagcccagaatctttatgaattatgccctaaaataagagtaattgcttgtgcagtcttcttgctaccggcactcattgttaaacatacaagaaaaagaaacaagaaactgaaagctgtcaacaaaatgtgtttaaaactttgccctgagtgggcatcagactggctgtttttaagcctgaagtccagccgcattgattaggcacgttggccatcagcatcttccagcagagcagatctgcagagaaaggcaggacccaggttttagtgctgattctggatggcccttgaatatagacagaatatagacagcttataacaaagccattccaaggcagttttattttacaaatctaaaactttcggtagttcttttgaactaccgtgtttctgtaaatttcttcagtgaactctatgaaccgttttttttgtttttgtttttgtttttaaatagcagcggttcagctgttgggaaccactgatatatctgactgaggcacttcaagatgctagaatttattcatatttctatctagccagggagctaataggctcgagcttgtctttgtggattgatctagattagcatgaaatgagcccagtcagtgtcttcctcagtgaaaagggagaggttaggggaaagagggatgaaagaagaaagttcttcatcaagaattgactgcagtattgcctgctgatgcatgtcggatcacccgcacagagagatcacatggcttctccaaaagtcaaacgatcaattcgcctcgttttggctctgtacttaatgcacaaacagtgcgatctgcggggctgtaattgcattgttagggccaaggaacaaggctgtgccttttcagcagacagctggcagggagagaggcatgttgttaggaaagagagaggcaaggcaaataaaattactgctaacgctcagagatcggcaggagtcctacttgcctaatcttaccggtgggagcaagcggctgttgtaatccaattatagcagcataagcaatttgttagacactccgcataatgtaacaatttcccaataaactctgacttgtaataacgtcggcaagagtccgcataaatctgcccgaatggtgggggctggagcattcggctgggggcttgtaattggcgccatcagcacgttttgcggagtgcagtatggtgcagtcttttagtgcaggaattttaaggagaaaagcgtggcacatttctcagggaaaaaaaaaaaagtggccattaaaaggggaacagcaagaagggcatactcttgccgtcacattacctaggaatcttagtgtagaaagaaaacaggaggaagccatgtttcctcctaatactaaagaggggaggtggggaaaagagtgtgtgaattagttaaatttctttatttaaaaggcatcggtttctattatttataccttcatctccagccccctaaaatgctgttcaggcagggtttagctaacatttttataaaatggtcatactcaagacaagcctagaaatgccaagttaaaatctgttttcttctggagttagcattttctttacaacatgaaatatatattctttatgaccaggacaaatcttttgaagatattatctcactgaatatcagacctttctgtggtgttctgacttctgctttaagaaactgtcacttactgaagggtttaaatctcagcttgtttgcttagctgcactgcttcttttctcattctgaaacatattgtgaatatctatgatactaggattagtaatcaatcttattgaaacattacattttataagaacatatcatttaaatttatacttgtgtgatcattatagaaataattttgattcctaagtaataaaatttctgttttggaaaaaatatttgttgttatatgggacaaaataaaatcacccttattaattgattagcatttgtagtcacagaatagggtttcttgttatataaggtataggaggtgaagcgtgcttatggatttgagttaatagattttcatgctactcaatgtttattaaatgttacctactttcttatgccaacccatttcttcattgctatataatttgtgtcaaaaccaactatatgaagaacaggatttttcagaatatcctgttgctgtgggtattaccacaataaatacttacttgcagacttaaacatttccttttgctgaaacaaatgcagccttctttgactggagctacatcaataaactgcagtgcctctaataaagccactcagtgtctgggtttaactaatggctgattttcatggctttgacagtgagctgtgtgcgttattttctcctgatattgtaaaaataatgagagcaaattagaacaatcagtttacacagatagctcctgattggaggcgatgggcaatatggcagcaggtaatccatctttggactcctgtcacattaacttcaacagtgtgaaaagatcaggtggggtaagcagggatcctacccagtcggaacactgaaattaatgagaagaacagtgttctgtgatcaaccttttaattagcaagagtggaaacagagggaatgatgaagggagcaccacagctgcacaatgccaggctcagtttctgaaaaggaaagcaaaaaaatctgtgttttatgttactttttttcttgctgtgtacaggcattatctttccattctagagctggttgcaggcttaagaaatactgcctactttccaaagtaatgccacaaatatggttgatatattaataatctatagactgtaattctatcaggagtcatttgattttgattaccagcatactttctttggcattgtactctgggttttaagcttgatttttctaaaaatcaggtaaccagaggaattacattttttaaagttctgccttgtcagcctcctctctcctcatcactccaatttagagttttccttgcaagtaacatgagagttttctggtttggagcatttctgtcactttgagttatttaaaagaggagcaaaatccaggcagccagctatgtcatatttaaattatattcctttcctgattctgtttattagaaatttgctgttttgtttttctattacctgtgctattgacttctcagtgttgggctgtgttatttcaatttatgtaattgagaactgaatatcaatcaagtaaggtgtttataggaggaagaaggagaaaatctaggcattaactgagactaaaggttgattcatccattcaaagctcagatatactaaaattgtaaccttgttaatcaaatggtattaggctatagaagacataaatgagcaaaattttctgagccaaatcagcttctgtttcctagaccttttttggaaggctttaattttgggaaagtatatgaagccatcatgatttgcagcgtgttagtctttacatattagacttagtggcttactgtaaaagcaagtaatatgttataggctatgtaaatgaattcaaatatcttctaaagatacacaaaatatttttttcttgatactaataattaggcatttatttgaagtactaatatgcaaaagctggttaccaggtacccacctgggtacagaattggtaggaaagagcctaaagttagtgtgaaatatttaggttaggtatgaggtgatcttttctcataggactttttttcacaatatttataactaatgtagattatatgtatcataataggtataactctctaggctttcagtgctaagatactgcatttacagaaacttaagtctctaatattatgcctctacttaaaactcattgtacaaaagtacctcacttccccctagtaccatctccctaccctcttccctgaaaaaacttaggattctgttagaacagaaatctgattttttgtcatgttttattttgactgatagtgagcttttcctgaaaacattcatttagacttgtatgtaccaatattttagaatcagtgatgtaataccaaatagtatctaggactccccccagacaactctttttttttctttcccagaatcaagaataaaagcaacccagacaactctttaatagtctgatgctactgtgcatattaatatttaaagtccacttgttattattttgcagatccttttctgcattccttaatctgaaagagagatttttattcttaatacttgtatggatttttgtggctttttatgggtgtaaatattctcctctctcgtttgacagtttcaaaagcctaggttcataagctctccatgaataaatatgttcttagtcatgtgatgtaaaaagatcgcttacaaagcttgtgaaacctgagccttccttttgaaccttttactacccatgagctcaggaaccatacatgcaaaattttattcttgcgtcatgacttcagcttatgagggaaatgagctatgaatttaaatgactcttctactctataccaagtttctatgaaaataaaattgtattttttcctttttcctaaaaggaaagtttcatctgactagtgtttctgccggtatttgttcccattgttaaaagatttgtttcttaagattagcattaaaatagacatcctgtttttgaaggcatctttttttgtttatactgtaatcccaaaaatgtccaactggctgaatggccaagaaactcccttgtaatttcctaatagagctaaagttaacaagtcaccttaaagtctactaattccaattaagttcaccttggagaaattttcattagtctagtcctttggcacttacccaatacacccttaattaaagttcttatgcatgggaccagttgtatctattataaagattatcataattctaagttttctctcccacccccatttttttttcagggtgtgtttccatataaagatcgaaaaagtccattttcttttcatgtatcttcaagatggaagatcttttccttcccttccttcctcccttcttccctccctcactccctccttccctccctcactccctgcctccctcccttccttcctttcttcttccttccttccttttcagttttatactactcagaagtttgaggaggagagagaatacattaaaatgtattcagccccagtgttcaggcactatatagtgctagctatgtgttacttatttggattctcatgtgaacctggtgagatggactggatcccactttacaaacgaggaacgagaagcttagataagttaaaccttttccaaattttcacatctttaaatgatagagtcaagttttgaactaagatctgacttcagagttcttgctcactagattgcctttcaggtagtatttggaggcctctgcacctctcctaccaggatacttcccccatcgcattgtgtagcttttctccatttcatttctatagcactttgacatctagcaaatgttattttctcatcttcctcctcttcctacctcttgctgcttgtataaatatcttgttcaggctgaactgagagaagtagtgtattcagaaaacttactatctcttttcggctgggtgtggtgcctcacacctgtaatcccagcactttgggaggcctaggtgggcggatcacttgaggtcaggagttcaaggccagcctggccaacaggatgaaactttgtctctactaaaaatacaaaaattaggtggatgtggtggctgcacctgttgtcccagctactcaggaagctgaggtggggagactcacttgaacctgggaggcagaggttgcagtaggccaagattgcgccactgtactccagcctgggtgaaggagcaagactctgtctcaaaaaaaaaaaaaaactctcttttctgggttacctagtcagtaattccatgtaacttaaatagtcacctgccttattaacatagtatacagatctttcaaggatctaagttgacttcttggctccatattacattgttctgtatataaaatgactgagataatattagacaactggttcagggtggtgacttactttagtaattgttttagaagttgttttggaatacagattttatcctgttgtctgtgtcacaatttgtagtgtaagcatgcactggcagtcctttcataccaacacatttgtttttcccacttaaacttggttattaattttgtcaattaaaaatgtgtcccttggcctggttcggctcacacttgtaatcccagtactttgggaggctgaggtgggaggaacacctgaggtcaggagttcaagaccagcctggccaatgtgctgaaacccagtttctactaaaactacaaaaaaattagctgggtgtggtggcaggcgcctataagcccagctgctcaggaggctgaggcaggagaattgcttgaacccaggaggcggaggttgcagtgagccaagatcgcgcctctgcactccagcctgggtgacagagtaagactccatctcaaaaaaaaaaaaagtctcttaaggcttcaggtctgtctgattacacttcagtaaatatttttatattttgattcatgcttctagatggttcggtgattgtgaagacatgatgaggtcatgagaatgtagctggaccttgaaatcctctgtctcggagaaaaggcttgggacagggatgagtgattagaagaaataggttttttttaaagcaaatgaaaacaaagcagacaaacaccaatattactattttgtgtgtatgtgtagttgttgttgttttttttttaactccctggatattctctaatggaaaggttagaaatgcttgacagttaagggtggcataaatttttcacacagactcataaagtatgtaagaaacacttgctcaacatggagcactaagaccatgacaaacaggaacagcaaaatatttctagaagaatgaacataaatttatgttttatacctcaaacatcacttctctaatttaatccacattttctaggagtatctaagagcataagaaatttaattatacagttttgggtttgtttgtttgttttcaatgtgggagcaagccaaaagggaaatatagagagaaaaccatgtttaaaaagaaatggttcctacagtgttaactatggagtctgtagcgtgactctgtaatggaatatcatggcagggggtataatactgtaaataagatgaatatgccacttgtggattaatgggcaacctaaagagtgcttttatttacatctatgtgtgacgttcattttcagtttgtatatttttctcttattcttgtgattatagtatttacaaatctgacattttaattacggaactttctactgattttttaaaaaatctgtttccatgaatcttgctccatatttatttttgtagtattaatatagtgtcattttggactttaaaattgatagattgaaggcgttttctttaaccctttctttagataataaggagacaaggtagtttctgaaatgtattgaattcataaaatacagctatttttaattgtttttcttacgaaagatggagtatagataccacgagtgtccagattatagcagattccatttgcagtgatagttttgtggatatggtatgcttttcaaaggtttaggtactaattaatataaacttgaatacatctagcctgggacactagaggagctactgtctcaacattataacattataacatgcaataaaggtaagtactaagtgagattttataaaactgattttttagtcagcagtttaggttgctgttgattgcaaattactagtattatttagtgcccttgaaacttctgaagttggaggtttcaattgttagttactccctgctttccttcaatagaaaatgtgtagtaaaggttatttataaaagactaattgtatccaaagctaaatggtcttattatagagtttgtataggatttattttcacttgcacgggtaggttctcaaaatgtatttgaatgtgaatgacttcaaacaaaaaaaagtgaaaaatttttaaaaagtactaaaatccaaagattttgtcatcaaatttgacagcctttttgcaccattacaggtatttattgaatgtttatgatgtactaggcatatacattttcactgaaatcatcacaatagtctcattgtgtttacacacaaatgaagtagaattcagattaagtaatttgcccaaggtcatactgtatgttgcagaactggaatttgaacccagaccatctggccccatggccttgtgctttcaaaccactgtgtttgtgaattttaatacatagaaattagggtagatgtagcaaatggggggattatctaaaacattctctgtggtgtctattgaatgttaacaatttactaacaactagccaggatttggaaatcgcagaagtatgcaaattggttatataaaattatgatagagtaatacatcttaggtttgtttttcttctcttgcacttatagtattttcctttctagcattccatatgagatgataaaaattaaaaacgcctcaattagcagccacaaaaaagtaaaactgttaattgaaccttgtaatctcttactgtctgttaggcttttcttttcaagctttgattgtgtgtaataaaactgtggcttaattaatgccagggttctgaagcctttggatgccacaaaagagagtgaagtggagaaaccaaggggcagcatcaaatagcttttctgtcatgttaatttagccctgtcggtcttgttctagttcatgatgtacagctcccaccagatactcacttggtgaattgaaagaggagctgtagtgaaaatactgtcttaggaaaaacacagctcttgattgaggctatcagcaggttaatgaataactgttttcagacaacatttcacccctagtttgagctgctcttagaatgaatgtggccaggttaatgtgaccagcagacataatgcaaaaccaaactaaggtggtaaattggcatcttggctttgttgcacatgcaggaaagatccaggactggtgtcagaggtatactgtctttggcagaagagtgcttgtccataaccagagtacaagagaggaagtcatactgatttatattaatcttcatttcatatgctaaaaaacaaaatggcaaccatttctctaggaaattgctaaagctgactttatagacatactttttgagggatccatatgctttaaataagttgataggaaatgtttgctatatcataactcaaaaaatattttcttaattttgagaatgcggaatattgagcaagacataattatcttccctaaaatgaatttacttttaaggtgactctgcattttcttctttttctttctctcattttccctccctgattcaaggaacttattaattagctggttttatacacgtattgattttaacaagaatatggaaaagccatgtttctttcaggatgagaaagatttgaaatccaaccatgaaaaatgaagccccttgtatttctggctgcattcccagaatagttgtgtgtagtataattattgaacttttaatacctgctcaaattctgtctggattgcagaggattacagcatcacatctaaattatactttctgataatattcaaatgtgaaatagacattgttgtgtggaggcagtgacatcatcataattttcaatgttttaaagtgtcagtggtaaagggagtttacaagcataggaagagaacacaggctttacgttgaaaaaggtctctgtcatccagggggttatttaatgctaataaatacttgttttggaatggatggaactaggttaagtgtttacagccaaaactttctattttcctctaccaaagagcagggttctcctaatactgacctactttgctcttagacaatactacaggtacagtggttatacatccatgaagagaaaaataaatgagaccagaaagattttttggtaggaagtgtttggtaacatgttgctttgttggtggaacataatgttgccacaaaccatgaataaatattctgaattatctaatattatagcagttataaccatttttaagcctcctttctaagtagatatttctctcctggcttcctgtgctgtgaactttgcaaaactggcataggcagcctattaattattcatatcatagcaacaattaaagcaaattaaaaataaaaatcaccgtattgcatttaaccgtgggcagcaccaaactgtgtcagctctgtaagggcctgtggtgtttccttagttaaaagtgctagagggagctctaaccttgttcagagtggtggcatatgggaacaattgtctgtatgtggccataggtttgcaagtgaagatatagtctcaggctcttctgtggcaaaaatttaaatcttttttattagaagtccctgtttcctttatatctgaaaataagggctaggacagtctatctatagccaaacagaactgtgttcatccttattgccctttctgtgaatacaatcatagtgaattttcacgaagtgaacatacctgtgtgattaccatcagattttatttttatttttaaaaaattccagattaagttcacatccacccagattttaataggaaaagagaaatgaaaagaccattaccggagcccactactaccctctttaagtcactaccctttcaagggtaaacattatcctcacttctaacaccatacattagttctgcctggttttgagcctcatataaatggaatcatatagtatttttttttttttactgtctgaattatttcactgtttttgagagtcatttatattgttatgtatgtatagttataatttgttattgatatgtaatatttcattatacatatatgccataatttatccattttactataagtgaacattgggtttctttcagattttcataactacaaaaaattattttacatatattttcctgaatatatacaatgagtgtatttgaatgggtatattaaccagcagaggaattggaatttccaaactagcaccaatttttatacagcagtgaataaaagttccatcattcctttttctcaccaaccaacacttggtgttgtctacctttttcattgtagcattctggtgatacgtagtagtattatgtatgacattttggattttgttttaagtttttattttagaggcatggcttcactctgtcacccagtctggagtgcatcagcgcaatcatagctcactgtaacctcgagctcctggcctcaggcagtcctcttgcctcagcctcccaaagtgctggaattactgactttttttaaaattgcaatttaaaaaataataataatataaaatttaccatcttactatttttaagtatacagtttattagctttaagtgtattcacattgttgtcacattgtttttcattcacatttctctgaacactattaaaattgagcattttttttatgttgattggccatttggatgtgaagttcttgttcaacgcatttgccctttttttaattgggttttatgtatttttcttaaagatttataagagttctttataaattctggatacaggttatttgtctgatgtatgtattgcatatatttctcctaaactgtgacttgccttttcactttttaaatgatgtctgtgatgaacagaggttcttaatttaagagtccaatttatggatctttgccttatacaattagtgtttttacattctacttaagaaatctgcctgtcccaatgtcttaaagacattgttttatctagtttttatggttttacatttcatgtttaattcgtttgatttttgtatatgatgcgtggtagaggtgagaattctttgttttccagtgtgatacccagttgacctagcaccatttattgaaatgtgtagttcccattataccggattgttttctttgaccatatgcttataggtctttatcaaaatcttgaactctgatagtaagtgccctagctttgttgttactcttcaagattatcttggttattcttggttattttcatttccatataaattttagaatcgccaatatttaccagctgtgtgatccacgccttgtgtactacagcacttgaacgtggaacagtcttcatatatttgtttaaatatgaatatattaaagctgggcatggtagtttatgcctgtaatcctggcactttggaatgcccaggtggaaggattgagcctaggagtttgagaccagcctggtcaacaaagtgagacccctgtctctacaaataaaaaatataaaaaaaatttatccaggcatggtggtgcgcacctgtagtcccagctattcaggaggctgaggtgagaagatcacttgagcttgggaggttgaggctgcagtgaaccgtgatcatgccactgcactccaggctgggtgatagagtgagaccctgtctatcagtcaatcaacccataataaataaacgaagttggctgggcgtgatgactcatgcctgtaatcccagcactttgggaggccaacgcgggcatgtcacaaggtcaagagatcaagaacatcttggccaacatggtgaaaccccatctctacgaaaaacacaaaaattaactgggcatggtggcacgtgcctgtagtccaagctactcaggaggctgaggcaggagaattgcttgaacctgggaggcagagcctgcagtgagccgtgatcgttccactgcactccagcctggtgacagagcgagactccgtctcttaattaattaattaattaaagttgagatatatattgacatatacagagagagtgattttgtgtgacatatacacacaaaaattccctaagttgtagtttcttctgattttgcccagagccttttaacctggctttcttaagctgctttttttgagatggagtctcatcctgtcgcccaggctggagtgcggtggcgtgatctcagctcactgcaacctctgcttcctggattcaagcaattcccctgcctcagcctccctagtagctgggaccacagacatgtgccaccacgcacagctaatttttgtatttttagtagagatgggggtttcactattttggccaggctggtctcgaactcctgaactcaggtgatctgccccccttggcctcccaaagtgctgtgattacaggtgtgagccaccacacccggcctccgaagctgctgttacgatctaaatcacatcataactcttttttcttttcttcacaattctatcctcagtcccataagctaatggtggccacacaggttagcacatttttaaagtattttagtcataattcccctcctggggaatttggcattaagtttctattaaaactacagttttaaagtttagtgggcacgtcctaatacagcctgaattgttgagatggtttcttggtgctagaaaataataatagcaggccagccgtggtggttcacgcctgtattcccagcactttgggaagccaaggcaggcagatgaccgaaggtcaggagttcgagaccagcctgaccaacatggtgaaaccccgtctctactaaaaatacaaaaaaagtagctgggtgtagtggtgcgcgcctgtaatcccagctactcaggaggctgaggcaggagaatcacttaaacccaggaggcggaggttgcagtgagctgagatcatgccattgcactccagcctgggcaacaagagcgagactctgtctcaaaaaaaaaacagaaaaaaataataataatagccacctttagtaaccatgtacatgctagatcctgttccaagtatttcatatacataatctgttatttcatatgacaattgtaggaagtaggtggtattagttttgtttacagggggaaaaagtgaagcttaaagaaggcaactaacttgttcaggtctatatagcttgtacatggcagacacttggcctgtacctgggcttgtctgacactatgcagtactaccttttttttgagacaggagtctcgttctgtcgggctggagtgcagtggtgcgatctgggctcactgcaacctccgccttctgggctcaagcaattctcgtgagtagccgggattataggcatgcaccaccatgcccagctaaatttttttgtatttttagtagaggtggggtttcaccatgttgcccaggctgctgtcaaactcctggcctcaaagtgatctgcccacctcggcctcccaaagtgctaggattacaggtatgagccaccatgcttggccactatgcagtactaccttttaaataattatgtatcttaccacctccataaataaagccctgggtccttcatattatatttaagaatataccctccaaaatgtcttgattctgtctttgtcacacccctaacccccattctcactgctgctctcctagttcatgtctattctgatatcagcccactcttccatccttactatgtaggcctacgagattgctcactatcaaaaaatgctatcaccacagaaagatgaggttacaaattctgcttctaccttccattgaaacttaattctttcaaatggaaatcaagcctcagtgcttgtccatattcatttagttattacaatagctagtatgccaccttggtcttgagggcacttgatggactttcgaatctgaaagaaaaagctctctgcaatacagcaggctatggactataatgctgaaaatacaactggcaaagaacagtggccatctgatcatgagctcttaataaagttttgagaggattccaatgggttttttatatctagttgcagacttttcttgtggccctactgtggttgtgcactgcttaatgatggggatatgtatgaaaatgtgtcattaggcaattttgttgtattgcaaacattatagagtgtacttccgcaaatctaaatggtacagcctcctatacacctaggctatatggtatacctattactcctaggcaacaaacctgtacaccatgtcagcatactgaatactgtacgcaatcataacatgatggtgtttgtgtatctaaacatttctaaacatagaaaaggtatagtaagaatacaatactataatcttagggaccgtagttgtatatgcagttattgactaaaatatcatcacatggtgcatgactgtactttgatttggccctaatggagaccagttggtgtatataactttttgccttcttatgaagcaaagggattattaataaagagatagattcatgtatagacagttttctgaaagcctttattaaatactggaaactgtggggagggatagttggggtaattatcagaagagttgatgtgaaagaaatgaggcatattgaaacagaaaacttcaagaaggcattactagggcttcagatcctagtgtcagccatgaagaaggctaaaaccttaaagcttttaagattttaaattattaattttaaagtcagcatgtagaaaagtcagagaataataatattacctgtgtacctgtcactcagaatgatagcatttctttgcattaaaaattcaattgtttaagaaaagtttgacctattcttggggttatagaatatcttgcttgcccaaataatattgtgaaaaatgttttttaaaattcgagggccaggcacagtggctcaagtctgtaatcccagcactttgggaggccaaggcaggtggatcacctgaggtcaaggagttcaagaccagcctggccaacatggcaaaaccccgcctccactaaaaatacaaaaaattagccaggcatggtggcacacgcctgtagtcccagctactcaggaggctgaggcagaattgcctgaacctgcggggcagaggttgcagtgagtggagtacactgcactccagcctgggcaacagagtgagactgcgtctcaaaaaaaaaaaaagaggtgtatgcttaaacgccaatatgatgggttttaagtaagaacatgtgaagaatgaatctctatttttaaatttatgtacgcaattttattttaacttacagtagaactggattatagactcaaagtttaagagccagactgagcttcagataatcccatccactcactcatgttacacatgaactcccatgccagcagatacttcccccaggttgtatggctaattagtgatttagactgggcctaaatctctttagcatcgtgttgcctcacttttgctttcaggctacattaaaacatttatgtcaactataagaaaactttttgatgaatggtttgtttccagagcatcaaagttcagtatgtattccttaaatggaaaatagaaataaactacagtgtttgatacatagaaaaattccatgggaaagagttattagtactcttgagcctcgtatttatagtgctccatatgaacttaaaccactcccaggtaaaataaaaaggttaggtagtaaaccagaaaatgtctttatagaaactatttcatgctctaagaaaagccaagttcttcaaagaaaggatacaagtcctaattttaaatcagatgcataaattttatggaggtgactgtcttcctgattttcattttcttattacaacccctcttcccagaaaacacctacacaaaacccctggtggaagtttgtcccattctaggttaaacaaacaaacaaaccatttttagtgaccctcaaaattctatgtcttttctcagaaagaccaaaaatctgcaatctctggtctatgaaaccccattaaaaatggtgcccatgtaggggacatataaataacctccaaagttacagggtagtagagtttttctgcctatttctgagagaaaggaaagtggatgctgacaacagccagaattttagtctggtttctgccctggctcttgtctttgctgattctaaaacaatgccacaaatcagaaggaagcaaaatatactctgtgccctacaggatgttagctctttggtagaaattgttcaagtggattttaaaaattagagtaatgcactgagagtcttgttaccattctgataatttccttactgttcttccttccctgaagttgggtgttatgggaaaacattgtagcaatagctctgaaagattgaaaatgaaaaaaaaaaatcaatggcaaatgtcttttattccatattgtagaagatctttgagggcttccttttgctcttttctgtcttcaattattaagtttcatgaaacattaacctactgttagtcttcattccttttgggagttcagttttactttggttcttaaatttttgcataccaatcttagaaaatggattagattgccaaatttgagtgcctatggacaaagcatcaatatagtgatagtagcatccttcttggtgagagaaggggactccaaatatgtttacaccacaagacattttaccactgtactcacaaaaagcaatacccacctcctcgttcatttagattaacagttcagtttatcaaatatttttgagctgctgttatatagatactgaaaacttatgtgataatctattttaaagtgaaagtttctggacataatattattgtaaaagcaaagaagagtatatttaaatatagtgaagcattaagctaattataataagtaactatgtagattacaatcctttttagttaaaactcatcacaacttatgcccttactatgtgccaggtactctttctgaatacctttatatgtattattttaatcttaacattagcccttctagctaagtattgtaactatcaccattttatagatgaggaatttgaagcccagagaagttaattaatttactgaagatcacactccaggtaaatagtagagctgggatagaatcagtgtcaaattatgattttttaatgatattctattacataaactccttcagaaagacatttaagcttgcttcagtgtggcactttgagtctcagtgcatatgtaaacctcttttggttatagaaatgcatttatccatctatgcaaagcagtcctggtcttctacatttagtcatagtcattgacttggagcttcattgtcattgaaaagaggaagaggaccagaatttcattttagaaaaactgttcagcttatataataactgcattttgaaatctgaactttactaacttgtgtgaatctgagcaagttattttgatcacctgtgctgaaaaaacagatgctgcatctaaactaagcttttcctggataaattaagaaaacaattaccaaagtattccagagagaaatgtcttcagtcccttgatgttcccagggttattaaagttttacctgaagataaccaagacttccagaaattacaagtcatttacttcattcactgcagctaagagaagcttgtgctgctgcctcatagaattatttcttgctgcatttaacatgcattaacaagcatttgaaaagagttgaatttcttctagaaagttgagttggcttcttgagatcctatccaaaaaactttgtattttcctaatcccagttttagataaagccttctcaaaggcttttttcaggagcaagttttaccaagttgttgaggcctttttatagaacacagaaattgaaggattagagcacaaagaagagcagggtagttttttccttctttatttaaacccgactgtatttttcccatacactttttaactgttttacatgtgcctctgtgttttgctctgacatctgatgcattccctgctaatgttagaactgaattttctgatgctaactgaagggagaagggtgttgggggtaagttgggcagaagactctcagtttcaactttcagcatcacagaaattttattctggtaatcttaacataatttgacatctaggtgaacaacctccacctgaggaagttacacagaaagaacaaccagattccagacaattaaactttattactccgcctgaaacattaagtagtggttttaaaaaatagttttttatctcctctccctcttgatgtttattgtgtgggagaggatgtttgtccaacaagcatattgctcctcttagagcaggtgagcttggtaatgctgggtcccttttgcatttggttatattcattctcccccttcccacctatttctcacttcatctctcctgtagccatctccctccatctcttccccagctcatcatctctccccatccctatctttcccctagacctgcttatccctcttccttcatccttatcccatctctcaccaaccccactgcctagtatccactgtcctttccccaatcctcggtcacttttgtcattcctcttcctcttctaccctcttctctagccctagcccttcctctccttgcgttcctccttctgctttcccattttcccccttccatttcccttttctttctctcctcactttctctccctttgactctctttcttttctcctctttcctcccctcctttcagctcccctcatcacaataacctataattctctgtcctccaggatcagatcttgacttctctaacagcaaagattaattttgcttgctctgatcaatttgatattatgaacaaagaattctctagatggcacagatacactccccctcccccatattcttcaaatatttgactaataaattttaaaaaaattttgttttctttttgagatgaagtcttactctgtcacccaggctggagtgcagtggtacaatctcagctcactgcaacttctgcctcccgtgttcaagcaatcctcctgcctcagcctcccaagtagctgggattacaggcgtgcaccactgcacctgagtatatatttatatatatatatgtgtatatatatgtatatatatatgtatatgtatatatatatatatatatattttttagtagacacgaggtttcaccatgttggccaggctggtctaagactcttgaccttaagtgatccgcctgcctcagcctcccaaagtgctgggattacaggcatgagccaccatgcctggccgttgactaatacatttttaaataaacagaaagatggccgggcgcggtggcttacgcctgtaatcccagcactctgggaggccgaggcgggcggatcatgaggtcaggagatcaagaccatcctggttaacacggtgaaaccccgtctctactaaaaattcaaaaaaattagccgggcgtggtggcaggcgcctgtagtcccagctgctcaggaagctgaggcaggagaatggcgtgaacctaggaggtggagcttgcagtgagcagagattgtgccactgcactccaacctgggcgacagagcgagactccgtctcaaaaaaataaaaaaaaaaaaataataataaaaaaacaaatatacccaccaaaatgtgaacattatgtctttgttgatagttgaaattatgggcaatttccatgttttttgtgtatctgaatttttcatatttactaaaatgtgtctactgtaaatgctatttttagaaaatgaattaaacattctttgcttgaccccccccatagatctttatttaatcaaagtgaaaacaaaatgactcagatttgatcctttttgaagatgaatttggtttgctattttgatgttcagttttccaatttttttttttttttgagacggagtctcgctgtgtcgcccaggctggagtgcagtggcacaatctcagctcactgcaacctccgcctccaggattcaagcaattctcctgcctcagcctcccattagctgggactaccggtgccggccaccatgcactgctaatttttctatttttagtagagacggggtttcaccatgttggtcaggctgatctcgaactcccaacctcaggtgatccgccgcctcagcctcccaaagtgctggggttacaggcgtgagccacctgtagttttcgcgcctggctagttttccaaatttttttacctttcaaaatgggtggccctttgaactgaagcatgaagccatcagctcattggcactattgtagcacatggtgaatgttaaatacagttgctcaagttaggcttcaactctaagtcctataagacctttcctgcctttctctgtcctcccaaaatttagctcatgtttttttgtaatatttcaatattagagtgttcagtctgatagacttggcaatttttatacagatttgttttcagccctgttatcagtcttgggggtggggaggacaggcattgatgagcagcagttctattatataccttgtttattgtccttggtagtgttggttataaaaagtgtaacagtcatgctgtaccaagccaagatgccaactctgccatagttaaatgttaaaattccaagctcagattcaaaattgactgaaaggaaatctttcagcagactatttcaatctcagttgactaaccctaggtatgcaaggtggatggcaaggctagatgaagtgctctaaacaactgaagtttacttatttcctagctatagtgtactcattgtttcacaaagggttaaattatgtagttagtgaatgcttttctagctgcaggggtttttgaaaagagatctaggaattctgcagttaattgaattcttcaggcatggactcagggtctctgaaaaaatttgagtgagcaaaattctcttgctttgctcctagatatagttcataccatgtcttaggaatccagaattattttttgaaggattttatgcctatatatgctgactgaacatttaataagataaccacgacattttaaaagattttatacaatgtacttgtttccttgcattgcccttctccctgttttttcttctcttacttccccaagtctgtatcactggggcttttttcccattttttcccatcttgtgagcaaagttttaacagtacgtagaaagttaactgcctggagtcttttaaatataagtaacacgcaaccagtaataagctgtcggttgattttttgctgcctgcaaagaaacataaacacagcgctcatttctggcaggtttttactgtcagagtttctcctattatatttatcttacaatttgccagggggtgaagttattaagttttagcagcagccatcgatcaagttcacaagttaacacgataaaggctctgtgccgctccgatccggggaaatgatgatcctcactcggtaattaactaaatgagaaagttaaatcttacttgagagctgggagagatgaaagagaggtgtttgtcagcttctcagtggaaattagaagcagttttctgcaattccctaagctgctgctctgtcatattttacataagcactgggaaaatgtcttgtaattagtgctgtcatggaagatttttttttgctgaaggatgttggaataattcattagattatcaagaaaggctgtgtcctgaaatgattagcacagtgaaatttaaaccattaacgataacaagtttagagcttgctgcagtgcagaggcaccccgggtatgtctgtgcctatttcaatcatttcttataattaaacattatgtcctttttttttccctcaccactaggacccatccaaaaatccttttaaggtggcactatctacatcagtgggtttaccagccttggaggtgtgtgtagttagtagctataataatgcaacagtaaattaaactgctgtgaatttcttggtttagaacaaaagaacctatcaccctggaagctataaagttgcatgagggggccaataaagaagcttgagtttcagttttgaaacctaaaaatgttaaatgactatcctgtccctttaactatgtcagaaatcagaaaataatgaaaaactgctttgttctgaatttgatgaattttatatatgacttttcctatagttagtaaataggaaaaaaagattggcaagtgtccagtcattaaataatcatatatactgggcaatgtcagttcatttcctactgggctttatttaaaggaattggaatgactgcaagctttttcttgttggttattagaaatcattcagattcataatgtgaactttccctctactgacaaatctgccccttcctgtcttccatgttcactaatcagatttgacatgtttatgagttcacctaatatgtaatcatatttagtagaggctgttaaaatattaatataataatcccactgagaaatatgatgtttacttctgttgaaatgtgtgccccattctatatgtaccattttcttttcatttgcactcccacttcccaccctactccaaaaaaaggaatggactactcctttgatcactgagagttataaagtttaagaactaaaagtaggctgggcgtggtggctcacgcctgtaatcccagcactttgggaggccgaggcgggcagatcacgaggtcaggagatcaagaccaccctggctaacacggtgataccccgtctctactaaaaatacaaaaaaatagccaggtgtggtggcaggcgcctgtagtcccagctactggggaggctgaggcaggagaatggcgtgaacccaggaggcggagcttgcagtgagccaagattgtgccactgcactccagtctgggcaacaatgcaagactccatcttaaaaaaaaaaaaaaaaaaaaaaactaaaagtagaatgttaaaagttattatcccacttttgaacattaatttccttttttctgcatgttcaatttgtagctaaattctttcagtttatcttgaaatctccttgtaaaaggatgctcaggtgccaatgggcgctagcccttcggggttccttttcttttccattctagctctttagaaatctaggtctccctgctatcaccatcttcatcactaggtgtgcttacttatctctttccattctaatcaaagtgtaaacaatcctatttcctctcaattcaagcatgacagtggcaatgtggatttttttttttttttttttttttttttttgagacagagtctcgctctgtcgcccaggctggagtgcagtggcgggatctcggctcactgcaagctccgcctcccgggttcacgccattctcctgcctcagcctcccaagtagctgggactacaggcgcccgccactacgcccggctaattttttgtatttttagtagagacggggtttcaccgttttagccgggatggtctcgatctcctgacctcgtgatccgcccgcctcggcctcccaaagtgctgggattacaggcgtgagccaccgcgcccagcctttttttttttttttttgagacaaggtctctctctgttgtttaggctgaagtgcagtggcatgaccacggctcactgcaggctcaacctcccaggctcaagtaatcctcccacctcagcctcccaagtaactgagactacaggcatgcaccaccacacacagctaattttttttttttttttttttttggtagagatggagtctcactatgctgccaaagctggtctcagactcctgggttcaagcagtccttctgccctggcgtcccaaaattctgggattacaggcatgagccaccatgcctgactggctttttttttaaagatgcttttggccgggtgcgatggctcatgcctgtaatccaagcactttgggaggccaagacaggtggatcacgagatcaggagtttgagaccaacctggccagcatggtaaaaccctgtctctactaaaaacacaaaaattagctgcgcgtggtgttacatgtctgtaatcccagctacctgggaggcggaggttgcagtgagccgagattgcaccattgcactccagcctaggtgacaggcaagactctgtctcaaaaaaagaaaaaaagaaaagaaaaagaaagatgcttttacaaagaaatcaaaggaaaataatcggaaaaagatcttttaaagtcattatttttggccgggtgcagtggctcacgcctgtaatcccagcactttaggaggcagaggtgggtggatcacgaggtcaggagatcgagaccatcctggctaacatggtgaaaccccgtctctactaaaaatacaaaaaaatttagccgagcgtggtggtgggtgcctgtagtcccagctactccggaggctgaggcaggagaatggcgtgaacccaggagttggagcttgcagtgagccgagatcgcgccactgcactccaacctgagcgacagattgagactccatcttaaaaaaaaacaaaaaaaaaagtcgttgttagatgtttatttaattaaaacctgacaacagcctctagagagtataatatagacttttaaaaaatctcttcctttccccctcaaaatccttgtaagttttgccttgtttctcctggccgcaggagcaagaacactgttgtatccccatccagattaatgtaccagactaaatatctaaaggatcagccttaatgaggtagtaaagtattatactaaaataaatgtatattatgacccagacttacaattctcaacaggggatttctcctcctttggtttctcctccttcatcctctgtcatgagagttaaaatacctttcttttaaacatttcctaatctgcctaatctaatcctagccatagtcacattttgcctggattattttatcagccttctaattgatctttcttcctctgcttttgcaacttgctcttattatcccctccccacctttccagcccctgctccattctctgtgtggcagctagtataaatatttgtaaggcacaaatcagacaatgccatatgtgactatttcaaaacctccaggggctctcctttacacttcagatgaaatctaaactctgtaggatggcctagaaggccttatgtgatcttagccccagccaccttaattcccaccatttttccttaattcccaccattttcttattcattctgcccagccacattggccttctgtctttcacttgaacataccattgcactagctcttccttctatctagaaggatcttccccaagatcttcacaagactgacatgtcattcaaatctcagctcaggtgtcacttcctttagaggcatttcttgaccactccagttaaagtaggctgcactctttacttcttttctttttcttttctttttaaacatgatctcactctgttgcccaggcgttcaagcagttctcgtgcctcagactcccaagtagctggaaccacatgtgcgcaccaccatgcccagctaatttttgtattttgggttttttgttttgttttgttttgttttgttttgcgacagagtctcactctgttgcccagactggagtgcagtgggcaatctcaggtcactgtaacctctgcctcccgggttcaagcgagggttcacacaccatcaagcccagctaatttttgtatttttaatagagacaggatttcgctatgtatgcctggccaggctggccttgaactcctgacctcaagtgatccacccaccttggccttccaaagtgctgggattacaggcgtgagccaccgtgctggctgtattaatagagacgaagtttcactatgttgaccaggctggtctcgaactcctaacctcaagtgatctgtccgcctcagcctcccaaagtgctgggattacaggcatgagctgctaccatgcctgcctttactccttattttatctttctttgttttcttcacaatccttactggtttgtgaaattaacatatttatatatgttctttctccactcctcttcagagaaggcaaagacactttgtatgcctgttcacagcagtttccctattacctggtaaagtgcccagcatagagtagtcactcaataaactgttgttggttgattgataccactaaagttccaggtttagtcaaaattgttgtcctgcccctcctaggctacagccttatcccctgcaaaacccttgcctattttattcttaaattaattcagcatttaatcattatatcccctttccccccatagttctcaatgccagagcctttccttaaagcctttctcaaagccaaatggaatccttagatatcttttatcatttgcatctttcttgtcataaatactttgttcatctagtccttgcaaccccagtactaaagagtgtcctatgtctggaatgtctttctctacttactatacccttccttttggttaaagcagatttggatgcaaactagaaatacttgtcatttcaccataaagttcagtcagtccactatgtatttcccaacctatacataatacagttagtaaagtcagcatacttagtattacaatgatagttgatgatcaagccagttggtgtctgcaagtgtctatttttccctcctggcccaggctgcagcttcagagaaattcatggtaattttgaaagtggtacgtgaaatatgttttcggagaggaaactagtccctagcctttgagaactaagctgaaggacagttccagaaatacttaactcctttcattttgtgtgcttgtcacctgacagcttctttctttcttgtggagacaactgttcactataaacaaaaaagaagagggagatgtgcaggggtggcagaaatttagtgttaccattaagctgaggctgtttgtcagctttccaagacacttgaacagtagtggttgagtcatcaggcttttgttgggaaagccaaatcaattctactgcaaccagtaaccattatatctctcatacactctaatatacaaccttttgattttttaataattgaactttttcattgtgtccttgtagattttcagaagttctcaaattggaattttgctgaatttactttagataattgtagaaaaatctgtattggagaatggtagaagaaaggggcatgacaacaaagacctttagatttctctacaaacataataccttagttacaaataaaattcatattacagtggatttatcagtaggaatactgtactcttagaagtttttttaaaataactttattaaaatataatttacatacaataaaatacacccattttaagtatatagttcaatgaatgttggcaactggcgtaacaatcaagttagagaacattttcattgtcccaaaaacatcccttgtacccttccccagtcagtcccatctctacatccagcctcaggcaaccactgatctgtttttctaacaattagaattactgttcctagagtttcatacgagtagaatcataatggactcatttgtacctggcttctttgattcagcatgtttttgaggttcatctttaccattttgtgtgtctgtggtttattctttttgttgctgagtactattccattctacagcagcatcacagtttgtttaccagttaatcttttgatggacatttggattattaccattttggatttttattaatatggaagcaaaaaacattaaagtaccagtctttgtgttgaactgtgtttcgttttaaggaggtaagtacctaaagtggaattgctgggttgtttggtaagtatatgtttaactttacaaaaaactgtcaacttgttttccaaagtagttgtaccattaaacgtgactgccaacaatgtgtgagagacccagttgttcctcattcttgtccacacttagtattgtcagtcttttaaattttagccattctaataagtgtgtcataatgtcttgatattttaatttgcatttccctaatgactaataatgttgaacatcttttcatatgcttattggcatctgtggatctttttttgtgaagtatctgttcaaatcttttgcctatttaataaaacaggattttttaaaaattattattgagttctaagagttctttatagatgctggatacaagtcctttgtgaaatacatttattgcaaatgttaataaaaatgacaaatcatttttggaaatcatgttttgaacatgccaatttactgacttttttttccttttataatgtttgcctattccaagaacgtcaaggttttctcctgtgttttcttttagaagttttatagttttagctcctatatataaatctagaattaagttaatttttgtatatgatgtgaagttaggaacagacttcatttcctctatggatatccaattgttgaaagacaatcctttccctatttaattttttttttttttgagaaagctctgtcacccaatctagagtgcagtagcacaatctaggctcactataacctccacctcccaggttcaagtgattcttgtgtctcagctgccctagtagctaggattataggcgtgtgccatgatgtccagctaatttttgtatttttagtagagatggggtttcaccatgttggccaggctggtctcgatttcctgacctcaggtgatctgcctgcctcagcctcccaaagtgctgggattacaggcatgagccaccgtgcctggcctccccattgaattatcttggcatctttcttgaaagtcagttggctgtatgtatttctggactcactattcctttccattgatctacacttgtgtccttacaccaaagccacactatcttgattactattacatatcttgaaatttactagtctgagtcttccatcttttttcaaagggttttgtggttttttagggttttgtttgttttgttttgttttgtttgagacagttttactctgtaatccaggctggagtgcagtggcacgatctcggctcactgcagcctccacctcccgggttcaagcaatgctcctgcctcagccttcagggtagctgggattacaggcatgcaccaccacacccggcaaatttttgtatttttagtagagacagggttttaccctgtcagccaggctggtctcaaactcctgacttcaagtgatccactcacctcagactcccaaagtgctgggattacaggtgtgagccaccacacctaaccgttttttttattttcaggaatattttggttaagtttaggtcctttgcttttctttacaaattttagaatcagcgagttaatttgcctgctgagactttgatattgcactaactctataggttgatttggaaagaataaacatcttaatagatccaatttctgaatacagtgtatctctccatttatttaagtctttttaaaatttccctcagcaatgttttatagttttcaatttataagtattacacaaattttatccattttttttttttttgagatggagtctagctctgtatcccaggctagagtgcagtggcgtgatctcagctcactgcaatctccacctcccgggttcaagtgattctcctgcctcagcctccagagtagctagggctacaggcatgtaccaccacgcccggctaattttttgtacttttagtagagacgaggtttcaccttgttagccaggatggtcttgatctcctgacctcgtgatccgcccatctctgcctcccaaagtgcttggattataggcgtgagccactgctcccaggctaaactttatcaaatttatttctgagaattttatgtttttatggtactacaaattgtataggtggatggttttcaaaaaatgtattcttttttaataggtgtaggagtcactctcagggtgactagtgacctgaaaagggacacaaagggggctagtgagtctcgtgatgatctgtttcttgatctgggtgttggttatgtgagtatgttcaccttgtgaaaattagttgagtacatttaagattaagcatttctatttatgttatactttaatgaaaattaaaatagaaaaaatatatagtgaaaaagaagaatgtactttcaaaaagagagggaaggctcagctccaacagtgttataagctcattaagagtgttgattgacggaacacttgactgtatgctaggtggtgtgctaagcatgcttttcatgagggttttttaatttgttccttacaaaaacccaatgaaatagaacctattatattattttcccagttttatagatgagagaattagactcagaaggatcaagttatttattccatgtcacacagctgctaaattgaagagctagaatttgaaaccaggtctttttactccagggccaaagcttttaaaacaatacagtatggggtagtggttgagagtaacccatttgttaatggatctcaggtatgtgtctttctgcctcatcaaaaaaatactcgttttgaggggtggtgactaaaatgtataccagctagaatagcccagaacagttgataaatacgtgaaatctcagtttatactttatgtctaataaccaaatgtgtaattcccacttatgacttgatcattgaaagtatcacaaagtcttatctttagcttctgcagtaggatacccagactttttaaatccttaggcagttttacctaacagtctgatagccactgatcaaagcatgactccttatgattatagcaatatctcgtttatttaatgtataagtggaataatttcattaagctgctgattgttcttctctgttactggcattctggtctttatccagaaaacagtactccagtagcacccaactcatgtccatttccaccttttaaaagacaaagggtgcattttaaaaggcaaatatataaaaaatgatagagtttgggaggttttcattattgggattagaagtggcatttagtcaagcttataagcctgcctgtgtgttagttctctaaatcttcacatttcatgagttttcatttctgagatacaaactaataacttacacaaaaagcagccctaaactcccccaaggcctgtgtccaacaaggttcttagtaatcatttttagtctgtatcataggcaacagtggcatttatgctagaaaacatccacctcaacacaccaggattacaggtgtcagctccttctgtgtatataaaatggcctaatgccattcttgaaaatatgctttcagctgtgtatctttactttgtaaagagccctgtgtataggatttaacatctagaaaataagcaagcctcaagagttcagggctgcagtgagctatgatcacaccactgcactctagcctgagtgacagaacaagaccctgtttctaaaaataaaagtaaataaataaaagaaaataaggcaagcctgagccttgaaatgaattatctaaatgtggtacagttttatagcatgttccacattgagtatgtctgagcagggatgaactctatggtaacatgggtctttctgccacatttgggttgccttaagtaaatatgccaaagatccatcaaattactttgaaaagtacccagttgtacccatttgtgattatcctttaaagaaatactttcttcagagtagcaaaagtttctattgatttctgaatcttttcccagtgtcccccagcttcaaacttgggtgtgattttgtctccttttttctcatactcatatccagtcgatcagcaaattcagtaggatctgtcttcagaatatacactgaatcccaattatttctcaccacctccatagctaccactgtggtccaagagattgttctgtcttccatggactgttgaagtagtgtctttttttttttttttttttttgagacggagtctcgctctgtcgcccaggctggagtgcagtggcgggatctcggctcactgcaagctccgcctcccgggttcacgccattctcctgcctcagcctcccaagtagctgggactacaggcgcccgccactacgcccggctaattttttgtatttttagtagagacggggtttcaccgttttagccgggatggtctcgatctcctgacctcgtgatccgcccgcctcggcctcccaaagtgctgggattacaggcgtgagccaccgcgcccggccgaagtagtgtcttaattggcctccttctatttatgtcccatatagttttaaaggaccacatagcagtggtccttttaaacggtgtcagattgtgtcgctattatgcttctgggtgtttgcccatgtggcccctctgtatggcttctcatcctccatacctgtctctttctcagattagcctgagtttcttacatggtagctcagcgctctaaggagtaagcagaagttgcctgggcttagaagtcccagaatggaatgcaactttctccccattctcttagtcaaagcccagattcacagaataggacataatctccgccttttgatgggaggagtagcattcatgtagagggagggctggagttgctggggccaatctgtggagattagttaccaccaccggaatgaccaggatgatttgaccctggctacttctccagccttaacttttccttgctcactctgttccagccacaccaggccctcttgttccttgaacatcccaggccgactgccacccaggacctagggtctcaaaatttccattgcctagaccattcttcctcgctgtctagtcctcatttccttcatgtctgagttaaaatgtcacctttttcaggaaatgatctctaaccacttaaataatcctattagttttttgttaattgctgcctaatcaccacaaacttagcaagttaaaacaatacgtatttattaattctgtgtgtagttctgagggtcagaagtgtggcacatagtggctgggttctctgctgagagcatctcaaggcttaaatcaatcaaggtgttgggctggactgagttctcatctggaagctcagagggaaaatcctcttctcagctttttttttttttttttttttgagatggagtttcgctctcgttgcccaggctggagtgcaatggcgtgatctctcctcactgcaatctccacctcctgggttcaagtgattctcctgcctcagcctcccaagtagctgggattacaggcacccgccaccacacctggctaattttttgtatttttagtagagatagggtttcacgatgttggccaggctgttgtcaaactcctgaccttaggtgatccacccacctcatcctcccaaagtgctgggattacagacatgagccaccacacccggccctcagctcattcttgtagtaggcagaattcagttccttgctgttgtaggactgaggcccccattttcttactggctgtcagctgggggctcctttcagcagctagagactgaccacattccttgccagctgtcccccttcctcttctgtaacccgttgaagcaaactctgtgcttgtaaagcctcatacgattaggtcagatccacctgagtaatctccttatcttaaggtcagctgatttggatccctcttttaatgacagcaatacctacattactgtttgaataactcagagaaggtatgtgtacaccaggggccaagagtcttggggaccagccaggtgcagtggctcacgcctgtgatcccagcactttgggaggccaaggcgggcagctcacctgaggttgggagttcgagaacagcctgaccaacatggagaaaccccgtctttactaaaaatacagaattagctgggcatggggttgtgcacctgtaatcccagctactcaggaggctgaagcaggagaatcacttgaacccgggaggcagaggttgcagtgagccgagatcacgctattgcactccagtgtgggcaacaagactgaaactctgtctcaaaacaaacaaacaaaaaagaatcttggggaccatcttagaattttgcctaccacaataacatacttttttcctgtccccttatcctgctttttcttcatagcactacctacattatattttctaagtatttgcttgtattttgtttgtttgtttgtttgtttggggggacagagtctcgccctgttgcccaggctggagggaagtggtgcaatctcagctcactgcaacctctgcctcctgggttcaagcgattctcctgcctcagcctcctgagtagctgggattacaggtgtgttctcctcacctttgcctcccaaaatgctgggattacaggtataagctactgcacctggctgcttctgtttttaatgtgcctttcacactaagagtatatgttagtgatgttagagactgtcatttttgttcactgttatattcctagtaccaaggacagtgtttggcacattatagaggttcagtaaatacttattgaatgaatcaattaataaaaaagacttcatgggaaatacggaatattttatgttatggaaaaaggtaaattgagcatatgagtgttattttagctttatgtccaaaaaggtaccacagagtctcagaatattcattggtttcttttcatgaggaacttcttatttgacaattaaaaaccaagttgttggccgggcacggtggctcatgcctgtaatcccagtactttgggaggctgaagtgggcagatcatttgatgtcaggagttcaagaccagcctgtccaacatgatgaaaccctgtctctactaaaaatataaaacttagccaggcgtggtggtgggcacctgtagtcccaatacttgggaggctgaggcaggagaatcgcttgattctccgcctgggaggtggaagttgcagtgagccaagatcatgccagtgcactccagcctgggcgacagagcaagactgtctccaaaaacaaaaaaaaagttgtgatgacggagcacaatagctcacacctgttaatcccagcactttggaaagccaaggcaggaaaattgcttgaagccaggagtttgagaccagcctgggcaacaaaagaagactccatctctacaaaaaaaaatgttaaaaattagcaggacatgatagtgtgtacctatatagtcccagctactctggaggctaaggtgggaggatcgcttgagcccaggagctggaggctgcagtgagctatgatctcaccactgcactccagcctgggtgacagagtgagaccttgtctcaaaaaaaagttgtgagcaagtaattgtataaatgtccaacaactgttgtatacaagaaaaagcaaattagatttttggcttgctagtaataacatgctttcagcttttggtttttatttgtgtatcttcaaatattaagaatgtcttctgcaaacttttggaaatggatgcttagtcttctagtattatagctgatttaccaactttctatggtatttctgtggttttccacgtaattgctaatagaataacagagtgggctcaatcatgtagacataatatagcatgccataccagaaaatcatatatatttccctcattttcaatactaatcattttatgtttcttttaacccccttctacagacaaaacttgccaatggcacttccagtatgattgtgcccaagcaacggaaactctcagcaagctatgaaaaggaaaaggaactgtgtgtcaaatactttgagcagtggtcagagtcagatcaagtggaatttgtggaacatcttatatcccaaatgtgtcattaccaacatgggcacataaactcgtatcttaaacctatgttgcagagagatttcataactgctctgccaggtatgtctacaagtgtttgtaaaccattaatttgctatgatgataagagaactagatctccagctatatatctctctttaaaagtctttattggcttgatttttacaaattaagttccttaactgtacctttttgatataaagcttttttttttttttttttttttttttttttttttttgagatggagtcttgccctgtcgcccaggctggaatgcagtggtgtgatctcagctcactgcaacactgcaagctccacctcccggcttaacgccattctcctgcctcagccttctgagtagctgggactacaggcgcccgccaccacactgggctaattttttgtatttttagtagagatggggtttcaccatgttagccaggatggtctggatctcctgacctcgtggtccacctgcctcggcctcccaaagtgctgggattacaggcgtgagccaccacgcccagctggtataaagctttaaaaaaaaaaaaaacaaaaaaaaacaaaaaaaaaaaaactctagaaataaagactccttttttttttttttttttttttttttttgagacaaagtctcactcttgtcacccaggctggagtgcagtggcgcgatctcggctcattgcaacctctgcctcccagattcaagcaattctcctgcctcagcctcccgagtagctgggactacaggcacctaccaccatgcctggctaatttttgtatttttagtagaggcggggtttcaccatattggccaggctggtctcaaactcttgacctcaaatgattcacccgccttggcctcccaaagtgttgggattacaggtgtgagccaccgtacccagccaagactccttttacctatcttcttactcatgcccttctattcaacctatttttacccatacataggtccaaataaaatcttttctgaggtgttacctggtgtaagatgtgtcttttataataacacgtcttagttcatgtttatgtacttggatttgtatttctatgagaatatatcaacagaatatttaaattctacagatgggttgggcacggtggctcaggcctgtaattccagcactttgggaggccgaagtggatggatcacgaggtcaagagttcgagaccagcatgaccaacatagtgaaaccctgtctctactaaaaatacaaaaattagctgggtgtagtagcacacacctgttatctcagctacttgggagactggggcaggagaatcgcttgaacccaggaggcagaggttgcagtcagctgagatcacacccctgcattccagactgggcgacagggcgagactccatctcagaaaataaataaataaataaatagataaataaattctacagatgactaagaaacgtttttagttgaagtttttagaaagaaggatatctcataagccttgttgtggtgttaaataaatataaaatgatacataaaatcatttttttggaggatgctgtggtttttctgaatgcttaagggcagacaagaacactgccaaggtgtcagtatttggggggaatgctatttcaggaaaataggagtcttgtgtattcaaagtttattttaagagaaaaaaatcataccagcatgaatgaatcttatattaaatatcattaccttgttaggggaggggttttggttgttgttttccaattatagaagttataggaaacttagaaaatatttaaaaacatttcctagaaccccaccattcagaaagaactactgatttgctaagttattaatattttggcaggtagcctgttttctctacgtatgtgtatttgcctataaagctttgatcataaatgttttgtgaccattttttcttaatacattctcttaatgtatttttctaaatttgtgttctcaaaacatacttttcagttgttgcataatattcttcacaatggttgaagcacatattatttaacccctttattgaacatttaggtagtttcaaaattttttcatattataaaccatatgatgatgaatttttatacattaatcttgtaggaatcctaggggaaaaaatacagacatagaatcactatatattaaggaatgtgaacattttaaggcttttaatacatggtgccaaactatcccctaataaaaatataccagctcatagcctcccaactattaatactactttgttttatatttgccaattatacctttttaaaatttttgtttttctaaactaggaatttaagttgctgtttaaaacaaaagaagtacctatttatatcttaggaataaccactataaaaactgaattttacctatatcttttgttaaacagaatagatttttgccccctctttactcattggattttgttttagccataggcaaatagttttctttgtacaaaacagtctgtgtgtacctcattactttgttctccccagtcactgagacatgttactatctcaagcttataccactaagaattgaacaggagttgattagacctgtgtatcctttacctaatattgatccctggtttgtatccactgaccactctatgaggtattaaatcatcaatctaatgctttatggccatttaaacttataaacctatataccatctggctatgtttagtaaaccaaactacttcaaaaagtgcctgtagtccattaatgtaatgggtttgtttggagtgttaggtgaaattacttccaaagacttatttataggtacatggtgaaatgatcaggaacaatttgatggcacccattaaaaacacaggactgcattttggaaatttctgatggtgtagaaagttttaatataaattgtaccattactgtatttaacatgaagaactaattattatatctttaattggcttttgttcatgttcctttaataagaattgggtaatgcatgtctccatctgcttatgcttacatacgaacatgtgatgccagccaaacaaaatccatttaatgctttctttctcaagtctgctgaaaagtgtgactgatatccatacaatctttataattaaaatgatatgattcaggggaaaggcccaaaatgaaatgccatgttctctttcttgttaagtttgtgcctacgggagtgagagtatgaaggaatccttctgaactatttaagtctgtagaaaacctctgatatgtactttgtaaacagaaataactttgaatgtttttatctcagttgtaaatgtagaacagcaggcaaaagaagtttttttagtgagatcatcctattttataggatcttttcttctgagacctcagtacagatttgggtggtggagaactttaattgggaagcccttctggtttacactccccaagatctgttctccactgttttcctctgcacctcctacaaaatattctctgaaatgctaaccaagttatcttttggtctggaattttttttcatttttgcccaactgtcatttaggttttatagcagcagctactctcaaatatagtttttttaaatctgaaattaaacccattcttgaacttaaacatacatctctgtctttctcttgggatatttccatgccattctgtatttccttcttctctcctttctgcatgcccaaaattctataacccagcacattctgacttagtgcctctcccctagtacatttaaaggacatttcttttaccgaacagctttggaactacagcagtaatagaaacagaatgagaaatggacctaatatagagatttgggggggtctgaatcatagagtttgagatgccatccatagaacatcccctagtgctgaaatccatatagatagatgtgaattgttttctggaatcctttttatttttaatgtcttggggggtttgctggttgttagctttaacttccttatctaaaggaagatggaaaatactgttcatttctgtaaccttatggaaaaattattgacactcattttacccaagcctctgtttgaaaaagaaactggaccacactagggacaatgatgtgccttcatagcagaacaaatgctgttctgttttaaaggaccttttgtaaaaaatcattcgccaccttctgtgttctttttctttgcctcctccccctactgaaagctcggggattggatcatattgctgagaacattctgtcatacctggatgccaaatcactatgtgctgctgaacttgtgtgcaaggaatggtaccgagtgacctctgatggcatgctgtggaagaagcttatcgagagaatggtcaggacagattctctgtggagaggcctggcagaacgaagaggatggtgagcctttaacttttcttactcttatacggcttcaggacctggccattcacagtcactgaaagatttttggggagccaatgagaccacttctcatttaatatggtgattttgttgatttctagcttaaaatgtaacagagaacaaatgttcatatactcagcagtttttcttcttacctgtcactcacaaaatgacatgatattgtattaatactgctttgcaaaaaataatggaaagctgatcagccctcctgtttaaaacattctgttatctgggcagaagttggtatcctgtggctgggcacagtgcgttcacgcctgcaatcccagcactttcggaggccaaggtgggcagatcactcgaggccaggagtttgagaccagcctggccaacgtggcgaaaccccaactctactaaaaatacaaaatttagccgagtatggtggcgtgcacctgtaatcccagctactgtagaggctgaggcaggagaatcgcatgaaccctaggtttctttcagaaaatttcttgcctttatcttatgcctctggtgttttgtcacctttgtaatcaaaaattatttttaagcccaagtggaataagaactctagccatcagaaaaagtgaaaatgaaattaagtataaatcattgtttcttcttaagacttctgtttttcaagattttctgacttaattccgaattccccaaagcatcatatagttagcagtctaagagacttcactaatttttttgttgttctcttaacagtactatttcattagaacttctgaaagatatctttctttaaatacttttctctcagagtatgtctctagaatgtcactataggaaagctacgtagtaatagttcacaaataaaggtgacatattaaatattctcattgacagaaaaaattataataggcatgtgtgtgcttagtgatgtccttccaaattaattttatcagttgtttatcttggatcataaagaggaaaacagttaaaagtagagaacacttttaaaagataaatattcatgggccagctttcctttgaattttcatgaaaaagtagttggctctctttctttttttctatctttgaaatttattaacacataataaatacaatgacctataaatattataccaaatgcctcagatttttatcattctggctattaggaagactgtttaaatttttctctcaaattgaattaaaggaacaaaaaaactaggcaatttttaggctgtgtaacaaagaatattgttggccgggtggggtggctcacgcctgtaatcccaacagttttggaggccaaggcaagaggatcgtttgagcccaggagtttgataccaggctgggcaacatattgagacctcatctctacaaaaaaatcaaaaaattagctgggcctggtggcgcatgcctgtaatcccagccactcaggaggctaaggtgggaggatggcttgagtctgggaagttgaggctgcagtgagctgtggtcatgccactgcactccagcctgggcaacagagcaagaccctgtctctttctctgtctctctctctctctctctctctctctctcacatacacacacacacacacacacacacaaaagaatattattactacttctcaaatatgttttttaattcttatttcgctacatagaaaaatagaaatctttcataacctacttcatactttggaaataaactctttaatagtacaacaaagcaaataaaaatggagttatatggtattcggggtccatcattttgctaagagtgctgggaccagccttggggatacagcaggcagttgcttacatgagaaaattttagggcagctgagaagatttctgtatccctcagaaaaaaagaatctcgtctccaaataactcctgaaatttcagttaaggagattcattcctttagctataaaggttctgttacctgttaaaatacattgtgttcccatttggactgtaaatgacagtaaaccttcatcataaattgggagtttactgagtccttttttgaaggcagaaagatcaagaagtaagtgggcagttcttggcagatggatgtgaaaatgccaaaggtaaaaggctccacagttttgcttgggattggcactaaatggcaagatcttttatgttagttacaaagaaaaaacaatcattgagaagatggcttttgagcctttctaaagggtaggtgaagtaatccaggatccagcactaattaccacttttttcccctatctctttatccacagaaacccattcccgctcttttgagtatccttcagagttctgactatatccccttgtctttgggcatgtttatcctcttaatcccatgataaacccatgaaattccaaatacttatacatcccgtgtcaacttcctccattattccctcgactttcttgttgctgcttctgtttttacatgttgactttattcctgtgtcagttttcttcccttttttaaaaaaaaatttactccatcagtttctcattttcttctttcaagttgtcttaccaagcctaatacgtcaataaagtctttctgtgttatacttttccccatatgctagctttgaaaggttcttccatttctactaaccaaaaatagtaagtaaatacagttttctaataaagcttttatctctaagttttaacttggtatttgatgttgtattttatatctagatggatttgacagtcttcccctgggacatgaactctgtagttttctctcttgaataatactgaatatgctgtctgctcagtaatggtaactcttaaaagtataataaaagaccacttgggaaaagtcaattttcttaatcagcagatcacattttatgataacattctgaatttaatatttaacgtttatcatgtactcacattcttgtaggtactaggcatttcacatagaagtagtccctgttttcaaagatcttccatcataaaaggttttgacttaaaacataaagacagaagccagttttcagtacctagccacctctttctgtaacactttgatttgaagaaattcagatactttaccaagacatggtaaatgcagtgaggtggaaaacaagatcagaagcttatgtgagttctctttccttagaatgtagatagtatcattgcataggaagaaagtcttggagtgctagagattaaaagaagacaggaatctcaggaatggtgggcattgagaaacaataaagtagttaagaatgtgggtgggctcaggagtcagacttaaaatcttcacattcaaaatctattatttgcctgcaaagtgtttgtagaataatattgtacagagaaatgtaccattaatctggaattctttcataacgcatcttgtttccccttttgtttatgctggtgtatcatgtttcattaatccccctttttataagtattattttcacttctctatttcagattttcttttctgtattaacacagaagttagagccatctaccttcctgataggaaattttctcaactaattttcagggtatataacagggagagggcaggggagaaacactcctggagacaccaaacaattaattatattgtaatggagctatagagggaggagtggatgactggcccagagaaaacatgatttctctggtgccaggattacactcagaggcatttctgcctctctccactttgcaaggcacggtgccagtgagaacagcagttagtacacccatagtggggtttactagcttccacaccgtgtttggtgggttcttaacttccggatgaggaattaaattttttacccagcaggaagtgattgccatttactgattttttttttgtagcaaagatctagcttgggatacgagtattccagagatgtgctgtcataaggaaggagatactaacaaatgttgctcactggaatcagggaaggcagttaagtacatgtgtatgtacacagccaggaacacacctgtgaaagtcagtttcatgccttagacttgatagcagtgctcttaggcatttcttttttttcttcttccctagctgctgctggacacacctgtgatccttttgttttctgatgaaatgaactgaattgctcctttcaaagcatagttgcactgattagcagcagcctgggtgactgagcagccaccacaccttaccctgtacaaataaagacctagcaaaagtgatctccatgccagaggcattgctgctgtctacaatgctggggaccactgacacagtaaaagggaaaaaaaaaaaaacctatagggcatgtgctagttcaaaggtaatagttaccattactaacaaaatttccaaaagatgaggccagtgaatctaagcagtagtcttaatagagcaatagatgaattctgattgtacatattccatttgtttactgatattataatattcctaaaggcttggtactccgatgttctacactggaaataatcatgttttacccaaaagcaaatcagtgttggtcagattctttagagcccagaaggttactctttgacatgggactcctgaaatcaggcttacctttgctcctccgcagacagctatggagagtatatggaatggtaaccgtgaaaacactttcaaaatatatgaagttccttataaatatataatgtcggccgggtgtgatggctcacgcctgtaatcccagcactttgggaggccaagcaggcgggtcatttgaggccaggagttcaagaccagcctgaccaacatggtgaaaccccatctctactaaaatacaaaaattagccagcatggtggcagatgactgtaatcacagctactcaggaggctgaggcaggagaatcacttgaacccaggaagcggaggttgcagtgagccaacatcacactgctgcactccagcctgggcaacagagcgagactctgtctcaaaatatatatgtatttaaatatataatgtcatgattttcactgggaaatatttgttattttttaggggacagtatttattcaaaaacaaacctcctgacgggaatgctcctcccaactctttttatagagcactttatcctaaaattatacaagacattgaggtaagaatctatgtattttggggtattgcccaagggcacagaattatcagcattcttcagtcacagtatggttacagcaagcccattaaggtttattgacatgagttgggaatcaatctcttagctggccatggtggctcacacctgtaatcccagcayttttggaggctgaggtcaggagtttgagaccagcctggctaacatggtgagacccctgtctctactaaaaatacaaaaattagccaggcatggtggcacacacctgtaattccagctactcaggaggctgagataggagaatcacttgaacctgggaggcacatgttgcagtgagccaagatcgcaccactgcactccctcctgaacgacagagcgagactccatcaaaaaaaaagaaaaggaaaagaaaatcaatctctttacaggcgagtagggtaggtaaaataaattgctaggcaaaattttaaagctttaaaaaatggtttactaataagtagatgagagagttaaagagattgatcccttcatacatagcagtgtgactggtaaacttgtactcataagctcatatttaaatatcttctgaattgaacctccttagaagttcatcagtagcaatcagtagcaatggccatcacatatgtaagagcactgagtgtataacctcacgtagttcgtagcttttcttctcttgatgagtagtctctttccaccagatttattatttaattgaacaaattataggcagggaagttctaggaaacaacctttaattaccttgcaaaaggaagaatattttataaatatagatagtagccttttaaagacattttttagttttccctaagttgtgtatatcccatagagtaaagcattgagccattgattgtcattaaagcctaaaaagagtttgattctaggtgtttcctaacactgcctctttcccattccttcttctcagacaatagaatctaattggagatgtggaagacatagtttacagagaattcactgccgaagtgaaacaagcaaaggagtttactgtttacagtatgatgatcagaaaatagtaagcggccttcgagacaacacaatcaaggtgaggtctattcagttgtagaaaggtagcagagggagcaagagtgaccacattcatagcgcagtctaaagcataaactctaagcattatttctagaaagtaagtgaagattttagattgtttccagtcccaaagccaaaatcatttccttaaaggacagacatcagcttccccactatacaaacgggtagtcctagggttaaattctcttcttgaaatgcactgaatgggctgttactcttttggccatcacataattatagactaccctgttccttaatgaaaaggataaaagtttgcattagtactgaagctatatgtgtgtgtgtgtgtgtgtgtgtgtgtgtgtgtgtgtgtgcgcgtgtgcgcgcgcgcgcgcttagctatacctatagaaaatgcattccacactactctgggctttgattattttgggggatcagacacgtaataggaccaacaagtctccacagcaccccatcatcacattgatcaaaaggatcttatttgccatcctagatctgggataaaaacacattggaatgcaagcgaattctcacaggccatacaggttcagtcctctgtctccagtatgatgagagagtgatcataacaggatcatcggattccacggtcaggtagaaaatttcaaatgcttttttgaactctgaaatatcagctctgctctgttctttgtcatagatagtaattttgtatatatcggcacagttctgaaactaaagaagaataaaccaccaggtccccatcatttctgtcagtctagaactagaaaacttgatttagaaatgcttgaggtaagtttacattttcgcacattgaagaaactacacattctattttaatttggaggatcatctattacagaaacttttcttatccttatggtaaactttgcattccttacaaaaaccacctcacgggggaatgatatgaatgcaatgaagccttcctttcaggtagtggtaactgtagtgcaggtctgtattatctcctttgaaacatgtacaggtgagctgtgctctctttgccagcccctcccctgccatccctgcagtttttaattgcaagcttcactcaggtaggggccctcaatttccagaggcattagtgatttgatgacacagccattatactgctggagtccaggatagcttgagttctgggtaccagcagcactgctgggaacctctgttaggaattttgccgtaagctaaaggatttagcaaacataatgcatcaaaagtaactttaaaaaaaaaatagacctaggaaaaaagcggttaagtgcattgttagatactctgaagttaaatgtttaccattccaagttatcctctgtgaatagaaaagacggttcctgttttttgtcttttgacttaaaggcatagcaaggcatagcaaacttggcccttgtagttactgacatttaacatttattggtgcttgtggagtgagtgccccacagaatctaaaacactgcaggtgctaacatcatttataagataaagaaaaaatgatattctataaaagggggctaaactggaaaaaaggaaataacatgttataaaaccttaagtaaatacacaaaaatagaataatcaaaatatataatcacacaaaattctcaagctatccaagggccccacactctgctgtgaagcccatatttacaatggggggtctattttaaacccctacccacttcagaacacagaaatgggggcttagaattagagtcatggttatcttggcctttgacctttatgataaaacctgagatccagggtaatcaaactcaaattcacattactaagtatgtgacagaagcatcttggcctatttcatttctggctcctgagggctatcattggaatgggcactaatgctattgttattaatcagattcctcatttaaaatgtatcttactaatggtatcaaattgaatgtgagaagttttacagtcttcaagtctgggccaaattattaggtgacagtggctgccacttcatccttgccctccacaacttgcccatatttcaagcagtatgtcttaaggacacactggcagcatcccatccccttccttctcccactctcccagtctggccctctctctaaatataaggggtggaagggcgcatgatggtcaaatataggtaacagattgtagcttgagtaccatctaaatctcatctatcacttccagagtgtgggatgtaaatacaggtgaaatgctaaacacgttgattcaccattgtgaagcagttctgcacttgcgtttcaataatggcatgatggtgacctgctccaaagatcgttccattgctgtatgggatatggcctccccaactgacattaccctccggagggtgctggtcggacaccgagctgctgtcaatgttgtagactttgatgacaagtacattgtttctgcatctggggatagaactataaaggtaataaggcatttttcagtaagtttccaacttagaatgggggaattcatatgaaaatttgatcaagggcaatttcatatttaaacgttgctacagaaaaatgtaatatttaattcagagactagtctacaagtgaaaaggtgtaataagtgagacgttgtgtgacaatttatcctagatattttattcctataaatagtggtgagtgtgagaagagactaaccctagaagagtaaatcaatctgaggaattctcatgtggtaacagccaactgcaaattagcctctgttaccatgaatttaaattgtcctttgttttatttgtttgagaagacttccctctaatggttcagtcctgttttctgcttctctaagactccatttgccatagattttaccaataaaagcaccaaatcaactgctcaatgccattttctttttcaggtatggaacacaagtacttgtgaatttgtaaggaccttaaatggacacaaacgaggcattgcctgtttgcagtacagggacaggctggtagtgagtggctcatctgacaacactatcaggtgagcagcaagtgccttgtatcataagggatcaatattatgctcccattcattattaatgcacagatcatacaagtcttcaattttgttatgtttataatcaactgtttttcctttctgtagcttcttacaggtcagaagtttgccccaggcagagaagcagcacagcaaagccttttgttgcccttctttttaaatttctcctgtctaccgttgaaaagtgctaataaacagctaacagccttttctttgccattgtttttaagaaatgaaaagaaagatttgtttccttactagaaattatgtaatttttgtcttagcattacataattggccagagagttacctgtctttgaaattatgaagatttcacagttggaagtcctttttggggttttcccttcacaaagatgaatgacatagatatgattataatttggaagatttatccatcctctcccttcagtgaagtattaaaaggatgaaaaggccattaaaaaagagctactgtttgttatatctaaggaaattattcctagaaatcacttgaattgctctgaaaacgtacagtttttataattagtacacaaaagttcttgagaactgactttgcatttctattctctgagaagagctgtcctggacagtggtgaaagaagtgtctgccgtggcagagggggaggtgctttgtgagaacaggacatcactgataatctgtatctctttcagtttggtgacttcaggaaactgctttcttagcttggtcatttccttctcaggcaactgcgtgcattgaattcgtttttatgcctggaagaacctgtttacagaattatgtaaagccctgtgctttgaaaatacattttacatttgaacttaaacctacatatttctgtgtgagttatatagcagaaaggaaataaattacattgaaagcagtacatatctgtgtgggtggtgattgattttattttatgaatttttagaaggcatatgaggtgtattgttataacattccaggcttagaaaagaatacgtgaaaattcacctgacttaattttctcttccagattatgggacatagaatgtggtgcatgtttacgagtgttagaaggccatgaggaattggtgcgttgtattcgatttgataacaagaggatagtcagtggggcctatgatgggtgagtgtgctaacagagtgtaaaaaagagaaaatctacgtcttaatccttccttatgtttatggtgttaaacataaccattccttgtttctaaaagcttatagattttacacaaaatatctgataccatatttctttaatccgtgtatttacctctccttggtttagtgtcctgaaatattcttcccattcattttattatacttgtttgcacatggttgtcattcatattttggttatttggttatgtatttgactgttttgccctgtaaagcaaagaacaagaaaaacccagtgttaacaggctacccatgtaaaagggtaacctgttaacaaaacagaaacactagagggcagtatttggggacttagtgtggtaagatcttgaattttgatttcttgggttttttatctctttgagtaatttttaagagtacagttctcttgtcatcacttgtcatcctagcatttcatttatgagtttagtcatctttattttcttctaatttctagtggttatggaatccattaattttgtgaatggaccccatgtccaccaatcctaaacacagagtaaattcaaacaaaagtagtctgggcacaatggctcatgcatttaatcccagcactttgggagaccgagacaggtggatcatttgaggtcagtagttcgagaccagcctggccaacatggcaaaacccagtctctactaaaagtacaaaaattagccaggtgtggttgcgggcgcctgtaatcccagctacttaggaggctgaggcaggagaattgcttgaaccagggaggcagaggttgcagtgagccaagattgcgccaccacactccagcctgggcaacagagcgagactccgtctcaaaaaaagaaaaaaaaatagttattcacttaggaagaactcttatcatttctttttgtcaatctgcctgattttggcagctttttaaatatcagaaactaacaacattattttagttcatgagttaactacactgatacattcattagccaatgcaagcagcaggaagtgtagactgctcacttcttctgctttgggacagccatcactgttacaaccttgggaaattgttcagagtgtggtgacatgttccagcttggtcaagacaatattttcttattgtcctggctttgatctgtacccacctgtcttggaatttgtctgctatgtaccttgaggaaacatggcctattaaaagatttttggaagagctacacttatcttatttaaatcaaaagatgagggcttgcttatataaactccattgctcttacatggaccccagtccctcagtacatgtgacctgggccactcttagaagtgcccaggaagaggatgcttcacagttgtagatttctaggtctgtgtaatatcattaaaaggtctaatgtacaagatctcctcttgatcccaaagtatggtataactttactgttaactgtcttcagtttggttaaagctagcctgtttctcatttgtaggttaatcacgtacatttgaactatactcaccatccatatttattgccatgaatttctgctattcttccctgccttctcttacatttgcttttaactaacatttttgtcccctttttgatctttagaaaaattaaagtgtgggatcttgtggctgctttggacccccgtgctcctgcagggacactctgtctacggacccttgtggtaagagccttgctgtttagagagcattggagagcaggtgggggaagaaattaaacgttgatgtgctgtggaatatggatttgaatttaatagttacaacctcacaaaacctacaactaagtggtaaggcaaccagtacatgacaataaaatatgtttatataattcctttcatccaaaaatgctttagagactatatatggagagaaatgtggcagctgtttaacagctgcacagcaactctacacaacagtttagtgcagggagtgaataagaattctgtatccaccagaaacagcagggggtactaagggagagagaatataattattcaaattggaacctgtccaaaatctgaggacctgtacacctgtgccttcaaaaagtgccctgggggccgggtgcggtggctcatgcctattatcccagcactttgggaggtcaaggcagatggatcacctgagatcaggagttcaagaccagcttgaccaacacggtgaaaccccatctctgctaaaaataaaaaaaaaattagccaagcatggtggcaggtgcctgtaatcctagctactcaggaggctgaggcaggagaatcacttgaacctgagaggcggaggttgcagtgaaccaagatcatgcttgcactccagcctgggcaacaagagcgaaactctgtcttaaaaaaaaaaaaaaactgccctgggaatctgcatgaatccccctggtcaaccccttagttctgcagcctattcatgaggtagtgcctccagcaacttgagcccatcttttttgttccccatatacccccttttgacatttggggaaaaaagtgattcaaaaggaggaatgcactaaattatttatcatgttgttagccaagggcccagattgataaatgctgcttccattagaaaattagttggagcaacagggtggacagacaccactcggagaaaagatgagagcaagcatttgaagcccagtgttctaaatcctgactgtcatcatttaggcattcttggctctggagaagagaaagaggttacatttcttgtcttccttgttggatttatgtgtgtatgtataagacagggtcttcctctgtcacccaggctatagtgaagtggcactacatgttgctgatgtatatcaatatttcatttcttttgaaaatttgctgagtagtattctattgtatggttatacccattcactgattgtttctcgtttttggctattaacaaagtttctataaacatttatgtagaagtcttgggatgaatgtatgctttttgcttttatttctctgaggtaaatacctaggagcagatgactaggtcatatggtaagtgtatgtttaaaatttttagaaactgccaaactgtttttcaaagtggtttacccttttacattatagtatatagcagtgtatgagagttccagttactccacattcttgccagtactgagcacagtctgtaatttagtcattctcattgtggtttaattcgtgtatctctaatgattaataatgtcaagcatctattctttgccatctgtatatctcctttggtgaagtgtgttcaaatcttttcccattttttaattgagtggttattgagttttgagattcttttatatattataagttacaaatgcattatcagatgtaattcacaagtattttctccacgttcataaaatttgtttctttgttttcttaaaagtgtctttcaaaaagcggttcttaattttaagtctactgcattgactttttctattatggcctatgttacttgctgttgtatctcagaaaaacctttgactaatccagagtcacaaggatttttccctgtgttttcttctctaagttttataattttcagtttgtattttggtctatgatccattttgagttaatctttgcatatggtacaaggtgtagatcaaagggttgggcttttttacacatgaatatccagttgttccagcaccatttattcaaaagactgtcctttcgaaatgcttttgcagctttgtcaaaaatgaattgaccatatatgtgtgagtcttctttgggaatctgttctgttccattgatttttgtctgtcttgattccagtataattttattttgattactgcagctttttaccaactcttgaagtcaagtaatgtgagtccttcagctttgtctttttcaaagttttttggggcctttgatttttcatgttaattttaaaatcagtttgccaagttcaaccaaaaaagtctgctgggaatgttttttaattttttaataaataaataggtatggggtctcagtgtgttgcccagactggtctcaaactcctggcctcaaatagtactcctacctcagacatccaaagtgcttggattataggcctgagccactccatctgctgggttttttgttggacttgtgttgactgtagatcagtttggagaatattgacttctgaacaatattgagtctttatctctccatttgtttaggtctttttaactttctcagccacgttgtagcttttagtataaaggttttgcacatctttttgtcacagttatccctaaatattttgtatttttaatgctattggaaaaggtatttttaaaccttggtttctgattgttcattgcaaatacatagaaatatacttttacttatttcccaatctatgtatcttttatttctctctccctcttttttttttttcttaattgcactggctaagacctccagtacaatgttaaaaacaattggtaagagtgaatgtcccttttttgttcatgatcttaggcgaaaggcattcagtctttcaccgtttcacatatgtgtatatatagatgtatgtcagctatagggtttttctcttttttttttttgagacggagtctcgctctttcacccaggctggagtgcagtggcgcgatctcagcgcactgcaagctctgcctcctgggttcacgccattctcctgcctcagcttcctgagtagctgggactacaggcacgtgccaccatgcccggctgattttttgtattttttagtagagacggggtttcatcatgttagccaggatggtctcgatctcctgacctcgtgatccagccacctcagcctcccaaagtgctgggattacaggcgtgaaccaccgcgcccggcctagggtttttcatagtgacccattatcaggggattaggcagttcccttctgttcctagattgctgagagttttaatgaggaacacatgttggattttgtgaaatgctttatctacatccattgagataatcatatggtttttcacttttattctgttaattggtatattacattgaattttttttagctttaaatcctttgcattgctggtataaacaccacttgttcatgaggtataattctttttatgtgttgttggattcaccttgctaatatctttttaaggatttttgtgtgtgtgtgtatctgtgtttgtaagggatattggtttgttgctttattttctgtgtctctggttgactgtcatgataatgttggccttataaaattttgaagtgttccctcatctattttctaagagtttgcatatgtgatattatgcttctttaaatgcttgatagaattcactagtgaagcatctagacctggaattttctttgtggaaagttttaattacaacttcagtttctttaataaatacagcactcttcagatttaatatttcttttgaagtccactttaatacttttgtcttccaagcagtttggccgttttatctaaattatgaaatttattgaaataaagttatcatattcccttattatccttttaatgcctgttaggagcatagtcctgtttccttttttggtttcattgattttttttttttatttttctagcttcttaaggtagaaactaagatcattgactttgaacctttttttaaatataatcagttgaagctataaatgttattagaagtaattctaatcactactttagccacatcccaaaaaatgtcaattaagtcaagttggtttataatattcaggtcttctgtatccttagtgatttttctattcgtccttaccaattattgagagaggaatttttatgtctcccactatagttttgaatttgtctatttctccttacagttgtgacagcttttgcttcgtggtttttgtttgagacagggtatcactatgccgcccaggctggaatgcagtggcacacccatgactcactgcagcctcaacctcccaggctctgtcaatccacccacctgagcctcctgagtagctgggaccacaggcgtgcgccaccacgtccagctaatttttttgtatttttttttagagatggggttttgccacattgcccaggctggtctggaactcctgggctcaacctcgacaaagtactgggatcacaggcatgagccatggcacctggcctgcttcatggttttttttgttgttgtcgttgtttttgagacggagtttctctcttgtcacccaggctggagtgcagtggcacgatgtcggctcactgcaacctctgcctcctgggttcaagccattctcctgcctcagcctcccaagtagctggcattacaggcacctgccaccacacctggctaattttttgtattttcagtagagacaggattttgccatgttgggcaggctggtctcgaactcctgacctcaggtgatccacacacctcggcctcccaaagtgttgggattacaggcgtgagccaccgcacccagccacttcttgtatttttaagctctattattgggtacctgcgtgcttaggatttttgtcttagtgattaactgactttttaacattatgaaatgtccttctttgatgtttatagtattctttgttttgggaaattaatactttgatattatatgtaaacattctgcttttttatgattagtgtctgtgtggtgtatcttactatattcttttacttttaatatgcctgtgtctttatatttaaaatgaatttctcatattcagcatatagttgggccatgtttttttttgttttttttttttcttaatccagcctgaccatctctgcctttgtcatgtttagaccatttatgtaatttttgtatgtttggatttaaatctatcatgttgctatttattttccattttttgcttttgtttgttacctcctgttttcatgctcttttttttttcttttttatctcagtttagctcctattatgggttcttagttatatctcactaatttggtgaggagggacctagggtttacaatagttatctctaatttattgcagtctactatcagatgatattgtaccacttcatgtataatgtaggaaacttaaaacactatatgttcatttttcacccccatcctttatgctattgttgctacagattttacttctaaatatgttatcatccccacagcacttgttatttttgctttaaacaatcaaccatcttttaagatttttttgtttgtttgtttgagacggagtcttgctctgtcacccaggctggagtgcactggcgtgatcttggctcactgcaacctccgcctcccaggttcaagcaattctcctgcctcagcctccagagtagctgggactacaggcgcccgccaccacacccagctaattttttgtagttttaatagagatgggatttcaccatgttagccaagatggtctcgatctcctgacctcgtgatccgcccgcctcaggttcccaaagtgctgggattacaggcatgagccaccgcagctggccttttaaagaaattttttaatggaaaaaagagagtttatttttacccacacgtttaccttttctattgcctcccattcctttgtataaattctatttccatctgatacattttccttttgcttaaagaacttactttaacatttcatgtatgcaggtacactggtgacaaatactttcacttgttgtttacttgggaaagttttttttttttttttttaagggatggggtctcattctatatcccaggctggaatgcagtggcatgatcatagctcactgcagccttggacttctagtctcaagcagtcctcctgacagcttcccacatagctgactacaggcttgtgccaccatatctggctaattttctttatttttttagagatagggtctcattgtgttgcccagactggtcttgaactcctggcctcacataatcctcttgcctcacaacctcctgagtagctgagattattacaggtgcaagccactgcgcctggctctgaaaaagttttcgttttgccttcatttttgaaagatatttttgctggctaaataattctatataggccaggcatggtgtctcacacctgtaatcccagcactttgggagtctgaggcggtggattgcttgaactcaggagttcaagaccagcctggcaacatggcaaccccttctcttcaaaaatacaaagattagctgggcatggtggcacgtgcccagtgcaacaacttttgggtggctgaggtgtgaggatcatatgagtccaggagattgaggctgcagtaagccacagatatgccactgcactccagcttgggtgagaatgagaccctgtctcaaaaaaaaaaaaagaaaaaaagctagattgacagtgtctttcagcactttaatgatgtcattccattttcttctggcttggtttctgactagaagttggaagtcactcatctccattctgtatctttttcctctgggtgcttttaagattttctctttatcattagttttcagcaatttgcttatgatgtgtcttggtgtggttttgtttgtatttttcctacttcacattaaaaaaatagaaattgtcagagcaatttgaagaagaaggctaaacttatgttgtctacaagaaagctactttaactataaagacacatacaccttaaaagtaaatggttagcgaaagatataacacatgttataggctgaattgtgttcccctaaaatttatatgatgtcttaaccaccagtacctcagaatgtgactgtatttggagttataggagctttcaagaggtaaataaggttaaatgaagtcattggagtaggccctaatccaatatgactggtgtccttaaaacaagaggagattgggacacacagagaccatgtgaagataaagggagaagatgaccatctacaagtcaaaggaagaagcatcagaatgaaaccaaccctgccaacactttgatcttagaattctagtctccagactgtagggaaattaatttctattttttgagccccctagtgtatgccatactttgttatggcacccctagccctgatggaccattctaacactagtcagaagaaagttggggtagctgtattaattagagagagagcaaacctcagagcaaagaatattatcagggataaagagaagtgttgtataaggataaaggggccagttctccaagaagacctaacaatccttaatgtgtacacacctaacaacagagcatcaaaacatatgaggcaaaaaaccatagaactgcaaggaaaaaatagatgcatccactgttatagttggagacttcagcaccccctatcagtaatggacagatctggcaggcagccaattcagtaagaacatagttgaatttagcagtaccatcaatcaagtggatataattgacaactatagaatgcttcatccaacagcagcagaatacacattcttctcaagctcccaaggaaattacaccaaggcagaccacagtcagggccataaaaggtaccttaaaaaatttacaagagtagaaatcatacagcatatgctctcagattacagtggtattcactaatggaaagatagctgaaaaatcccaaaatatgtggagattaaacaacacacctctaaataacacgtaggtcaagaagaaattgcaagataaattgaaatgtatttttttttaatttttacttttcatttttgtgggtacatagtaggtttatatatttatggggaacatgtgatgttttgaaaagtattttgaagtaaataaaaatgaaaacacagctatcaaaatttgtgggatgcagtgaaagcagtgcttagagggaaatttatagcactgaatgcatatcttagaaaaggtctaaaatcaatagtctaagcttctactagagccaactaagaaaagagcaaattaaattcaaagtaagtagaagaaaagaaataacaaaaactagaccagaaatcagtgaaattgaaaacaggaaatcaatggattacatcaagaccaaaagctagttctttgaaaggatcaataaaatggatgagtctctagccagactatgaaaaacaaagaagacataatgtactaatatcagaaatgaaagagatcccagatcttcacagaatcaatacttaataattatctttccaaacagagaaactaagcctaggcagatccactggtgaattctaccaaacatttgaagaagttatatcaattttctgttatctcttctataagataaaaacagaatgaataacttactaactcatctatgaagcattaccctaaaaccaaaaccagacaaacacaatataggaaaagaaaaatacagactaataatggctaagctatgaagttcaataggttaggcagatcaaatgcattttcagcttaggatagtttcatttacaacaggttcatcaggatgtaacccattgtaatttgaggagcatctgtattttaaactatttgattcatgcttgaacccgggaggcggaggttgcagtgagccaagatcacaccatttctagcctgggtgacaagaacgaaactccatctcaaaataaataagtaaatatatggtttttcttttttttttttttttttttttttttgagacggagtctcactcttgttacccaggctggagtagtgcaatggcgcaatctcggctcactgcaacctccacctcctgggtgcaagctattctcctgtcacagcctcctgagtagctgggattacgggtgcctgccaccacgctcagctgatctttgtatttttagtagagactgggtttctgcttgttggccaggctggtctcaaactccggacctcatgatccacctgcctcaacctcccaaagatctgggattataggcgtgagccactgcacccggccatgtatggtcttattattgcccttatgtttagcaatttcatgatttctaaaatattttaaaatgtaataatgtgccaataaaatgtagtaactctgaaattttttaaaaaatctcgacaaaatattagcaaattaaatccaacaatgtatgaaaagaattatacactgtgaccaagtgagatttatgccaggtatgcaaggctggttcagcattcagaaatcaatcagtgtaatccatcacatcagggggctatagaagacaaatcacatgcttatatcaatggatgcagtaaaagcatttgacaaaatccaacacccattcatgataaaaactctcagcaaacaagggatagagaggcttttcctcaacttcataaagaaaaatgcaaattaaaattatagtaaaatactactacaaacctaccaaaataaatgtaaaagattggtaatatcaatttttggtgaagatgtggagtaacaaactctgataaactgttggtgtgagtataaattggcatgacttttaaaaaattgtttcatagtatcttctaaagccaaacatacacctaccccgtggcccagcaagtctactcctagttgaaatgggtgcatatattcagcaaaagacacgtacataaatgttcctagcagctttgttttataatagccataaactataatcagcccctatgtccaccaacaagagaatagatggattgtagtatattcatacagtggaatatcaaccagtaataaaaaagaatgaactactgttttacatgcagcaacatagaagaatcttataatgttgactaaaagaagccaggcatgagctgggctcagtggctcatgtctgtaatcccagcactttgggaggctgaggccggcagattgcctgagctcagcagttggagaccagcctgggcaacacggtggaatcctgtctttactaaaatacaaaaaattagccaagcatggcggggggcatctgtagtcccagctacttgggaggctgaggcaggagaatcgcttgaacctgggaggcggaagttgcagtgagccgagattgcaccactgcactccagcctgagcgacagagcaagactccatctccaaaaaagaaaaaccaggcatggctgggcacagtagctaaggcctgtaatcccaacactttgggaggccgaggtgggcagatcacgaggtcaggagatcgagaccatcctggccaacatggtgaaaccccgtctctactaaaaatacaaaaattagctgggtgtggtggcatgtgcctgtaatcccaggtactcaggagactgaggcaggagaatcgcttgaacccaggaggcggaggttgcagtgagccaagatcgcgccactgcactccaccctgggcgacagagcgagactctgtctcaaaaaaaaaaaagccagacacaaaagaatacatactatatgattatatttatatgaaattcagtaagagactaaacaaattaataacaataacagcattgggccaggcacagtggcccacacctataatctcagagctttgggaggccaaggcagaaggactgcttggtcttgagttcaagaccagcctgggcaacaaaaagacctaatctctacaaaaaaaaaaaaaaaaagccaggtgtggtggcatgagtctatagtcctcactacttgggaggcttaagcaggaaaatcacttgagcccaggagtttgaggttacagtgagctatgatcacactaccgcattctagcctaggtgacaaaacaagactctgtctctaaaaaaaatgatgatgatgacacctgtaatcccagcactttgggaggccgaggcgggtggatcacgaggtcaggagatcaagaccatcctggctaacacgatgaaaccccgtctctactaaaaatacaaaaaattagccaggtgtggtggcaggcgcctgtagtcccagctactcgggaggctgaggcaggagaacggcgtgaacccgggaggcagagcttgcggtgagctgagatggcaccactgcactccagcaggggcgaaagagcgagactctgtctcaaaaaaaaaaaaaaaaaaaaaaagatgatgatgataaaattggagtggaggtaacattgtttagtaaggggtgtgagattgttttccagtatgctgggaacattctacatcttcatcagggtggtaactgccagtggtgtgctagaacaggctcatactcacttatgagagccaactattagatattcatgaattttgccagctggttgactatgactagcttataattggccatgataggagtttttaatgccgtggaaatctaccgatggttttacaaagtagcaaagtttggttgataaacatttatcagcatactgcttcttattgctcaccaatccttgacctctgattgtagaaggaacttagaagataaaaaccagggaggtagtaaggaatgctctcatccaccctacgccaaaaagggttggccatgagaaactattaatagcatgctatttagcatgtcttggccaaagagtattgctttgtttacagctgcctagtatttgacttttccatgctgcctttagccaaagtaaattttctctatttttttaatttatttatttttattttattttttttttagacagagtctcactctgttgcccaggctggagtgcagtggagtgatctcggctcactgcaacctccacctcccaggttcaagcaattcttctgcctcagcctcccaagtagctgggactataggcacatgccaccagcccggctaactttttgtatttttatagagatggggtttcactgtgttagccaggatggtctcgatctcctgacctcgtgatccgcatgcctcaggctcccaaagtgctgggattacaggtgtgagccactgcgcctggcctctttataacagcaaaccatagcctttccgtagactccttttgacatgttgctgaatttgtgtcctattgattttgagtagttcaagttcctaccctttttgtttctacttctttaggagcattccggaagagtttttcgactacagtttgatgaattccagattgtcagtagttcacatgatgacacaatcctcatctgggacttcctaaatgatccagctgcccaagctgaacccccccgttccccttctcgaacatacacctacatctccagataaataaccatacactgacctcatacttgcccaggtatcgaaatcgattatgtacataacactgtgggtaggagacgggatattagctgtaaggtgttgctagttcatggaactttctcctgccgtttgggtcaccaactcctgtaaagccgaggaagcagacaatgtgagacagggctgaagctgccacagtgtggacagtgcctttcaccaaggtagccagcctcagttctagatgattctagggtcctacttgtgtggtaagcctagtcattcctgccctagttatctagtagtactgttatgaaaataaaatgagatttgaatcagtttgaaaactaagtactgtaatgacccaaaggcctgtgatgtttaagttcccagatcaaacaatacctacaatagagacctttcaagccaagtaaacagtctgatgtctaatgtgtgaatggaaacatctcttggtgaaagttcacactgacatataaataaaagggcagattttaaaaggaatataaaaagtagcttttatatccctatccctattcctcaaccctccaaaaagaggacctgtcttttgacctctgacctccacatgtcctcccactcaagtctccaacctctctctcaggcaggggaagatcctaaaatacccaggtggtccatacatattgtggtatattcagatcatacctgctgttctaaccagttcgaatacactaggttgttaccagtttgagaaggctgccctagctgctgaggagcgttgctgtcaggatttgccacgtgtgcctcagttctcgtggcggaagtacatgttcgctacacgtttctgcatctctctttgcagtgttccgctgaggacagtgattcacgcccagctgggctgtcctcagcttctctttctctcacagaggacacggttcgtcgttcctcagccaggtcgcacaggctgtgtgcccttagacaagtaacttcccagaccctgaatctcttgatgagtaacgtgaggggcagcactcacctcacggaaccctgtgaaggctgtgtggagatactgcatggaaaattcctagtgcttagcacagtggcgaatacataatatgccctcaggaaaaactggtcatgagtattaatattgcaatctccatatacctaccccctcctttgcccaaaattttctcttccttagacttccgtgttactttgccatttttaatattcttcctgactctctgattatttgtgcttctttccccctcactcccaagagtctgtttctggcttttcttattatttttattttattttattttatttcattttattttattttattttatttcttgaaacagggcttcactcctgtcacccaagctggagtgcagtggcacaatgtcagctcattgcaacctccacctcctgggctcaagtgattctcctgcctcagcctcctgagtaccgcgggcacacaacaccatgaccagctaattgtttgtattttttttttttttttggagagatggagtttcaccatgttgcccaggctggtctcgaactcctgagctcaagtgatccacctcccttggcctcccaaagttactgggattacaggtgtgagccaccgcacccggcctgtctctggcttttcttccttatctgagttccttcttaggctgccttctctattcccaaggcttcagatctcatctcattgtagaagactcaaatttctgtctccagtccaagcctctgccttaatctccaggccacatttccagctgccatccacacagctgtccttgaagatagcaagagcacttctagtgctcacatcctcaactgcactgtcccctcctttacactgctggtaccctgcagccacacagccaggccagctttccttgattcccccacttctgttactggcaccgccatgctcatggccactcaaaaggcagggcccacagaccatcccccacccctgccctgccattctacagggcaagtgaaagctatgccaaccgtgggcactctcagcctcaagacatcagagtcactctgcttgaacaccacagccctgagcatgtcagcaagccctgcctttagtataacttcccccatcaggccaggtcacctttgacagaagctcctgcatggcataggcagagagcaggcattaggaaggacccctaagccttttccccattggcagctaagtgaatgttcttttgtcttcaagcaagtaagaaatatcaaaaaaggggctaatgactatttgctctgttttcacacaggacccattaaagttgcggtatttaacgtatctgccaataccaggatgagcaacaacagtaacaatcaaactactgcccagtttccctggactagccgaggagcagggctttgagactcctgttgggacacagttggtctgcagtcggcccaggacggtctactcagcacaactgactgcttcagtgctgctatcagaagatgtcttctatcttttgtgaatgattggaacttttaaacctcccctcctctcctcctttcacctctgcacctagttttttcccattggttccagacaaaggtgacttataaatatatttagtgttttgccagaatctctcttgctttgccattaagcagaagaactagtttccctgtatagcctgctgggagagacccacttctagggtatgggggatgcagcttcaagcccagtgcccagtgtctccctgttaactgcaggaatgccaagcacctggccagagcagcccagccccaatatgcttaggaggagacagagttccctctgtatagcctctgggacaagaaaaagaaaacacaagaatgtatacactggaagatttgggcctcctgcctgccttctctttgtttctgttcctcttcccatctactcccctacgccccttcaaccttttttctctgtctgcttcacctgagaagaaagtgtacgaagagagtgtcctcctctcacatgagccagatcagccagaaaatgcaacacttggaagagttaaatgctgttcagtgaagatttcagccccaggcctttgctgcaagtgaccctgtggcaacagtggattctcagacatgatactctcatcatatttgcaactcttctctctctttcttccccacacccaagaggaggattggtggtagggggcaggcagagggggtggggagaagtttcctgggctccatcaatggctgcatcttttctggactcagcagtctccttgattccatgtagagtgtggaaaggagttgctgattgcatttcctctcattaacaattgggtgtgtaataaaaagcattgtacttcatcttaaatcactggtaaggctcagcctacagaaagatttgaaatggccagagccaatcgcttggtgcattctgcgtaatggtttccatctccgatttcctcatcagggcctgtgaatacccaggtgcctgtatctttgccaagaccgtgatcaaggtagcttaagagagatggtcaggagaaaacactgtttttgttttttttgttgttttgttttgttttggccagttaaatatcatctctcaaatattgatctcaccgtgtcaaccttgcactgcacaaccttccttctgcttctcccacacccagtatttgcagaagggcaaagctgcttaagagagaggatcagggtgaagtttggcacacagggtttattaatggggcaaaaactgccttttcttcctcctcctgaccttattttgctcttcactctccccagccaataaagcgtctgtggcgattggtgaacagcataaacagctggacctcagcaagggtcaggcaaacccagtcactcggaaggcagctgtgtgagctgccaagctagtgggcttcaggtgcaagggtacctgtgccacaccaacctgggagcacacagaatactattaatgtgcacccagctggtctccccaggcaagaaggtatcctcttcccaaggtgtacccactgaatgttgttactacatattgagagtcattttatgcatatgcattctacctttcctgctttatgagtatttttaagcttttagttcaaggttatattcagaaaatatttcccagtataatgatacatcgtagcctaagaaatattttctcaatgtaattcccttcccagctacccaaatgctacagagaaatgttttctacttggccactatcagggttcgtcatctattgtgttgactattaatggctttttgattgggtaaggattttgctatagatgaaggtagagggctgtcagccctgaaaaacacacaggtcagacatttaaaaggcatgggtttcgagctgtctcaaaatattgcccaatagccataattttaccagcctttctgtcatatgctgctattacaaagtggaagctgttgaatgtttattggtgcccagggttttgctctccaatctaggttcagttgaaggaatattgtttctaagactgttttgagacatgtccagtacatcacaaaggagatcggggcgacccctgcagatgtggagccattagcccagttgaggatattctccaagttgtcctctctcctgctgatggaaatgggaatgaagttaagtggtctgaaaaacttgaatcgttcacatttctcagctctgggggtcatttaccagtttgttgtagaagaaataatcaggtaagttaaaagttcatttccagagaaggtaaaccccacttaccatctctgcatgatttcagtgggaattgattatcactaatccccaactgggctagaataaatgtaaagtttgacctttttaaaacgaaaagagagacaaagtctcagcacattccaaggagtggtagaaacagagctgaaggtgtccccattgtagattagtctcttctcactaaaatttactttccaacgtagggcctaaaggaaacctttcttaaagacaggctgaaaccccttcaaaggcagatgaggaggtacagacacgtgaccttttggtgcacactggagctacttggacaagaccagcatgccttgctgcacgtgtgtgtatttcactgctgagaacatcctttaacttggtgtgcaatttgaaaggatgtgaatcatggatggaaggccatttgtacatgtcccttggcaaaattctttctggtgtctcctaacttcagagacagggactctttttggatctctattgacaagtaataaaagtctggccctcataacttgtttccgaactagaaaagtctgtgagacccctacatcattctggtttttttgcttgagtaagaacaatccttttttatttttcttctgtacagtctaaagctacagagaaaaaaaaatgcactcttcccttgccggctcctggtaccattggtctgaacagctgtagttggtctactccttacttagcacttgattgtgtggggaaacaaaggtgggaggggtggggaatactggaaataatcagggcaatttttttctttcccataattggactagataccttggtactgttgaccttctcagcatctcccttttgccttagatggcaacaccctccagtctgtagcagagcagtccaacccagattagtgcagcccggaggcttagggtgcagcctccctggtcttcctccacacagttgttcaccaacagaccagacctcctttaaccacagtgtcaacatagtatcggaaagagagccatttcttaggggaataaaacagtttcgcttctttagctcatctgtggtgtcagaatccttggagctgaagagagaaatcaaaagagcatgatgatggctgcctggtttcaggtggaacttaatgcattgatctttagaagctccttctgttggaagttgagtacctgtgatctaaaatgtcctggaggcagatgacatctaaaatatgtgctttccaaccagcacagctggcgctcttagctcctgattggttgtgtgttttattaaggatcagtgcagttaagtcgtattttaaagtgttacctcccctcctaacccttccccttcttggacactgaaggaaaaggccaactagggtgttagccctctgggcaccaaggaaactaacagctttctcaaagcggtgaccactcaggccagcccagacaaatctgagggatggccagtgcactccaatgatgggacaggcctaacaacacatgtaagcttccccgagagctttcagctggttcacctctttgttctctagactcttaagtactgactgctttgacttttgtgattatgttatggtgatgtgtagtcagtgtaccaatatgttcacaacctaggatcatgataatggagtgtgttttgggttttttttaactgttcagaaaaaaagtaaattacaaatataagattaaagtgaattttctaagcgtcttgtctccttgccccagcatccagaagggcagtacacttttcagtatacagactgagggagtgcagagatagaatacctttgcagataatctgacatgagaaaacaagattgagagaaagcagggctggatgctgtggatgagtgtggggtccctggcttacgcctactgttccatgttgagttaaattgaagccaaagtcatgtctcatttgtgcattggtcaccttagccaaccacagcccaacctgaatgcagaatttacatttttctctgcccctcagctgtgaaaagacttgagtttcccctacatcccatttgatcagtttataggcaagcaagctcacatctgggagcaatttccagaggggctccaacaagctgtaagaatgaaggcacccttgactatctgggatatgacattgcagttcttgagtgaaaccccccttccctccttcagccaaacctggagaggtacaaggttgcaggcagtggccgaatgggactatctctccccgttggccctgtacccctcccctctctagtgtcacaaacaggatccttgtcaaaattgacccatccttcttttagatctatgggctttttgtattaataacccttccacatgaccaaggctctctggcttccatcagccttgtagtctcattgtcttgtctggactgaccactggccatgagcaatctcagactgtggtcaatatcagggccgctgtgcagaaccctccctactagagctggaagaatgtcagagcatcaggtccacccaacccttggcagatgaggaaactgaggagaaagaaaagggacccacattgcccaaaactacactgaagaatcctccctaacaactaagggcaggcagcacccaagagagagaaggaagggagggaggtgtcagaggaaccactgtggggccactggtatctgctcagttaatattcctcaccagctgggctcctgagcagaggctgagcctaagagtttgtggacctcaccctcaaactgtgtcagatctcttccccaggaagggtgtggtctagggcctgccctggcaagtctcaaccctatagccgtggtttcctactcccaggctgggccaggaatccctccctgctttaaacctatagctgtgccaccatcagcaatgactaaggggaggagatctctcttcttcctgattggctcttgccaattaagagcactttattaggctgctaattaaaggcacttcgttagcagcaggagaggccaagtgggtgcctggtgagacggaggtgaagcctggagaaattgttttcgtccccccatggaagcagagcctctcagggaagctctcagtccccaccctctcctgctgcgcctacaacaccccttgctttcaattagcaactctgaggggagcaaggtgattaccaaacccaagctggaaccccccaccaccaccagcaccacctcaggctgcatgcggtcctcaggggctggccagacccccaggcacctcatgaacccgggcccagggaaggagaggctgggcagcccaatggggagtgtgctctccccactaaggaatggggcatgactccccaagcagctcaggtgaatgtcacctggtcctcatcattggggccatccctagcagtcactggataaccagtcacttgttcacatagtgtgaatcctcatgctcctttcctcaacaaacactcatgatttcatggaggaaatgtgcccttcccacccgtgagggacagtccctggtcgtttaacaagagcacagcccacgtagaccctgaatgggtcctggaggagagggggctgacagttttacaatcccggccatgcagacccttgagcgactcctgtccctgagctcatgtcgaatgtgaggcgcttcccctggacggtccgaatgagccccctgcaagagaggagagcctggctatgacctagcacgtgggggttggcatgcagggacaccccctctccagagccctgcctgtcccatcttgtgcccacctcacccctcagttaactgcagaattagcaccggccgtgagggcagatttatgactaggcctgcctccctccacttaacccgaggccggcccgggctccagacactaaattagatttttgacaattagagagactaatgggcacatagccatccccagagccagatatccagatccagcaaggccattctttaatatccaccaccagccagcccaaccctcccctggccacccccttctccctcccgtgggtgggcatttctctctccccagcccctgtctctctctgcccgggctctacatgcactcacgagctgtctctggttccccttccctgtctcacctactcttgccttccagccccttgcccagtaccagcctggctctagaacgctgtccgtctccttgccttcagcctcctttttgtactttgaacacttccatcttaagccgccctttccccagggcccatctatctgtaatcttccatctgccctgaggagattgcaagccccttgagggcaggggcttaggctctctctggatcctaaatgctccgcacccagtcagtgtttactgtttgttgtttcctgagactccaactccttcctcccccttcctctgagctgctgggtctacaaggcctgcccaccttgccctcttggtcccaggcccaccctggctctggcctggctctgcttggattgggtggctcccccttccctgcagccccacagctctggccagtcttgagttggccgggtaatgagattgcagtaagtagttgggggagctgctcacattcactcaggcggactcatagctctgtcaggctgattggtcctgagtggaggcacaaacggccccccatggacacactgcgattggttataaaattacaagcatttgtcctgctgtcaggggccttcctcccgcccctctgcctgcctgcctgggctcccaccattccccacccatccctttccccagtggggttggcccacacaccccaaaggacctggccaggggccaccacagcaggtagggctaagaggctgaggccaccaagctcccaaggggcaggttttcatgtcttggccctggagtggttcacagtgcaggctggcctcagagtgacctgaccctgtgctcagtgtttcctgtcccctgagggtaagtgggggtgggggccccagggcaaacaggccttggaatcctcaggggaggaagaggtgtcccaagccccaggcctcccaaggacaaccaatgcctgcaacttcagatgtggtcccaggctggagctgtggagcaaggggtggctgaaggcctgccctgctgaaggggagagcagcagaagccaggtcggccacaggagcccatctctcctccctccaggtggccagacccttgccctgtatcctgacccccagctaaggacaaatcagccttcaggagagtctctgaagcctagaccagaacaaaaagccagtatggcacaccagagccttgctgtggttactggtccacaggctgagtcctctaggtctggctcttagacacccccacccaggccttggcaagggcccagttacccccacgcatgagtgccttgaaatcccacctagtgctctcttatgctcacacagaaacacccacttcttcctggctgagacccaggcatcagcccaggccctctcaccccagctgcacagcctccttcccactcatttctccagccaggccccagaccccagcccctgaccagcccccagctccaacctcagtccttcctctctggaggcaccagggcaccctataatctgcttggagggatgctgagggaagggttccccagcttggagaggggagcgttaggggagcagcgtctcctggctgtgggccacaaggtgccttcctgccatccgtcactcattcgcagcccagaatgtatttgctgtaattacatctttaattagggtggtgacggctcattgttcaccaacaatgatgaatgggtcctcctggttgccatcctccctgtccagcaccctccaggtcagctctcccccagctttggggctgggaaggatacatgagcacaggctcttctcccatcgagtcccaggccctgaggcctagaagcagccgtgagctctcccccaagggtgatgatgttcttctgggcctccgggggctcccaagggactcgacagatcctgataccttcacccagggctccctgcagcaaggctgcagatctcacagccaccagatgtctccttggtccaaactggccaggccgggggggtagcctgacattgcctcactcccacccaccacacacatgccacatcaccacgcccagactcgtccctgggccacacgctcctcatcacaggagctgacaggtgcagaaagaaaggcttgcagttcacaagctggagggtgagtgggcagccttaactccaagctcccctgtgaatgaaatggggtctctgaccaaggcgaggcctcccttcccccacatgcctatgcgcacccaggccatgtgcccaggcccaaagctgcaggtggtggatgtttggtgactccatgagcaaatggatccatcagtgagaggaaatccatgcacctgtttggagatcatgggctggttggggcctatggtaagcagaggggccgggacaggccatggaggcccaggaggcttgtggaggtgagaaccctaatctgggttaaagccccaagtggcatgctcctggctgtatgacctgggtgtgtcccctaacctctaagtgttccctcatttataagagggggatgagaacagaactcccccacaagagatggctgcctggattttcactgcaacactgcatgccaagtgaacagagcaggccaaggtgggagccacaaaggaaggggggtgcagggcagctgaggccacaaggagctgggagagggacctcacaccttggtgtgaaaaagacctcaacaactgcaagctttgttgggcacagaatgggaggcgggggtggcagggctgtgacaagggtggcgtaggattgggtgcacagtagttgcacaggacatacttgttgataggaattgcggcgggggcctcctttcagaagctgaggaagctcctcccagcgtgggcatgatctggtcagggcagggccctggtgagggaggctgccatggggatatagggataatatcttcttcataggatggtcatgagtacactgggagaggtgaatggattagaagtgctcagaggccggggcacagtggctcacgcctgtaatcccaacactttgggagcacagatcacctgaggtcaggagttcaagaccagcctagccaacatggtctactaaaaatacaaaaaattagccgggcgtggtagcatgcgcctgtaatcccagctacctgggaggctgaggcaggagaatctcttgaacccgggagtaggaagtttccgtgagccgagatcatgccactgcactccagcctgggcaacagagtgagactctttggaaaaaaaaaaaaaaaacaatcatcaggggtccaggcgcagtggctcatgcttgcaatcccagcatgttgggaggacccaggagaacgggtcgcttgagtccaggagttccagcctggcacagagggaagggtgttggagagacagctttgaatgccagcagggacatggagcccatggactgcatctcttttgtgtcagtgtttatggatacatggtcgttgtagtacctttaaggtactggccttggagacagcagggcaggctagcacaagtggcttcaggaagggtagctggcaggaggggatgcagatgggttgtgccctctgccctttctacttccagctctacagttctgtgactcccatccctccatggggactgtcattttccatggagcctctctactcccagggatggcctttcagcatccccgctcttccccagcaaccctctccaccccgcagggacccccttcccagggtggaagcccaggctggaaggaagagtcgtacctagcggtaagtatgggcaacattacatatgtatattggagagtaaataaccccaaaaagcgccttgtaaatagactctgagtttatcctttattaatgaggcaccgagtgccctgctgttttagagcagcgagactttcataatatcaaaacctaaattacacttgcgtctctcatcccagggacgagcatctttcagccccgtttgcagagtgagtaagcaggaatccctccttgcctgcctgggagttggtggcacctttcttctggctggagtgagggtggatgtggacacacacaccccaagtccctggagagctccgtgtctaaggcctcagggtcccatggatgagggctgactgggatgccggcctctgttccttgcacagagtttaccggatccaggggctgccccaggctctgaggtttactctttcaacataaggcagtggacacttacaagctttgtgatcaagttactccccatctctcagcttcagtttatacatgtgtaaaacagggataatatcttcataggatggccgtggggacgctgggagaggtgaatggattagcagttcttgggggtgatggggcctgcacgcagtggctcatgccttgcaatcccagcacattggaggccaaggcagacagattgcttgaacccaggagttccagaccagcctggtcaacaaaataagaacctgtctctacaaaaaatacaaaaatatgctgggtctggttgtgtgtatctgtagtcctggctactcgggaggctgagacgggaggatcacctgagcccaggaaggtggaagctgcagtgagccgtgatcatgccactgcactccagcctgggcgacagagtgagatcctgtctcaaaaaaaaaaagaaaaagaaagtgctcgggggtggtgcttggcaaatgtgagtggtgatgatgataatgatagtgacaacaatgattaattcccctctttgggatgggacatcattgtcttctgttcaattcctggaatggaccatgtgggtggggtgggggggcccaagctccagccccatcctggcatcaaggcgctgcgctgaggttgggatgccagggcccttctcaccccagcacattcaggatctgactttgctgtgtcccccaactctggggcagaacccagaccctcttggccccctcgattccccaggtccaagacccctctcaggctccctggggattgcatctgtcctgccctgggcctgggccaggctggctaggcaggcaggtgggcaggcgggcgcggtgtggtcaggatttacagcttggccagccaggttcctggtgctccggtgggcgtcatgtcgagtctgtcccattatatggacagttgagtttaatagtcattgtgtgctcactcagagcccagcaaacatcgcggggcgacaccccctccacactagccgcccgctccccagccacacggcccatccatacagtaaattaaaaatatgaatcacttctccccactgcctccccaaacgctcatcttgtcagcctctatgttgccttcatttgtattaccttaatttaatgttaattatggtcttcatttacaaggaacaagcgagccctgctccgccaggggaacttccccccagccctccccgctcaacccaggaggagaggctgggggagaaggggaatttgggggactgcaggagtgaaaaggggagttagggagagggcatgagatgagatcttggccatcagaggctggtggccattctaggagggactaggaggacctcccacctcccccatacactctgtcttcaatcatttattcattccacagcaatttattgagcacataatatgtgccaaacaatcaggaaccagagaggggggggtgggtgtctctctctaataagcgctaatggagtcccctctgcaatcctgaagtgaatgtggatcagaaagacatatccgtgccccaagtgggctggcccctgacccagcctagagggcataggacacagacaagtgggggaggttccttcccttccaagcttccctggactaccagtgttaccctgtccttaatctgcctcacacccctttcaggcaggaagttctttctggagtctttcctaagtccctcttgctgcagatcagcctaggctcagagcctgaatagggccaggagtggaagagtgactcccatgccacactgtctctggagggttgggaggaaggcattgtggggatcagtcatcccaccacccaccagccagcagccatcatgcccccacctcatcaccaccccccagccagccatgcagactccaccaacatccttgtatctgagagtcctgggagccctgattgtgactctttttttttgagatgggagtctcctactgtcacctgggctggagtgcaatggtgccatctcggttcactgcaacctccgcctcccaggttcacgcgattctcctgcctcagcctcccaagtacctgggattacaagcgcataccaccacgcccagctaattttttttgtacttttagtagagacggggtttcactatgttggccacgctggtctcaaactcctgaccttgtggtctgcctgccttggcctcccaaaatgctgggattacagggatgagtgagccaccacgcccggcctgattgtgactctctggctgtccctgtgctgccaatggaacacacagtcacattcaggcctgtacagcctgtggggagcgcagtaaatgttggtggctgatgtcacacgtgtgcacacgaagctggcagagggccacctgcatgcaagctgccattaaccaggaatatcctctcccctgccccccctacatacagctcttccactggggaagaggatctccagctgggaatatcttgacagacgaggctgttgtgagtgtgtgtctgcatgtgtgtcctctccagggaaccttgatccctgcatagggacatgtgtcccccagcatcggcgtgtctctcaggttccgcgtgcatgtgtgtgtgtgcgcgagcatgtatccagcaggcccatgtgcatgtgtgcgcgcctgtgctcatgcacgccccccctcccgctgtcagccgcgctgatgacattggcgcagaggaaagtgatgacaaatgcccgttatcagcgaacgaggccgatgacaaatgggcgggcgcccgagcagccccattacgctgtaataacagaagatggatggcctggagcccccccacccccaccccgtgccggtaacgggagccgatcctgctccgcccgccccgggagggagcccagccgctgccgccgggccgccaatcacgtcggggcccaagacgcccagaccgaggagccgtgaaaccacgcggcccttctcggcggaggaacaaagccctgcgctcagcggccgcagggggctcaccgggcgtctggcctgcctgcggccaggacgtgcagctgtgcacacacatggcctgcacacgcgccaggcgcctatatccttgtacggtgcacccgcagcacttgttcaggcacaaccctgacctcatgggaccatgcacacatccttttgtgtcacgcacacacatacatctgccaccagacctgggtatacacccgccaatgtaaatccatgcacacaccaccgtgcacacccgtgtaccttcaattcttacacaagcctacagaaaccactatgtccatacacatgtatgcgcctaacatgattgctcatgcatagatatggaaatatgtatacatataagcagaaatgcttgcacatgaacacaagccctacacactgctctgtgcacacaattcagggtgtctaaacacccacacacatgtaaaagatgcccacagctgcatcaacaagtattgactgagtcataccatgcacctgtcagttaggtgctggggcagttataatgatgaaggtaacaccatccctgtcttctagaatcttaagtttatgggagtgggcagatgaatggctgtgagtgaaggcagaaagttgctatgtgctttgacccaaatagtttgtgatataagatttacaactggaaaatcaggacagtcttcctggaggaggtggctaaaggaggagtgaattttttagaggaactgaattctgaacaaaaggtatggaaacggggaaatgtagggagtgtttgaggacaagaagtctaagaggacaggaatccaggtgaatggcattggttgagtgtggtgggaatgagacttctcagacagactgggactgggaggctggaagccaggaggcaatcgaggagggtggagcctgtccacctgagagacccatgaggcctgggctagcctaagacccgtgaggcctgggctagcctagaaaggaaaggagaggatcaggaagtcaatgaaccagagagtaagcgggcgggaggcgccaggcaggctgacttgacaggaccctgcacttacacgagccccatgcctgattgtacattctactgtctctgtcttgaaattctaattttttattaagaagctccttgttttcattttgcaccaggccttgaagattatgttgcccatcctggatcctgaggtttccaggctgagctagtaagacaggccagcaggagtaggtttgggagaggagctggtgagtttgatttgggacggggggtatgtgagaggctggaagtggaatgggggttgaggagacaggggaagattccatgtctccgtccacaaagtgagaattgctgcctcgcatctgccagcgcccaagtccacttctattctgcagtgagtccgcgccccaccagagccctcagacatacctatcctgtgcgcgcgccccttgctagaatacagcactcgcaagctcccagtgttgcccctacattctcagggcctgacacatggtagccactcagtacctgtttgttgaatgaataactgtattcatgaatacatgtgcacatatgaatccacatacatactcacggggcatccattgtccccaccacgaagggtacctgcacgaccgaatatcttcccctatcccactgtcactgccccacacttcctccaagacttttctgttaccctgtgtctaacctgggggcggaatgcccttgcctcagtggccctctcattgggtgtctcctttgcaggcagagttgggcaggagttaaggaggagcagagagcgggagaaggccaggacccgggggaaggtgggacagaatagaggctatgactgaattccagtctcagctcctccctggcttctctcagctcaaacttcttcatctgcaaaatggggatggcaggcagaaaggcattcacacggacacctggctgctgacaccgagatagagtaaatcgaggcaggctttgagaaggctgcttccctacccccaactctgggttccctgcggtgttgaaagtggatgaggggcccaggggatgacccaggtgatctcaaacaaggggagggaggctggcactcctgagaggaggagtggtccactcccagtagaaaccagatgatacaggaactgagaccccagccagtgccttgtacaacccacatacaagcaggcacagaaatgaggtggcccccaaagactacagtaaacactctgacctcaggtagcttggggtgggaggaggcagaggacaccagagagaggggcctggggagggagcccggtggaggggggtggggggcaccagggttcctctgccagggtaccctgccttccaacggcaaggactgctccctcccccctcaatcaatgctggcttcccaatatgagaatggaaaaggcgtgtgttcccaggaacccccaccacccccacctgtctccttcaccttcctgtgacccattttgggtctctccaatgtgttctggtcacgcctctaccccaacccccacccccattgcagcggtgttaaccatcacctctcagacctgtcaggaggtccttgggaagcccccagcaaggggactgcagtgaaaggcaccaggatgagaggggagatgccggcaggcaggggatgggccggctaatgggcctcgtccctcctcccctcaccagttcacttcttctgtagcgttattgacctgtcattagttatccgtccaaggtcgacgggcctggcccagccataaatcacggcggctggaggtgggctacaggcggagcgatggtccctgggatgcagtccagagctcagcccccagctcagcccgggaggaggcgcagacggcctcagcaagtctcggaagagcttccccgggggagctgggcccgctttcgtgtccacgcatcccggccctcctccgcgaaccttctcaacttccccacggtgctccaggcagcccctccctccgtctctcacgcctttctcctctccccatctctttcttctctcaggctctgccttcaaggtgggcggggaaagagggatggggtggggacctggggaggtgctggttcccgcccactcggtgttctcaccccacctgatctcccagtttagaacatccaggatcaaggacagaacacacccacggggaaactgaggcacagagccctgaccagggttgagtgtggggaatggggtcccaccggattcagcaccaaagtcaccagtcccagctccgctgtctcagctcccggcggggtgacggggaggctctacccccttcgaagggcacgccaggccccttcgggccgcctcctgcagagaggagcgggggctcgcgctgcagcagcgcagtggggacccttccgccccaccccactccaccccactccactctcacgcccgagatcggagagaagcccggccgcgggtttcttgccccgcacccaccgcaccctcaaccacaccccacccaggccttccgcgcggccggacctcttcgccggtcctcgcgcgccctctgctggcggcttccaggaagcgcgcccgtggcccccaatacccgccccgcccccagccaggccccgcagcccggcaggccccgcacccgtccccaaggacgccccacggagcactccccatcccgccatccccgtttcagtgcggccgctcccatttcggatcccagaggcccgtttgttcccagagggtggagggtgttaggatcaggaaggcagagcctgaagctagagtggcgagtgaggctcctccctgcggagcccgaggggcatctgcagcccgaatttattcttcgcagggaggtagagaggggacatctccttgcagaccgcccctccgcttggtggtcctgaggctcccgtgggcacaaggtaagggagagccaaggaggccctcaggtgggtggaccctggttctcagagtctctgaggtgggaagctggcgctcaggactgttgccagcaggaaggggaagagcatggcctctgggttctcctctggggccacgcccgagggccctcggctccctccccgttaggcagctcgggaggaaggggaacaggccgggggatgatccccttacaaggtgctgtctggctgacaggtagggagggtagctcgaccagaggctatgctcaaactggccccaaagtgctccacagaatgctgggtccaaggtcaggatgatgagggaggattcctcagcggacgcctggagctgtggggaggcgacgtctcaggccaggcgaggcccccatcaggccctgaggtggagttggcatggggacaagtgaggcatgtgtgggctgtggggccggaccgggtgtgtgcagggacatgaggccaagggctgaggggaaagggtcaggtgtgtgcaggcccgctggggccatgggggacagggcagacacgtagggatgtctgtgagctacagagcccggacccctgcctccagcagggctgtagcttaggagtgctcaggcattggagccctcgacaccactaattcccaaatggaggtggagaggtcaggagaccccacctcagggcaagcgggcgactgctgattccaaaccccaggcttcagggccggggactgtgtccttcaacatcagcacaggaaccctccacagactgaaaagctcaggctccttgcttcagataagggggaaggagggaaagaggttaggacagaaagcccagttacatttgggatggatcgaaccagtcccagagaggagccaggaaaaccagctgggcttcccaggtcacacagatctgagctgaaacccagctctgttcttcatatggtgtgtgacttagaactagtaaatgaacctctctgggcctcactttcatcatctgcaaaatggggataatacaactatcagagggctgttgggaagcctacatgatataatccatgtgcagaatgggttaagggtggactggccaggctcaggagtcaataaatgacggtgaaactctgctgaaacaaaccagaaatagggtacagctaactcctcactggaggctcctttcataacctgaaaaatgtgccttggtcttctccaacctccatagaagctgttgccttctatctagtaggaatcaaaaacatctttggccgggtgcggtggctcacgcctgtaatcccagcactttgggaggccgaggcgggcagatcatgaggtcaggagttcgagaccagcctgaccaacatggtgaaaccctgtctctactaaaaatacaaaaattagctgggcatggtggcatgcacctgtaatcccagctacacaggaggctgaggcaggagaatcgcttgaacccgggagatggaggttgtagtcagctgagatcgcgccattgcacactccagcctgggcaacaagagcgaaacgccatctcaaaacaaacaaacaaaaaacatcttttactggcaccaatccaggcaccatgaatatatacatttgaaaaactctggtttgggaggaggaagggaactctggtttgaaagggcatcagattagcctgcctggagtgcccacaacctagaaggctctacctgagccaatgccacagaaactcctcttgtcaaggacccactcctgtgagagggaagctcactgcttaccacgcaggggcccagactccacctgggcaagagtcacaaatgtaaatgcttacagggttcggtcccagttacagcagtagggagtggtgaggactttgggtccagtcagttactaccatgtgggaatataggggaaggatggcattaggacagagcacccagccctctcccaacttcatcccctgcccacctcctaggagcttcctaagacacccttcccctaggccctatgagtctgtttcctactgctgcataacagattatcacaaactctgccccttaaaccaacaccaacttatgatctcacagtgctgtaggtcagcagtctgagcaggctcagcccagttctctgcttagggtcccacaaggctgaaatccaggtgttgccagcctgggctcttcgctggtggctctgggaaaggctgcatccacacacattcttgttgctggtggaattcagttccttgtggctgtaggactgtttccctgctggctgtcagccagggctgcttttcaaggatgctctctggcctttctcctgcttcaaatctctctgactgcccttctgctaccagccagagaaagctctttgcttttaaagagttcatgtgattagactaggtccttttgccgtataatgtgacatgaccacatgagtgacacctcatcacagtcatacccacactcaaacgggagataatccaaaggcaaagataactgggggtgatcctttgaatcctgcccagcacacttagcttctggggtggggtggaagcatgccttactcctaggtccagccctcctgacctctgagagaccttgaaccagggcatatcccatctctgggcctcagtttcctcttttataaatggggtaagggggctggatggcatctaaaattcctcccaggtcccaaatactaactgtgacacaggggatggggaattcagatcccttgactggggggccccactgaccatggaagagcaggactgtgttgccctccagcagcacccccatcccaacctcccacagggccttgctagggacagcaggatcggtgacagccacacagcacagcaaaggtgcccagcataaggcggccagctcccccgctgagctgagctgtgggcaagtggagaggctgcttctgtagccagagaccacagtgcctgtgaggccccatagaccatgatgggtctattatggagcctgcacagggcaaggtgggctggatgtacttgggagtggggtggggcaaagtccatgttgggtgggcaacaaccctcctacctctccactcaagctggtttccaggctcctctcccagatccatctcatcagtcctgatctcagcttctgcatctccaaaagggccttctcaggctcctcctgcccctcccacctggccctagctggacaaggggcattgacttcagcatcctaggccctctgagagtcccaatcatccagccccacctgcttcactcctcatctttctcccaggcccctcctaccctccccaggtgccactttcagttctgcctacaagctgcccttcaggggtccccattcccccaggctcccaccaaggcccagcagagggggctggaaggagcccctccccaactccatccaagcgcgggagctgggtaagaggcggggaaatgaatattaatttatcatgattaggcaaatccggcagggagagccgattccggcggaggaggctaaaaagatgaatttcagcaataaaattaaataaggacggacgggcagcccctcctccctcccgctttgctgatctctctctttcttacaatttatgaggccaattatgaagatgaggttggaagttcctggaacttcactaaatgcaaacggcggtccctgctgttcccatcaaattaattaaccgcgcgctattgatggccgctcaaggctgacgcaggcggcccaccctgcggcctcctccatggacacgaggacacagggtccgggggcccagccaggactccacctgcagtagggactccagcaccactggggacttccagggaccccccacctccttctacccaaggccttgcctgagcccttaacaacgcagggcctccaccaagacctaaacagacagggccacacggtcacatgcccagggttgagcacacacacactcagatacaaaatcatgaacatacagcacagacgcaggggccgggaatgtgcattaggcacacacatgcccctgcagtggaacatgaacacacatatgcaggggcactacacacacaacaacaaccacccagctgagggaaccggagcaaaggatgggggaggtgcgctgtgtctggggctctgggcctgctccatcagggccaggctgagtccagcagggcaaaggtgccaccattgctaagaggctccactcaagcaacggccagtagcctgccttccctggggtccgtactgccctccaggggcaacctcgggcccctacccatggcccctcagcccctggggccttgcttcatctccaggcctggggccttcttcagggatgttccctgcagtgtggggaccaggtcttgccgaacagagcctcaggccagtttgggacttcatccctgaggactccccagttccagagctcagaagcagtactccccagtggctcaagagttctggaaaactaagggcagagcagacataaggccaaaggcacctgcggctgagcccatcaaggcctgcaagcctggtagcagcaggtgccccaacagcagtaacttgcatgggaggccactccctcagataacaggggagggcctggaaaggggcgcccctgtttggggagcccaagtcttctccaagccacagtcctccatcctggcaagaggcatcccattccatttaaagggagagtaattccatgattctcctggagaagcaagacaatgggcctgggtttgcctttcccagccattggaactgtaggatgggacacagctagacttgcctaccttgtcatgcccactccaggtgatgcctgggaagcccctgtcccatgcccacacctgccctgtgagcagctggaacccaggaggaaaggccagggcctgtctcgctcccctttcccggtgcccacgtctgccttgtgagcagctggaacccaggaggaaaggccggggcctgtcttgctccccttttagtgtaggtctaaggtcaagactgaggtccccaccccaggccctgggaaaagatgaagctccaagctcagtaggggtggggcagagcagcccagcggggacttgcatcttgcacagtgtcaagaagaaactgaaattagggaggctcagactgaacatgtggcagccctgggctcatgtgaggctcccccttccccacacacttcagaggatgccctctacctcacagcagggcctgctcacacttgctgtccctctgcctttgtacagggagagcccaacacgcactcggtctattgggtttctgcagtcacattaacaaattacaccaacttactggcttaaacaccacagtcattatctcacagttccaccagctcaaaatccaacagggctccctgagataaggccagacatcagcagagctgccatccttctggaggctctagagtagaagctgttccttggcttctctgactcttagaggctgctcacacttggctggagacctttccccatcttcaaagccagaaacttcgcatctctctgacctttcctcgtcaagtctctctttgattgtagattgtagctttttttttttttttttttttttttgagacagggtctcactctgttacaactcaggctggagtgcagtggtgtaatctcagctcattggaacctctgcacctctgcctcccaggctcaggtgatcctcccacttcagcctcccaagtagctgggattataggcaccactaggtctggccatgcctagctaacttttgaatttttttttttttttttttggtagagatggggttttgccatgttgaccaggctggtctcaaactcccaggctcaagcaatcaacccgccttggcctcgcaaagtgttgggattacaggcgtcagccaccacacccggccctgactgtagctcttaagaactcatgtttacactgggcccacaggattactcagcataatcacctcatctcaaaatgcttaagcttcatcacaactgcaaagtccctctagccaactaaggtgacatattcacaggttccagggattaagacatggacatcttcagtggaccattattctgcctgccacacgtggcctgtccaaggacaaccctggctcagggacagagtgatgaagaactgggctggagcagggagcaggcttgtggggtctctctgcctactccaggccaggtggtgactgggtggtaggtgtgcggggtgctcagctgctggacaggaccccagttaccaccagggccctgaaatggagtctctctccattcaggatgaatgggagactgggctgaaagcctgttcgagaacctggttcagcgctaaagtgcctgggaacccccaatattcatattccttgcttacttggactcagagaacctcatttcacctcattttacctccaaactgggcagcctttctcaagactcagaaatccctccattagctcctctgcctcagtggctcttctcctgggcttctgtgtcagactgggcagctgaagggacacccagatgggtcactggaggtggggcatgctccctctttatcccacgactttgtgttgccctggccaggaggtgggaccaagagtctgcatggtttcaaggcagtctctgaattctgagtctcctgggggaaggagttaaggcagatggggagggatgtcaagaatggaggtcagaccctgatttcagacaaagaagtaagcggcatccctccctgcagttctgggacctccctgtgtgtaggaaaacttgggcgagctactctatggcctgctgcacactggttccctccacccccagccctggaggtcctgttccttgggcctggagcaggctgcggcaaaaggagagaagcaacttccacatttggacccagacacgcatctttggacttctgctgactccaactcttgctggggacagcagcaggcactgagggaccagtccagagtgggaccaaaagcaagccttcacacccgggggcccaggctttccccagcccctctcctatctacccaggcccccactgtggctcttggcagccatgtgtccctggcagtagacactctcaggggagaggctcgcccctctagaaggcttctgggcttttgattggccatctcttgggttggtgctgagctgcgaaagggccctccaggtcctgtgggcttctgattcctttcccaacatgatcagtgctgggaagaccccctgacttacacttcaggggtatgagcttgagttggggggcctactcccaggctgctaggatcccatgatcgagaccaggcagacaaaggctggctccgggactctgcaagttaccaacagaaatgtagcccacccagcacactcaaggtgggatccccctgtggagccaaagctgccctcacgcgtcaccacccaactcccagcatggggcctctccaggctcctcctccaatacagtctccttctgactctgtgcccactcctcctcatacttgggctgcctgaagctccttccatgaccccactcccccaccaagtctccctgccctgtgaaacagcctcaggaagacatcccgcactccccagcgggacctgctcctgtctgctctatcaaaccaagctctgcttccagtcctctgccagcccagcctgctcctgactcccagcacacagtgtcctctctaaagctgttccttaattgtccccaaacagagcctgctgactcctctcagaggcaatttccctgccagtctgcctctctcctcctccgggaagccttccctggccgcccatccctgtgtacacggtcaccatttagttgttcctaatggtttcctgagtcttgtcacttttgctcatgtcccctgatagcctggtctaaggtagggcctgcagaagatgctgatgactagataggagctctgggtgcctggctccaacattctccctggtcacagccactgctgtccttgctgtgagtttaggagctgactcaggccagtcctgtctggagggcagttaacacagcctttctgggctcctcttttcagttcccatctctgtcgtccctgcctgggtggaacaaggtagccagaggctgcagcagctcagacaccaggcaggttcaatgtcaaatgcactttactgggcccctgggcctcccaacactgtcctcaccaaggctggggcaccccattcccagcaccaccagctgcccaggaagcaggacggatagagggaacacatgtggaatggctgttctcctaccccagagggtgccggatgatgttgacagcacggctgcttccctctcccctgcagcttctgtccccacccagcagcttggcctttcccatagcagggaagggggatacctggggcttcaaaccagccacctgctcctgcttaaaatggggcaaggggccatttgcaaaattcttcgaggggcagtggtgaggtagaaggggtggcagcctgctcctgtctgggagagggctgggcagacactgggagccgggcagacactgggagccgggctggctcttgcttcaggcccagagccctgggccctgctcgctgaggaagctggtggttggagcggcgaggttcagccagctgaggctggagggagtactgggtggccaggaggggtagccagtccaactcggctctcctcagcacccccagccatgggtcaccagtcccgctcagcaggttctcggtaggggaggcctaagagcctgaagacatccttctcagtgggagtgggcagcactcggccaggccccaccttgcagccatgggtgttccggaccacagcagtgctgagggcatgttctgacagactcatgcccttggttttggccagggctcgcatggagcggttgaagtgtgcagagccggtgaagtagagcagggcacaggcaaactcgctatagggcaccacgatgatgtccaggcgccggtgccgccgccctggccctgggagccggcacacccccaagtacttctgttgctgaccattctcctcttggctcaccaagtcatctgtgaggaaccctggcccaacagaggggactgctgggagggcagggaaccaggcctgggctgtcccatcctcccaggtctctcctgatgtctaagctggggcttgcccaggtattagctgggtgacactaccctctctgggcccttctccttttctgtaaaacatggatagtaattcccatctcccccatagtgtcacagaaagatcagatgagatacttggcctgcagggttcactgagcacctccacataggtgtggcggggctgttccatctctccctggagaggattccggccccgatagagagatgggatgctggcaaagcactgttcccctgcttcctgcctcaggactggaacttctgaggttctccctctgagggggcccccagacctgtgctgccctctgtcaacctgctcacccagagatggagcttataccttcctgccgaagactgtcaaggaggcggctgaagataccccggtgggaccggccatctgggtgagtgatgagcacgtcgacatcaccacaggtcgcctttccccgtcggtatgaaccacatgccacacacagcagcccagagttaaaggcctgggctgctttctggacctgggaaagagagcggtgacaggtgaggggctgtgcgtggggagctcctctcccacagcagtacaagggccttcccagactcgggcccacaccctcagcttatgcccattccagatgcctgctgcaagcccaggggaatccaccctgaggagctgctgttctttcccttcgctaggacaggagagaagaaaaagctcactgtgcaggaggcaagcctgaggagagacgggagaaggtgccggctctgcttctgagagtgggcactgagcttgccctgtggagctctttaagagtagggagacacagactctctctgcccctgccccagcccacgtgcccaggtctgtgaaactccacttaggacaaggggccaggtgctgaaagccctcagccaggtctaggcagccccagatatctactgatttggagctaaaggtttggaatatgtgagctggggtttgaggactgagcaggtggctggcagcatgcgccaggcccaggcccaggagaaagtggagcacagaaatacagctgcacctgtgggaaaggagaggaaagaaagcaaagagggggcagttctgagccaacacccacatcctttcttggtggggagggagctgagacagcaactgccagctgaaggattgtccctctgaggaaaaataaacccattagcctccacccctgagacactgaggttctttcatatgcagatggcctcctgcctccaccccaggacactgaaaattctggggccccggacacctcaagtatcctgacaggagggctccgctaatccccttactcccttcttgagcctcccaagagaatggaaggaggaggtccacgtgagtaatcccatcaaaactcctatggctggagcccttaaatgggggcacaggaggccaggtgggaagcctcttttgttccaatgggctgggtactgactgaggcattctccatgcccggacaccatggctgagtgacggtgtcatcactagcaccaaggcctggtgatgggcagacaaagaggcctgtccatccatctcataccggcctcatagccttgtggcctggaatggagctgggggctgatttcaatcaaactaggccagtctccatgggatcccactctatcagaatccctgaccaaagtgagcaaaacttgcctattacaagcagctcctaatcctaatgcccattgaacaaatgatacatctagccctaaatgcagtccagtgtctctctaatctagcttttacatgaacctaatcgctaacccaactctaaaccaaacccaaatcttatttcttggacaactacaaatcttaacttaaaagcaaccaacattaagaaaatcctacgcctaattaaagcctaactttaactcaatctttttttttttttcagacagagtcttgctctgttgcccaggctagagtgcagtggcacaatcttggctcgctgcaacctccgcctcccaggttcaagcaaatctcccacctcagcctcccaagaaactgggattataggcatgagccacggcacccgcctaacttttttgtatttttagtagagacggggtttcgccatgtttgccaggctggaaatttttgtatgttttatagagacagggtttcaccacgttggccaggctggtctcgagctcctgagctcagatgatctgtccaccctgttctcccaatgtgctgggattaaaggcataagccactgtgcctggtcttaactccatcttgatggagctttcttccagccccaaaccaaatcctactgacactgtgcttttacaccaactctaccccaaatcctgagccagccttgcgtgggctttagaaggtccatacatctggaaaaagacataaacctttgcacatttgtgcattttggggagaaaacagtccacagttttcatcaggttctcaaagaagttggtgaaataaaaaaaaaagataaaataaaatattaaaaccctctgccctgacccaccctaacctcagtacagatataattcacctgtaatctaaccctaacattaacccaatcctaacaccaatcagtctagaattgaatccaatcctaataggcctgactactgagaaccagaatctagagggctggtgttacagctctttcctcccaaagctccccacccccacctctgggcctggagcttcagtcttaacttgctctgtgctcaacctctggtgatccacagtttcctctgcctgctgtcctccccagctgaggagttgggggttcttggctttgacccaagaccttacagcaggacctggctgtcctcactgctctgggacacctgcttactgtctgctcaatctctgtagcctcctccctgggcatacgttccaggaagtcactgtaatgcttcaggccgatggcctgctgggttgtcagggaggcctggctgcggatgtcttccagacttcggaagccctggaaaaaagcagccagatgggaagctgtaaggatccaggaccaatgaagaggcatgagtgagcacacacacaaggcttccatcgccccagactctagggaaggctagaggcaggaccaacctaggggcagttgggtctgtactcagcaggacttgggaaaggcagggagcatgggaaacatgccatcatccagccctgccactatcctaagatgctcgttcatgattccatcagtctgaggatggaccttgtcatcttcatccttaccaagctgccctggtgattgtgggcagagccaggattgggaaccactgctctagacacgcagtgtcaaggcctggcctcctcaggaaggcccttgctggtctggggagactgagaaacatacttcttgtccctgtctactccttcttaaggataccaagcaacaaggctgttctgggagctgaggggtctatatgagtcctggtccgcttgaaaaatggtctccctatactgtgggtgcattcccatcagagcacagcatagggatctggggcagagcacagcacacatctggggcaggaactctgagacacagcaaaactgaagtaggggctgagccagggtgtgacctgttggtaccacatctgggcagtcttggtcccagctccccagatgttggagaagagctccaagacaggcacgctctcactgatatggtccagcttccgcaaatgcccgctctccaggatctctatgattttctcagccatccgcttcccaatcccagggatactgcaggcctcctagaggaggaggaggcagaggcaagaaagaagagtgaggagatggaagaggtagagccagtggaaaggaagctgactcctctagcagatgctgacataaaagccagcctggctgcttggcaactgtgtggctgtgtaaagcttgggtgtagttgaagatgagaattttggatagaatgagggctgggtaatttgtcttttggttcccagaaggatggagaccagcagtaagaagtagaaaataatgatgatattagtcaccaccaccaccaccaccatcatcatcattccaacagcaagagctaacatttactgagggcttactctatgtcaggtcctgtgctacagggaccatttcatttaatagtagcccctttttactaatgagaaaactgatgctttgagagtttaagtaacttgtctggagtcacacagttagtgaatgacaggaaccagagttcaaaccctggtctgttaggcttcagagtccaaacttcttttaaacaactttttaggcgggacacaagggctcatggctgtaatcccagcactttgcagggctgagccgagggtagattgcttgagcccaggagttcaagaccagcctgggtaacacggcaaaacaccatctctgctaaataaatgaataaataaataaataaacaaaattaaaaataaaaaacttttaattatgttaaaaaattcaaaagtagagagatccatataacccccaagtatcgtacatctcccagcttcaacaactatcaagattttgccaatctgctttcatcaattttccttttttttcttttgtgcaagtcctagaccccataaaatcttcaccactgtacctgaaccccactggggttactaaccactggccagtaaagacccctcctcccactctagcccctgggtacctggtacgaggtgacaggcttatggaagctcttgagggcattgatggccttggcatagcccagggccctccacttgtctccctgaacactgtaggctttggccagaacttccagcttctctgtgatatggaggttgtgattggtcgccttctggcttgagggctgtgcacagacccacttatccaggacagcaggggctgggctaggctcacaatctccctcaagggaggtggggtagtggccactgatgagggcttccagatcagctgcactaacctgggtttcttccccatcactggcttcatcatcagagatgggcttgggatagagaagaaaagaaaacaataaattcttgttctccaagagaagggatccttaaaggtgggggtcatcttctttgtgcggggggagggtcttctagtcagacctaagaatgaggcggggccttctgcatcagacttggatctccttgggtgtgaggccacgttccctttggctccacgcagtgcctagccctaggatccccagtggtatgtgttagatatggcctagataaatgcagcagtgatgagtgttgggaagagctaaatggcttcacaatagagccctcctctctcaggggcctgggactttctgaacagccaccaggcccaccccatttctgtgatctgcttcctaggggaagggagttctgagggatgggaggctcctgacctgggcttgggtgtttggtgcctcttttgccttttggggaggagacacaggcctggtgggaggaggaggaggagaaagggctgtctgaagcagggcctcatgggtgccaggaggaatagaagcatcctgctctgccttgctgggctgtggatggtccaagtacctgtggggatggtgatgggaggttaagacaccaaaggtctcaccctgtatctgtccccagtccttctgtactctgaaatacttggtttcccagtgtgtccaattaagaaaacgagttttttgaggtttttggagtttctcttgagacagggtcttgctctgtcacccaggctggagtacagtggtacgatcaaggctcactgcagccttaacctccctggctcaatcaatcctcccacctaaacctcttatagctgggactacaggcacaccccaccatgcctggctaattttttaattaatgatagttatttttaataattcaagaaaagagctcaagatgctactagaaaacatttgaaaaaaagactgggatcagcccacctactggggatgaagatgctgaatccagctacatccaccagcctcctctcctgaaggcacaagctcagccaggctgacttcaccagctgagcacccgggggcagctggggtagtctgagaaggcggagggctcgctcatagtccatgccttcatccaccacaatgtgagtgacacctgggccctgggcagggcatagctggccgccatgctgaacaatctgcttctcaaagagttctgcccgggctcgtccaatgccagtgcgcacaacatgggcccgaagggagctcagccactctgtggaaggaacatccagatgactactgttgtaactttttaatttttatctgccaccccctggccacgacataacttctaacatgatctgaatgacgtgttcacagtcccctaccctgaaaataagcatttcccttccatccagacagctttccttctacatatagcaaattttctcacaggccagcacttgaatgtaagggacaaggattttcatacgtcctgttccttggtgcaatctagaagtgtctggcacattgtaagtaacctgtaaatatttgtttaatgaatgcctcctcccttcttactttgttttttgtttgtttgttttgttttcttttgttttgtttttgtttggagacagtctcactctgtcgcccaggctggagtacagtggcatcgtcttggctcactgcaacctccatctcccgagttcaagcgattctcatgcctcagcctcccgagtagctgggattaccggcgtgtgccaccatgcctggctaattttttgtatttttagtagagacagggtttcgccatgttgcccaagctggtctcgaactcctgagcacaggtgatctgcctgcctcggcctcccaaagtgctgagattacaggcaagagccaccgcgcccagcctctctccatactttgaatcctttatcatttattctttcaacaaagcgcgtttcttgcccttacagtctgacagacccgacaaccctgcctccaaagcctctgccatttatttgccaatttggctgcaaaacaactaacaacaagcctgggtaatggaggggggtttctgtcccagtcctcagggcaaaaattatactggtcattccctgagggcccagggagtcttttctgatggatagaggtcttcgggtagaaaagaaggtaacacagcaaatagcctgtccaagacccaggaccaagcttagcacaaggtagatacaaacagacctgcaggccctggacaggcagagtcagctccaatatctgattctggacataaacaacgtagggctgaagcacatgaaggctgtgggttcaagcacacgagggttctgagactgggtcagctcaccttctgcttcttctccctcttccctcctaggaatctttgcaagtacttttgatgatgcatcagcatgaattttctgccgcttgggaaatgccttcaagatacccctgggatccattgaagtatggctggatcccggcctattggagcgttggtcagggctgctgcacgtggaaatccagaattgaggccctccaacccctttgcctatggaggtagggtctttcctgaccaggctttgggggtagcagcccagtttggggaagcgggtcgggggagggggtctcttcaaacccggttaaacttcagtggtttagcctagcttcacactccccagcctttcgaagttggagtattacgggaaatgaggggaaggctggtgccatcgggggtacttttgaggagtaggaaacgacaccattcctcagaggggttgcgctaaagattcagcacagccctgctgcggcccacttcgaagggctttaccaaatgggatgctgggctaggaaatggagctttaggggatggagcggagcctggggaggacctgcacataaaccccacatactatttctctacctccaacacagactcgcagaggaaggaggaggactttcgggggtgagtgggaacgccctgcacctgtcctggtctcagcctctcgacatgggggtgctcagcgccgcagctgcggggagatggggcacggccgcagcaggtgtggggagccctccgggaatggaggagtctcgcagctgcgggtgaagtcccgggcaggtgcggtgtactcgccgtgtacgcagctggcgcaggccagggaatcccagctcggggctagaagaaagctggagtgcccgaccccggccccaagagtctctccaacccccagagtcggtccccgggtggggtcgactactggccaagctagtcacccgggggtgggcaggaatagaccacttaccagcagagccaatgagagcggacgaaggggggaaggagggcaaatggccagaatagcttccgagtcagccggaagtgaccctctggaacggttgccatggcagcggctgggcgtgctgcttagcaggggaaagatggcggtgacgggctggttggagagtctgcggacagcccagaagactgcgctgctgcaggacggtaactcgagggtccccacgggctccttcgtttttttccctcagggtccggccctccgggaagggcctcagggcctgggtcggcagagctggaagggtctcggcggtcagccgggccaggtcctgcatttgcagatgaggagactgaggttcacagagatgacatgactggaacacatgtctccggacaccccttagattcctctacaccatctcgctccgctctgatttctgttgctaatatagtaatttcttttacattcattatctcatttgctcctcaccactgtcctgagaggctaattttcaccccgttttacagaagaggaaactgaaatccaagaatgttttagactttagagaggagagaggcctgggctctagttccgactgtgccattaattcaccacgggcgcttcagtcggctcctttacttgtttgggcctcactttcctcatctataaaatgaagtggatggactaccattgttatctctgaggtcctttccagctgtaatatttttgttaagtgaacttctaaatattttctgtgtctttaggggagctagagcaagaaccaagggctgtgcctggaagaagtgggcacaggggcatggatacctaacttttccccaccctaggattggccgatgccggcccctttgtgcacttgggtcctttctggacccactgggtagccaggatgaattgcgtctgaagttcctgaggctttcaagataacaactggtgactcatgttcacaggcaggggccaatcagggaagcctggagtttgtggaaattaaaatcatttactcgttcgtgcaacatttaggaagacttttactatgtgccaagctctaaactagaacagaaagaaaaagatatgttgtcccaggactcagagtggttgggaaaaacatgtacttaaataataagaagcgttaaatagaggttgtagtcttgtataaaatggtaggaaagagtgaaggtgtaagtgacatctctttggaggaagacccaacagaagtgatgatgtttctgggtcctaaagaattaataaggtcaggcacagtggctcacgcccgtaattccagcactctgggaggccaaagtgggcggatcatttgagctcaggagttcgagaccagcttgggcaacatggccaaacctcatctctacaaaaaatacggaaattatggccggatgtggtggttcacgcctgtaatcccagcatgttgggaggccgagtgggcggatcccttgaggccaggagttcgagaccagcctagccaacatgatgaaaccaccccatcgctactaaaaatacaaaaaaattagccaggtgtggtggtgcgcacccgtaattccagctactctggaggctgaggcaggagaatcgcttgaacccgggagatggaggttgcagtgaactgagatcacaccactgcattccagcctgggtgacagagtgagtgagactgtgtctcagacaaaaaaataaataagccgtgcatcatggcacatgcctgtagtcccagctacttgtggtggctgaggccagaggatcgcttgagccagcgaggtagacgcagcagtgagccgagatcatgccagtgcactccagcttgggcgacagagcgagaccctgtctcaaaaaaactggaaaaaaaaaaaaaaaaaagaattaataggcgtttgctgagtgaagaagaggggatagctattcaaagaacaactcacatataaggaccctatgtgaaggtgtgaaggtacgtgcctgattactagaggaataacaaaatgtttagtaatgttaaagcagtcactcagtcagaacaaaccacctataactatgtcaggtactattctaggtgccaggatggaagcgagaataaaaaggtcccttttctcaaggagcaatgaggggaagttgtggaaaatgaagagagatgacagataagttgggacatattgtgatagatctcttatgccttgctaaagatttaggacattttctcataggacagtggtttttgtttttattgtggtaataaatacataacagaatttagcattttaatcatttttaagtgtacagttctgtggcattaagtacattcacattgttgtgcaactatcaccaccatcttcagaactttttaatctttctcaacggaaattctttttttttttttttttttagagacagggtcttgctctgtcacccaggctgtggggtacgatcatagctcactgcagccttgaactcctaggctcatgtagtcctcccacctcagcctcttgaatagctgggactacaggcatgtgccactacactcagctcaagtgaaattctgtacccaccaaatgccaactcctcattccctcctcctcccatcccctggcaaccaccattctactttctgtctatgaatttgactgctctaggaacctcgtctaagtggaatcatacaatatttgtctttctgtaactggtgtatttcacttagtgtaacgcttcaaggttcatccatgttgccacagttggatacttccagctgtgccattaattcaccacaggatctctagttggcccctttacttgtttggatcctttccagctgtaatatcgttcataaagtaaacctctaaatgttccctgtgtttttaggggagatagagcaaggaccaagggctgtgcctggaagaggtgggcacagaggtatggatattgtagcatgtgtcaaaattttgctcctttttaaggctgagtgatatccattgtatgtctacactgcattctgtttatttattcatctgttgatggacacctgggttgcttccaccttttgggtattgtggataatgctgctctgaacatgagtatacaaatatccacttgagtccctgctttcactgtttttggtcacagaagtttttaaacaaatattttatcagccaggattttgttaagttcttttgttagtagcatcacaaaatgatattgttaagattccaccctatccccagactgaaaaacaactcagtattgcatatgtggttaagccttgtcaaacctgcagatttacccctgggtgtgtaggaggggtgtggggagtaggggggaggttactcccttccaccaagaatcatggctattgatatcttgggctggataatgagactccattttacttttgtttttttaagaaataattacattcattgtggaaatatgaaaaataaagaagtcaaatataatattaccacccagataatcataatttacttttttttttgagacaagtttcactcttgttgcccaaactggagtgcaatggcgcaatctcggcgcactgcaacctttgcctgctgggttcaagcgattctcctatctcagtctcctgagtagctgggattataggcgcccgccaccaagcccggctaattttttttttaatttttagtagagacagggtttcaccatgttaaccaggctggtctcaaactccagaccttaggtgatccgcctgcatcggcttcccaaagggctgagattacaggcgtgagccgcctcgcccagcccataatttatatttttatacataaacttctatattatttcatgcatacactcacagttatttttcttttacaaaaatatactaatatacttaataatttatatatacatttatttctagaataaatatactattaaaacaaagtatagataagtatcgaataatcattgggtaagggaagatgctctgagtgcaacttctaaggcagtaaccacaaagaaagaaaatatatagttggctttataaaaactaaacacctgtgttgggtacctgtaatcccagctactggggaaactgaggcaggaagctcacttgaggccagaagtttgaggctgtagtgtgctataatcatgcctgtgaatagccactgcactccagcctagggaacatagccagacactcttaaaaaacaaaaacacttgtttgggaaaacccactttaaacaaagttaagggccaggcgtggtggctcacacctgtattctcaacactttgagaggccaaggcaggaggatcacttgagctcaggagtttgagatcagtctgggtaacatagtaagaccccatctctacaaagaaatttaaaaattagctgggcatggtggtgtgcaaccatggtcccagctactcgggagtctgaggtggaggatcacttgagcccaggaggcagaggttgcagtgagccgagatcacaccactgcactccagccttggcaacagagcaagacactctaaaaaaaagcctcagttggccgggcgtggtggctcatgcctgtaatcccagccctttgggaggctgagatgggcagatcacgagctcaggagattgaaaccatcctagccaaaatggtgaagccctgtgtctactaaaaatacaaaaattagctgggtgtggtagcattcacctgtagtcccagctactcaggaggctgaggcaggagaattgcttaaacccgggaggcagaggttgcagtgagccgagatcacaccactgcactccagcctggcgacagagcgagactctgtcaaaaaaaaaaaccctcacttttcctcatctatgaaatacaggtaatgaaaacacataggattattgtgagaattaaatttgataagacatgtgaaatgcctggatttagtaagcgctgcatcctgcctggactcaaggctggatgccaaggggagaagatggtcaggcaagaccccctcagctcctcccaggcagtaccttggatcccgctcctgacaggagagccctttctaatgcctgtgagccatccaaatgattaagggtggtattacctagggctctgctagaggccctgcaaatttaggggtgagtttatgcagaatacagattaggaatggctcaagggaactgtatcccagagaagtgaattggacaggaaaaaggcaccttggggctcttattcatcaagcatacatagggtacttgtctactggatgttagtgctctgttactagttttactgaggagtctgcctgtatctacttccctacctataaaaagaaaggggaaattacatagccactcttaagcaaatgctccaggggtagaggaattgggctaggagactcccttagtttcttcttcttctttttttttagacagagtctcactctgttgcccaggctggagtgcagtggcacaatctcagctcactgaaacctccgcctcccgggttcaagcaattctcctgcctcagactcctgagtagctgggactacaggcacctaccaccatgcccagctaacttttttgtatttttagtagagatggggtttcaccatgttggccaggctggtcttgaactcctggcctcccttagtttcttctgttctttcaacggatagtgcatcagtgtttattcatcctttcaatcagtatttagttgagctcctagtatatgccaggagccacacttggtctttaggaaaccatagcatggggataaaacccctcctatctagtagaagagataggcagtaatcaaagagtcacataaaaagatgtaaaatcataaccaaattaagtgccatgaagaaaatacatggggacttaacattgtgttactgtgtgataggaatggcctggagatatgcagaagaaggcagggcactggcatggctagagggagtgcttggtcaggaaacccaattcaatgtcctgaacacatagagagataaatacgatgtcattcatgggaagacaaatgcttttaaaagtatcatggtatgtagtaaatgctccactatggatacgagtaaaacattagggaggcacacatgaggatgtgattaatcctaccaaagtggctggaggtgatagtggaggaagacttcccagtggaagtgacatttgagctggattttgaagggcaaagaagagttccacagataggaaaaaatatggagctgttgctggtagaggaaacagcagggcaaagatgttcaaggaaagcttcagaaagggagagagtctcaggacacgttttaaagtaatggtgggtggtggttggcaaggagtttggggaggtcctggctgggttcctcagtactcccaaggctggcactgtttcccaggtaggccccttgatctgcaagggacagggcaaggggagactttgaggtaaggcattctctgttttgtgcatagggagaaggaaggttcactatttattcccagacggcaaggaaatggctgaagaatatgacgagaagacgagtgaactacttggtaagtgacagaggctcccagtgggcctttagtaatacttggggctgacataagcacaatgaacactcctagccttaggcttgaggtaggagcccagatcaaatgtagaggctgggagagacggaagccctcgagacaacaacgttcctgagcataatctgggcaccaaaagtggaatgcgagtccttttgaccagtaaaattcatccccacccctcaccccagacaaatgagagagggagtaattctaagatgtagagaaacagttgggaaaaaactttacagaggaggtggtattggaagtgagccttgtaggtttaggagggataagggcagactttcacaatttgtttttccttgtttttttgtttgtttgttttgttttctaaagccacaccaggagcaagcgagtatcagaggcagagcttctgagcttgcctcaaaggcaacactataaaatatggtccttattttgaagaacatctcagtcaaagagggtcaaaacagtgattttgcagcgtggtcactttcattcctgcagcgcctttcctctaagaacaggctcatgggtaggggctccagctcagatttctgggaattatttgatttgtccactctgttcccaggtgtgcacatcagcattaaccagcttcccagagctaggtggctggctctttgacccagggcccaaggctgtcagcagtgggagttggtctctttattaagttccatctgaaatgctaagaccaatgatggaatcacaggctggtttattttcttgtcattattcttggctttaatttcttcctgggcctgatcgacaggtagtattggtgagggaatttctttttccttttttctgacagctcataaatgtctagaaccgacaacatggattacacgggcttgcattccctcagtctccagtcttaaaatgtttgtcctgcgcatgttcagtcgcacagtgaagtgttgatccctccttattatgagctgcttgggctccagtcccagttggtttagtctggtgctattaaaaatcttgatgtgtttagcatatgacactgattcggtggaaaccaatacagtagtaatatcctcacaatgcattgtaatttatagtgctcccaggggatgacagccttggaatgcctaacaggggagaacttatgaaagcagaggtcacgtggactagccaccaccataaccaggccagagaatagccgcagctcctcactcccagccccccgtgccacttctctactcctccacacagagcaaataaaacagctatagctgctgcggctgtaaaaacaaacaaataaaacccaggcctctttgttgtgcttggatatgaaactgaaattaaaaacaagtccaggtttcttcatttgtagcaccatgtgccctgatatcccttattaacctgtcacttctcctagtggcaggtggggaatagaccatggcttccaaactcctctttcttaaaagcagaaatggagaagactgttcacaggagaacactgtttggctaaagttgacctaataatgatattaatagcgtgactcttactgggcaccatgctaagtgctctacgtgaattacctcatttactcgtcctcgttaaagccctatgaggtagatactcttgtctccattttacatttggaaaaaatggaagctcaaagaggttaagcaccttgttgagaattatgtagctagtttctaagccaggatttaagcctagttctgtccaattaagagcccatgctttagtcctcaacaacatagtgctgggagttgagaacacttaaatccaactttcttttcttcttactgtttttctttccccagaaaggcctgagtgtggactgatgggcagacaggaggacctcacttgagccactgggcccagctctagaacagcagatctttttcttactcttcttcctatccaccactgctgccctggcaaaatactctccattattaatttttaagtataaataatcccaggggttgagctggcttttgcttgtgcattctatgaagtaaagtagggacatggtttttgtggcaataaataggaatagtttccatttttctagctaagtatacaaatttgataattagccaaaccagttttctgttagaaaaattcaaagtaatttacagaggaagaattgccaataggtgtgcgtcagtctgggacagagttcctcccgtcggtgttaataagcatgttagtgtcctgtttttttcctaccctctcagtgctattcattcccaccccccacaatgattgctgcatgtattcatagaggaaaaaactgaaggccccacaacaatgatcggaacatcaaaccagcctgagaagaacacagcatgtccaagggggctgaggctgaagggcaggccatcccccagcgattacattcggattaccgacttaatctgctttggtatttgaccgccagcctaaccaccccaggctgcatttggaggatattgagcactttcatccccaagcacttcactggctttataaatgacccactcgattcccttcggcctcctctgggatgggacatggcagctgtttaattgccacatagcaatgttgcagtgttttaaggcagaaaagaagaatcctgcatccagttgaagctgcagggaacatttagggaaggggaatgtaattatccacattggaagtgggccagggtttggagctttggggaaagaggcctttaggacttctactttccagcccacctgaaagatggggcctcctttcagcagtctgggacatcagcctgcttcctgctgatttaggaaaaagcccccaggcgccacctcctttatatattccccatcagactcttcaccggggtggaaagtctcttttccaaggtctggctggggctcagctgggaagatatgacagcgtcccgggaagctgcctcacaccagtttgggtttaacatataatcaaatcagagtgacagcagatggaaacagtcttctgttgccgcaggagccgtccttgagttcagaaacaaagacgggggcaagaaagacaagacaaagtgtgcatttgtacatgtgtgttcacacccatgcacttgtgcataggaaaaataagaaggacttccccaaaatcttttattgggtcttatctctagagggaatgggaaaggagactttcttctacattctaacaaagaatttaattctcaaggtgtttaaacaaaaaataaaggtgaagcagccagaggtgtcaagttccctgagtggtttttaaggtcagaagtaaggaaatcagcagctgactttcttccttctttgagtacttcttgggaagttttctgtgtaaaactcaaaattttttggagtaaaagtgcacagaaaaccctggggtggttgtcgtccctccaggccaccttggtgcattattatgcattaggacacccattttagcaaggcccatgacttacaggggcacctcacttatccagccctaggtcgtgaggtagtcctcataatttactttttcagataatcaaagcttaccctttaaaggccaaatataaaaaataaattgagctacttaaaaaaaaacagaaacctttcaaaatattacatgtgcttattgaacactttcagaataaagttttattaataattcaaattctggatttggagttaggagacctggagtttagccgtggcatttgtaagattgtctccttgagcctcagtaattcttcatagtctgtttcctagagagtagtggcaagggttgaaagagagcagtcagggaaaaaatgctatttctcattttaaaaatacagacattgggtagatgctttcttttttttttttttttttttttttttttttgagacggagtttcactcttgttgcccaggctggagtgcaatggcacaatctcagctcaccacagcctccacctcccaggttcaagcgattctcctgcctcagcctccccagtagctgggactacaggcgtgtgccaccacacccagctaatgttttatttttagtagagacggggtttctccatgttggccaggctggtctcgaactccctcaggtgatccgcccgccttggcctcccaaagtgctgggattacaggcatgagccaccacgcccggcctggagtagatgctttctaaaggaacttccacctttaaaatctgtgatggttgtgttctattataaagtggcaccattggagtctaagggtgcttgtttgcccttacactaaatggtcccaagtgtttatgtggttctgacactgccgtccagtgtgagttgtccccgataccattgtcaatatgcctgagaaaaaaagtaatttcctgccttattctacacacagcattttatacctagtctgagcgagaatctgagagtgatctttcctatagtatagagtagggtacatggatcttttcacaataagctgctgctcggaggcatttgtcacttctgagtttgcaactgtgtcagaggcccccagaaggctgcttccagtgaagtgaggtattaacactgaatagatttggatatactcctggtcacagtccgttcacttaagagagaagtatttgtgggggaaaaaagttgcctataaagcatatttccaagttttactcttccttattaattttcattataaacttggaaatgtgtttctagggagaatttttggccctaagaggtaataaaatcacactgcagaatgcagcagaccttataaaagcacatatttaagggaaaattctaattttacagcacacttttgtgttcagcttgtgtgccttacttataccggtgagggcgtttggatttgacacagctgctcaaaaggtctaaagtaaaaccgccggctgcctagtgctgagaacctgactgtagctctcaactcctacctggaaaaagacacaaacagaaacaactgtaactgagtactgtgcactttttgagttgtttagctccttaaacagctacagaggctgctggtctttagcaccagctgggctcctcaggctggaggataccatagtgggcagccccggattccaaatgcagcaggaagggaaaggaactgggggataggaggtcatggctcagaaaagatccccctgcagtgatggaccgcatggttcctgaaaatgaaaatctcagcaggggttttcaggtagtccattcaactagtttcttgatttataattttcataatatatgtgccttaaaatcttatgcaagcatctgggttatgaaacaaggtaaaatagagatggttatttgcattctagaaggattcccttttacaaaaaattcacattagatcttttataaaccgtgcatttaaaatatggcatgtgcctacgattttgtttaaatgcagctttggagcgtttttttgtttttgcttttttctttttttttaagcaaggtatacctgaaaagagtgaatttctatatttggactttctgaatcatgatacagacctgccgaacagctttcaccctcttaattattttttcctctgcatgtttttgagggaaaaagtgtgcttcaactcctttttgggatccaaattttctccattaccagaaacaacccttttcctaatcttcacatcttctccttgcttgaagccacacctgagggtttcttgactccacttggctcttctcagagcttcattccagttccttttgcctgagcacccatgagatgcgctttgagggttgtctaatgttgaaatgctctactgaaatttcagaagttgtgaggtccctccttagattaacaaagctgagagtaaaggcccaacactcccactttcatcttgtgctagttacctagtgtggtgccggtgattcagcagaaaagagcagagaccctctcttcactctcatcctgatgcttgcttctcatcccgatgcttgcttctctccccagtgagaaagtggcgtgtgaaaagtgccctgggagccatgggccagtggcagcttgaagtaggagacccagcgcccctaggagcagggaacctggggcctgaactcatcaaggaaagcaatgccaatgtacgtccatctgtccaggtgtcttgcacggactgaggtgggggtgggctgtgggctgctggctcttgagggcagggaccatgtcttgttcacctcctcgcctccagtgtgccacctggacacagcactctataaatgtttgtttgaatgaatacagacattttggcttgatcgtcccagggcgggggctcagggcctggagtgctgtagcaatagcagcgtcagaggggagcagtggagaagagctgagggtcttgttgtgccccggggtagcgctctgatgagggtggagccttcccttccccaggaacagtcctcgagttggatttgccttctgcagcctatcttcatgcgcaaggacaccaagatgagtttccagtggcggattcgaaacctcccctatcctaaggatgtctatagtgtctctgtggaccagaaggagcgctgcatcattgtcagaacaaccaacaagaagtgagtagcgtggaaggcaccctgtgtgcttgtgtatgagcggggtgtagggtggggtttgatctggcgttaggatcattattcaggccggtcctgcagagaggaagcccttctgcttacaggtattggaagggcttcctctctgcaggaccggcctgaataatgtaatcagctccatcggggaagagaaacttgaatgagtatctagtatagtacctggcatagataggggctcagtaaatatttgttgaatgaatgagatgatgagggaaatcacaggaccattaacttgtggtctcaggtggttctgctgaaaggttattatgaccttggtctcctgactggagccaggccttggtaagggtggcctggtgacatcactgtcagagctggcagggagccatagcttggaaggcacccctgtctgaagtgggagtgacagtcctttaaagcagtacttgacagcagtttaaagcagactgggcagcagtaaacctaatccctccccagactgacagtggggcagatgcttgggccgcttggaagtctcttgcataatgcttcaaaaggggtactcaacttccctttgtggtcccctagaggggaggcaaactgcaggggttgaaaggacagaaggtggccacagtgcatttccattttggaaatgcattgatctcatttaggtttctggagccctgactgatcacaggagaacaatgccctgtgtgaggcctgaagggaatgaccctgaaatgaatcaatcttgacctgggctagagagaatacagtctagggacaactcccacaaaatagatttgggcattgagatgggaggttttataagttacctgtctgcaagctgtgaagccattcaacatgcctcatggggatgcccccacccatctcttgctttacatgcagtaatggggacacagctccttgtgcatctcctcaggtgatgtggtgccagtctccccttccatctccctcaggctcacgaggcccacagggaagcagggtagctcccagactcccccatcgcagccctgggtgctgccatcctcttgtgacccccatatcccattgctttggcagggttaagaggacaggggaaagggtggagatggatgaattaatttcaggattattgctgtacatgcagccagcagcccctgcagtgggccttgtctataaatataaagtcataataataagggtttgtgtttataaagcactttgaagccctcagataagaggcagtttattcccgttattgttctcatcattaacaggagtcactgcctaaagtggaatttagcaatttcagacaacagagaaattgcctgtaggagaacaaactccatgcttcagcaagcattccttggtggaagaggccttgggtccaaactgggaacaaaagtgcttctgatagcacttgaatctgcagcccagcactttgtgaagctggctgctgcctcttttttgtcccccagaggtcactgtcgaatacagatatcagacagaaatgtgattaccagggagtgaggaaagaggctagctagctcaccaaaaaattcatctgccagcatatcctctgggtcccatctcctgcgcacatccagccataggtggcgctgttggccaggagctccatggctggaggcccaggctagctctcaaggcaagcaggggttgttggacatttttgaaatgatgggtgaggccaggtgggatgggagtgatgcccctggaggggcagggctgagggttggattcccatagaggacagaggagtgtttcagggcccactttggaacccacactgagcctctggtccagtgtcccagcctggctcatccctgccctcctcaggtctctctgttgggaggtaacctagaggccgctgaacccttagccagatcgttcccgaacctagtggcatttttaccttctacctggaagaatgtattttatacctttactcccattaattatatagaactcaatgggtattcctttattattattattaatttggaagggagagatttatttctcatcaggggttacagcctgcatagacattcttttttatttttatttttatttatttattttttttttaagagatggagtcttggctgggcgcggtggctcacgcctgtaatcccagcactctgggaagccaaggcaggtggatcatctgaggtcaggagtttgagaccagcctggccaacatggcgaaaccctgtctctctaaaaatacaaaaattagccaggcgtggtggtgcatgcctgtagtcccagctactcgggaggctgaggaaggagaatcgcttgaacccaggaggtagaggttgcagtgagccaagatcatgccattgcactccagcctgggtgacagagtgagactccatctcaaaaaaaaaaaaagagatggagtcttgccctattgcccaggctagagtccacttcttgcaatcatagctcactgtagctttgaactcctgggctcaagggatcctcccgcctcatcctcctgagaagctgggactataggcgcataccacccaatctggccaagtttaaacaattttttatagcgttgagggtctctccattttgcccaagctgctctcaaaatcctgggctcaagtgatcctcctgccttggcctcctgaagtgctgagattacaagcatgagccaccacacccagaccagggtggccattctggcaggtggggaagtgtggcctctggccagaagccaaaaactcaatggctactcccttccacagtgtttagctttttaaggatatagtacatttaaaatctgttttctgatcatcattctgtcaggaggtggacaggatccatacttttattcttgtgttatagatgattatataaatgtatatataaagtcagcatgatgaaccagcttgctgaaagttagtgactgtctctcctgatactcagacatctgcacttcagaaatgcacatcatggcatttctctctgatttgacctcttccttcacctggaggttccataacctgccccagttctaatattctggaatgtggttactaaccaaagccagagtttctttacccatacttgccttgtctctgaagagctgggttggtgactttacttgaaggaattgattgcagtgtatcatgtccttggcctcacatattagtgagggatgaatcagggaaggaaaaaagtgcttttccaggatcccagtgttggaccatctattcctgataacgtttgtgcagaaagagggctcctagcctcagcctggaagttggccgctgtaggtggaatgagccagggtgcaggagtgagaagttgttgggttaaatctggcctctgccactgttagctgtagaatttaggcaaggtttcctcatctatcagagaagactcacagctacttcacagattttggggaatttgatgaaatcatatatgtacaggccagcacaacggctggcctgaagcaggtcctcaacagttctttggaaattggaatctgaggagagcttggctgatttgacatcggtgatagtaacactgtgggaggtgttaataggcttcactagaaaaaaggattctgtggttaaataaatttaagaaactctggattaaacaggcttctctttggtggggccgagagcctttagtatgtgtgtgtgattgtgactgtctagcagggggcgactgtgggtgggggtgccaagtttgcccagagccttgatgtttaagaagatttgcttgctgcttttctaaaggcggactggttggaggcttctctggacccctctggccatgcggtgtgcaggtgtgcatggcaccccctctgaggtatgtgaggcatgacccaagtgattgtccacagcagccctgctcctgccttcagcctccagagtctctctccctctgagggcctggcctctggtgcccttttgggttgaaaggctggattggggaggggatacagtagagagtggtgggaggcaatagatcattactgaaatagtcaaaatggaggagtcgtctgtcaaacagggagaagacaggtacagagttggcctgttctgggccctttgacattgacttcaagttcatctagtgcagctcttttattcgaagaaggaatgtggaaactgaggcccagaaattaagtgacctgtccggggtcacaaggcagggccaggagttctgctacaagcctttacttccacatacatcttttgaagacttttgacattcagaaaggaaggccactgatgtgttggagagagtacccaggggacccgcagagtgttcggaccccaggggagacaacctgttcattgttgaacatccccacctcccacctcaatatctgccccatcattggacaaatgcaaataatctagactatggcgggctattactttgtggtgagaatgtggagacatggaggtgtcaggagatttggggaattctcactttaatacgggcttctctgtttaccagctttgtgagttgggcaagatatctaacttttctgggcctcagtttccttttgtttaaaagtggataatagaagtaaccaacctgagagagttgttttgacaattaaatgtgtttagaacctggcacagaataagctcttaaaatgtcatctttcattgtatggctgaaatagaacattgaagggaggtgggaatgggggagagcggggcatctgcaggaagccagggaactatcctgctgtaagggttcatcttttagcagaaacaaaacaaggtctgatcagcagggatatggccttgttcctttttttgagattgagtctggctctgttgcccaggctggagtgcagtggcacgatcttggctcactgcaacctccgccccctgggttcaagtgactctcctgcctcagcctcccaagtagctaggactacaggtgctgctaccacgcctggctaagttttgtgcttttagtagagacagggtttcaccatgttggccaggctggtcttgaactcctggcctcaagtgatctgcctacctcggcctcccaaaatgctgggattacagaagtgagccactgcatctggaggccttgtttcttcttcatccttttcttttaattttttgtagagacagggtctcgctatgttgcccaggctggtcttgaactcctggcctcaagtgatcctcccacctcagcctcccaaagtgctgggattacaggcatgagtcaccaggcccgccctcttcttcatccttaaatccccagctcacagctcaaggtctgggacacagttgatgcccaataaatgtttgctgcctacctacagctgcctgaggctgaacgttatgacccttccagaagcacagtgggtctctctcttgtccaggtgctggtgagaaagtcaagtacagtacctatcatggaaaaaccctatgtctgggggaatgggtgtgagaagggggtgggcttccccaggaggagaaaaggcagatgctccctactcccttgagcctatcgggagcttctaagaagttggttaacctcgaccaataaactaaatctattacaagagactcaaaaccaagctgagcctccacctgctctgcctccattcctcttgcctggtggtaggagtagttcaaggaaagcaggtgcaagctatgcacctaaagttccctctgatcctgtccttgctgttgtggccaagccctgggattcattttccggtcccactgccccagcctgggggaatggttctgctgggctgcttccctcctggttctgctttttgtgtatatttgcagggaagatgttaacacttcctaacaagtctttgtgttcatctaatctctgctgtttaacctttgactctcccctattatcagtgtctgccacctttgctggccagaccaaaggccccaggaagagccctcagcctgagctggctaggaagaggatgaggcaggcattccatccccggtttgcaggcagatggatcgcctttccctggggcagagctttggaaaataaagcaacttgcaatgccattaggatcccccagcccccactccttttgaactgtcagcctttaagtaaacattcttttcctgccatgggtcccagtaccttggtggggagtggggaacctgggaggagaggggccccgagagcctctgttgaacggagggatttgggcagggaggacgggggcagaagtgctgcattgatgtcaactctctgagtccccagggcataggggcttttgaagtggactcagggtagctgtcaccacaaggaccaggcccctctgaagtactaaaagccccatcctccccaggcctctcacttgagtttgtttgtacctgcctgaggtgtttcccttcacagcccatacaacctctgcagcagaaagtgatgccttgcccaagtgacaggtctagcagcccctggccagagcctaagccacatttccaccaaggaaaatgccaaattggtgtactgttagagatgaggaggccattcattgtgctttggtgtagtaaggatcagaccaaggacaaggaatcttactctaatcttgactcccatccctaccgacaactggccgtgaaacaaggcaagatatttcatctctctgagcccgagttcccttttaggtaaggggggtcaaatttcctgcaaagtctagttatacacattacagactgggtgttgccatctgttctatttttttttttaattaaaaggcatcattaatcgctgaaccggcacctgcagatgataaggaccatgtgtgatatgtaaaaatggaggagtagggacttggggccagccaagtagtccagaggtccagcttccgtgatgagtaacatggttcgtcctctcaaagagatttctcctagtagatatacttttccctctggcctacaaggccaggctaacaaggccttgaaaggccccaaaagaggaagaggtagttgaggccttcagtggacctcccatgtaaatggtaacagtagggccccagctttgggagacagatctgaatgtccttactctgtcctttgttagaacacgtcccatttttctggtgtctccatgaggctttgggggtagaggagtcccaagctgcttgagctatttgtgtgttccaggcttcttctgcctgtctttgggagacccagctctgagatgtgagtcactacaacccctggtctaatcacagaattataactaggttctgctcttctgccactggactggacataaggcttgcattctatgctttccagggccactgagctctgaaatactggtgttctaactggtttcccttctccctctctgcgtgtgtggaaggtgtggaagaactaggtagaagctaggcagcagagggcctgacgcctggctgttgggtcaccttgccgagtgccccaatggcctctcggtgtccccacaggtactacaagaagttctccattcctgatctagatagacaccagctacctctggatgacgccttgctgagctttgcccacgccaactgcaccctgatcatctctgtaagattcacccagacttcttggacactgcatcagggagagtcttcctctttccctgcccacttcccatcccataagagtcctcagttctagccccaagccctagggtatgcttgtgggagaataggcatctctaattcagcatgggggagagcagggagggggctcaggaaggagcctgaccatataattcacagctagaagagggtagagggtgaaagggaagcggtggaaattgctgaacttgggttcttctggtccaaggtctgctcctactcaggcacatgaccttgagcaaatcattcaatcctacaggcctcaattttctcgtgcaaataaggggatcagaaggagaaggggccccaagtgtgtgtggaaggagatgggacagtgactgaattattttcttattcctggctgcatccacagtaccagaagccaaaggaggttgtggtggccgagtctgagctacagaaggaactaaagaaggtgaagacagcccacagcaacgatggggactgcaagacccagtagttggcccctgagccttatacctccaccacagggggtgccgtgagacttcaaggcttggcccttcttgaccacggcagcctcctgtcttctaggagctatcaagggtctctaagaactgggcatggggcactcctagccagtgagtcatggtcatatttcctgagtaaagtcattctgagttacttactgcacagggactgccctcttgttcccctctgtatgctgcctggccccagaccccactggcctccctcgggagggtgtgatgacattcctttctctatcccggagacctacaacataaagctttccacaaaaagggagaatagggtgggagcacatggccctagcagggcagggctggcctttccctgcaacctgtttacacaaactcagaggaagaccaggctggagggaccctgtgctaccgtagcttgcagaagtggctcagaggaaactcctgaagatgtgtgggcaagggaaaagttttaaaaatgcagaaaccggccaggcgcagtggctcacgtcttaatcccagcactttgggaggacgagacgggcggctcacctgaggtcaatagttcaagaccagcctggccaacatggtgaaaccctgtctctactaaaaacacaaaaattagccggccatggtggcgcatgcctgtaattccagctactcgggaggctgaggcaggagaatcgcttcaacctgggaggcggaggttgcagtgagccaagatcatgccactgcactctagcttgggcaacagagcaagactccgtctcaaaacaaaacaaaacaaaaaaacaaaaacaaaaaacaaaacagaaaccttggaagtagaacacaggatgttaaggcattgtgggtaaaaagccagaatcagggtcataattttgccaagggtgtgtgttggggtaggggtcaccacaggcaacaactgagcttccagcagcctgtaccctttccacagtcccctctccaaacccacaggtgaccctccataccccaaagggtaagggataggtcatcaatgggaactcttcctgaaaaaaagaaacctttgttctttgggacacagagccatgaggctggtcttgtcgtttcagcagcacatacaaccctgagcttgggtctgctgttcccttctcctggagcctgctaggactactcagccagtgaggaaccagatctgtgaacaatcaagctttatttttacaaaaatgaaaattgtagcatgtctcaacagccagcctgaggtagggctggctcagaactcactcagaactgctgggttccctttgctctttcttggtttcaaagcaaaaccaggccacagtgccccaggaatgaacccccagccccgagaggttggtcaagggtgaggtctggctggtgccaggaggctattggcagcctcacctttccttccaggaaggggcagaaaggaaccatctgggaaggtgggagcacctcacctcactctgtaggctgtcatggctctaataaggggtataggatgggcctctccaggccagatccttgctctggccaaacagggacgcaaggcccgggttcagccgcactctaaagcagcaggtcctgcctctccaacaggttcctgggagggactgcatctctggtaagctccaaagtcccaggagtcagaagcctctagtgcaaggtgcctgagcactggggtcacaggcccaggagcacagtggggcagtgaggaggagctatcactgcaccctccaggcaagagaagtccctgagtagctggtttccctggcccagaggcaggggtggccctgacggtcatgggttttgaaaatccaggacgtggaggttgtaagacagggcagcatagagatgcttggtggtgagacgcaggcagtacacagggctgctgaggggagtcgacgtcagcgggaaggcctggaagggagggcacaggaagtggtaagagctttccaagtgggacatgggtgtgccctaacccaggatccccaggcccaggggaagagggacgtgtgccattgtaggcttcttccaaccctttctaggcacgtccttggctacctcaccctctcccaaatgcagcccataatcatgagtcctggcatgctggagaagaggtgggcaggacacttacgtgcaggcaggccctttgacgccggtcccacagccgtacaacaccgtagtaggaggaacctgtggccagcaggtggttgccatctgtctgcaggcagtacagggtgctgtcgtggggctcctcccactccatgacacatttcctgtccaggaagaggagaagcagagggaggtttagggtaccctccacctctaccccagctttcttgggcctagagtggctgaggggagcgttaaggagccattccgggatggaagagaaagaagcctaaatcatcagattcatcaaaaaccgaacttcatgggagaaagcatcttctgtagagggctctcgccatggcccagacgacacagcagattatgcctgcacttctgttttcacatggccagctacttgtcactggactcaagaaaggttgaagtaacacaggcctcaagaaaggctgggagagaatattgagtgacagtaccctgacggctccagaggctctgggaaacgcctgcctttgccaaggcctgttggctatagccaagccactgggaccagggctgcccaaatgtaggaagtctagtgaccttgcaggcctcttccttcccagccctgacatggagtctctgtgccctctcccatgggccaacccaggactggaggaaggaccaggattggtgcagggcccccaccacctgtcctccctgcccagcacactcaccggacgctggtgcggaggtcccagtagcgaacataggtgtcatagccacaggacagcagtgtgaaaggggactcatacatgacatccagcaccccagcccctgggggaaagtcactgcccaagtgtgtcatcagctgcccactgggaagggaaggacggagtgagaggctgctccacgtgggtcatacacattcgttccaccttcagaaggcatcagaccttggggaaatgttctctttcctcagctagaatgagactcaaggaagggggctcagggaggagatgcccaattcctacccacctcacccctgccatgaggcctctgcaaccagtcccaggccccacccctcccccagcatcccagccctcagcagcccctccatcacacctgcgtgccggctgccacccacccagccactcctcctcaggacaatgaatgggggggcttgctgaaggggtcggcccccctcacattcacatgcacatgcacacacacacacacacttggttactttatacatcttgatcctgcaggtcatgcagttctgagctgcctgagtccaatgccttaattcctgcctgtaatctggggctcaaacctcattggggataaagaccacacaaagggagaaggggagtcccaggagatgttaaaacaagtaaacacctttgtgtctggggagaaaaatcgctgagaaagcagcttagcgagctgtccctggtgttcctggtctagctggcccccagcccggggctagcacgcctccgtgatcacagcccccagcctgtggggctccagcctgctccccccaccctcaccccacccgggggccgagagcagattactgagaacaatttctttgtgactgtgtaattccctccgtgaccgcggcagtgggcagaccctttgccctgatgccagacccctagcaactatgtaggggggcctcctgtccctagcaactacccctcaacatcaagtgcacccgctaatccctgcagccaggggatgggtgcaagtatggagtttccacagaatgactgggggaaatgaaggaaaaggggcgccctccaggcctgatgccttagcttcctttacccgtgagacgctgggctttccccatgccatgacaggagaaacaaggccgtggacacttcacagggatgtccaggtaagaggccctggcatggagtgaggggacttcatggctcaccagcccttttggcccaagtagcatgtcagcaaagggcttgaggcagacaaggcagccagccacatgtctgaatgcagatgtcagctctcgtccttccacctcactgagaccctgacccacaacctcccttctccccaacagagctgccatcttcccgaaggccgaaggaatcaaaggaggagactgggggttcctttctgccccttccacctttcccctttgagccctgggcagtgggccctggccaggagcactgctgctgccaggggggaattaatccccaaggcagcacccctgctaccagcctcctcagggaagttctggtcttcctctcagtagcccagagctgggcctgcggggagaagatggcaagcctctgtctgttggggggctcctgagagggatcaggcagaaggccttctccccagatcagcatcccttagagactgctaaccttggctcccagagaagccctgccttcccagatgggccaccagccaagattcagccaccctgggcaggccagagccctgtaggggagtcattctctctctttcacaggtatactgggtgcatgctgggtaggggctgtttggctccacagttctcctccctcttccagatttgggggccctgccccctccattagtgaggccttaaggaatgattgaggagctctcccctttaatctatagaagtaatttcatgtttgtttgaaatagaagatgaaaggcagtgggggttgggaggactgaagcccagcatggctctacctgcccaccctggtccctgggttcagagggaaggagagctgggcactcatggggctgcacagggacagcagtataaaaggcccacccagactgggctgccaagctgggcccctaccccagcattcatgccaccactggaaaatgtcatggccgtaagtatctgcagtcagaaatacaggacagcccaaggggtccctgccctcggggggagagccaagggcccagtgagcaccaggccctggaggccagcacaagtcctgagagcccctgctctgcccgcacagcctggcaggggctgagaagtttctttctgctgtgctgttctctggttctctaaaatggccacacacactttaaatgggccaatgaaaagatacaatttcttttgcccctgggcccaggaccctcaaggctctgttgtgtggtgcccgtgaggttaagttcagagcataaactgacacgccaggctctgggaaaaggcccatctcttctaatagcaacccagcagtgccacaggagccctgctggggctttgatttgggaaaacaaacagaaatggcaccgtgggcccttctcggcccccaccccaagacctatttaactagaaaactctagctcaactgctctggtagagggagagattggcccgacaatagccccaaactttgggggaaaaggggacaaaacaagctgtctgtctcctcatcccctcctcctgggctcttttcttactgcaagtgtgttcttataaaaacgattagattgcaatttgtataacgtggtgaccccccaaattcagacatttcaccccttttctctggaaagaatgttaagaatgcttctcggcctctcactgtggggggcgagaggggggtgcagagccttggctgttgcacagcttgtgtgggaacagggctgctgctcagagccccaggccaagacgggagcaagggccagcctgtcactatagagggccagacaaaaagtccattcccttccaactcccgtggacaaagcccaggcctccaggatccactaagggctgggggcctccacaccctagcctccgccgagtcaagtccagcaattctctctccacccagggaaacataaagacagatggggccatctgtgtgagcctgatgaatgagacacaggctgaggaggggcaacctgggggagacctgtttccttggctctgaccgtgtgcaggctgctcctgggaaccccactacctggacaagaagaagcaagcagagtgcggccacacccctgagaggtcagggccccctggcccaaaccatcctgctgcccaggtgactctactgcagctggagggagagaacttcctgccagtcagagaggagggacatttacatgaaatgctgacacccatcaccatctttgtgggggcagctaactgatggtaggggctggccctaaaaacctggatagcccgccagggacaggccctgagtgctaagctggactgggcacagggggcagtccctggcaccctacccctgcccaccaagtctgcagagctaggaagcctggtgccctgctgcacttctcccagcctccccaacagccgcctgtactagagcactcctgagtcaccacctcctccacctcccaacccacagctcagcatgtccgtggctcccacaccatttttcagtcatttttaacatactgaattcctgatgctgttctctggagaccctatgctccagagacctatgctctggagacccagatgctcattcctgcatctgtttgagtctgtgcctacctgtgcacctgtctgccatgtgctaccttgaaatgcaacaatggcttttggagagagagagaggagggaagggtgacaaaagagttgaccaccttccatctctgctgcctaggggacagatggcttgaaggtataagctgggcccaacatggctgcaaagagaatgggaggtttttcctcccttctatctccttccttcagtcgagcatcttctgtatacaaagcattgtgcttaatggaaactacagggagatgtaagctgtgacttgatcaagaagactttgtccctgccttcaaggagtattcaatccagggagagaaagaagtctgcaacatatatccaactaacaaatcaaaatgtgagttggtaggtaccacagagaacaacggaaagttctacaagggggcagctaagaaaagcaagcatttctggctgggggtgttgactgattcttcactgacagacagggctgtcataggcaatgacaagatagggagatggcccaggtggcaggagcagcaacaacaaaggtgcagcactagggcaaccaggctgttttggcggcagctggcaatctggtttggttggaggcttgggagtgtgctggcagggtctggcctccaggccacagtgggccttagggtgcacatccctcacctggcacaaactccgtgagtggcagacagccatgaggcttttgaacaaacagtgattgtcctagtccaggccccgattgtagataaggaaaccaagagtcacagacaaaaagtgacaatgtcgtatagcaaggaaaggcagagcctgaatccatgataaaggcagagctcctggaaatcccgtctggtagcagctttcaggatgacgggaacagagggaagtaagctgaagggcctgttgttctctttgtgtctgctggagccagatgagacggctgcttaggttacctggtggcagagtagccaccgcagcaacagctcacatatcctgagtccatactgtgtaccaggcaacgtgctgagtgttttactcgtatcagcccatttaatcctcacaacaggctttggaggtaagtttcttaaccccattttacagatgagaaaatgaaggcgcaggggtcacgcacctagtaaatcttagatctatatgcttcagggtggtggcactccccaccttcacagacaatgcagccactccatcactggcccctcaacatcctcaggacttgccccaagagttacccagggtcacctccagccctttccagctctttgcaggcttttccacctcacagatgcccagaggcttgccctctggtggaggtagtgagagaatcaaggggacagataggttctaaacattaacaatggaggagctatggaagcttcacttgcctcagccccatcaggtgagaaggaagggccttctcaagcatacagcctctcacatgcatgtgtctgtgtgcacacacccccagcacccacccacgcacatgtgttcagacacaatggctcaaaggccaggcagcccactttgtactgctaacaagggggccataattacaggaaggggcagccgcgtagataaaaggatacaaaatttcaacatctgttgccataaagggataaggagaagtgaaacgcaaagtatcagtttggtgtcagcaggcagagagccaatttcaaagagttcagggggacagaggagacaagaaagaaaaagttaaggggggagaaagaaagaaagaaattacagggttccttaaagaggtaaagaaaaaagagaatgaaaaaaagctatcagtaatgctttcaaaggagaagggaggtactttaaagaggggcagttcccgtaatcaccctgactgtgggccaggcccctgcacaaggtgggggcagagggccagggcagacaaagccacacctgggcaggatgggcactaacagtgctctcagagtggcccagcctgtgtgcaggacacggcttccttctccagacagaaggggctccagccaaatgtcccttaccatttattccaaatgtcattagatgccctgatactcactcatatcctgtgctcagttcaggataccaaggtcagttcccagctcagagggagagttctaccaggccacagccatggctgaccaggtggcccttatcagtgttccaacactgtgttcagtggaaagggccaccaactccagccacaggggtcaggatcaaggagagcttcgtggtggaggtgctgtttatattgaagagcgagcagggtttcattaggcacagagggggtattctgggcatggggttggcttgagcacaggctcagaggagaaaaatctagggcatctgttaggatgggtgagaagcctattctgcccctgcctttgttgagaaaaggggaacttgggagctttgaggtggaagtggaggtgtaacatgggaccagggatgaccctggcccaaaggggaaggggaatcaatgggatgtgtgcagggcttgccacacacacagggcagcacaggacctggccaaggactcaataccctaggagcagccaggtcaccaaccacctccccacccctttccccaccccacaatcccagtggggcttagggctgtgactgtggctggacctactatgacaccttcaggtctgggattaaagggctctccatcctgaagcccacctgcccacaggctatcaggggcccagctgtgccctgtgctcagggcaccagtgctaggtccatctcaaatgccccttggcagaaaaaaaaaacccacagcaagaggaagcccatggaggaagggggtatttgtgatgtcaggccagtcagacccacttgggccttccagctgccaggagctgggccccagacagtcaacacaaggcaccttccctggggcctagccaaggaagggtcctgctcaaacatagagaacacaagatgagccttgattcctccaaactccaggctcgggcaggatggctttggcatagttcctcagggcctgatgggatcacagggcctagctagggatacttcagtggttggtcaatcaagatgaagataccggaattcctggcacttgggagttagggaatgggcttgaagaccacctaccatcagaagcagaaatattctggcactttgaggttgggtgaaggactctttctcgtttagatagtaatcctctgtccttgggcctaaccccatggtacccagttccagaagacagaaaggcagaaaaagtccaggcgcagtggctcacacctgtaatcccagcactttgggaggccgaggcaggtggatcacgaggtcaggagatcgagaccatcctggctaagacggtgtaaaccctgtctctactaaaaatacaaaaaattagccaggcgcggtggcaggcacctgtagtcccagctactcgggaggctgaggcaggaggatggcgtgaacccgggaggcggagtttgcagtgagccgagatagcaccactgtactccaccctgggtaatagagcaagactctgtctcaaaaaaaaaaaaaaagaagaggaagggggaaggggacagccaagctccttgccatttaggcaacggctgtgtgcctgtggctgccttctgacctgtgtgctccagctagcaactgcccctccatccctgttccagcccagcctgcaaggagaacagtctctagtggtcttgatggaatgaggggctgagggaacaatggtgaccctgaaaggggtccaggttctgtgagaagcagcattggctgtctgagggtgagtagctgagagacacacatagacgtgggtgatggctcccctgatgggagcgctggtgcccagtgggtggctacagctttgaatgtgtcccagcccccaccatcatccagggtatagcaatgcttagggcaaactgcccctccagtactccccgctctctgcccaagccccagcacatacataaaagagaaaatccaggcgctcctcaagttgcagcagtgacaggttaaaagcaaagaatccatccagcaccgctcaccgcccaaccccaagtcctgccggcaatgctgctccacctctcggattggcctgtcagtcaggctttggtgttactgaaagatcaaactttgtcctgcctgttcattaccttaatcctattttctacatggctttattatctacttgggcttctctgggaaagacagctctagagagtcatcctgtccatccatttcctcccaccaaaagcaaatgcctccaccagggcatctttcctcaatcgctgtaccacttggtcctccaagcttctctggggacaggacagatgtttaaacaaagcctggttcctcccagtggatgaacctggggctggagagaaggcactgccaagtggtgcccagggcaaccctgccacaagcagcagagcccacaggctggccagagcgggcagggctgtttcttctcaggctccaggaagaactgaggccatagttgtttgttttgttctgtttttaatttttttttgataagaaacaaggtctcaccatattgcccaggctactctcaaactcctgagctcaagcgatcctactgcctcagtctctcaaagtgctcggattccaggcatgagccaccatgcctggctaatcactgtctcatacctattctcattagagtccattctggtttcaataaagacccagtgtttggggttaatgagatctaggggtttcataagagaataacagtcaaataaatggtgccttagaactccatcctgaccataaatctgtaccgaagagtacccttcaccaaggcaaccataggcagaagaggccattcaaagattacccaacatttgagatgatgctgggtcacagtggtgtacccagcccgccacccggcttgtgtgtcatcctgggcccaggcaggtgatgatgccaaacacaaggcccagctatgtaaccaagtaaaaactttcatcagaatgcccatctttgtgacccacagcccattgtcaagagccttccctgtgccaggagttcagcaggttcacctccgcctccactagtcactaagacacggatattttaagaattaaaagcctccacaagccaggcacaatggcttacacctataatcccacaactttgggaggccaaggtgggaggatcacttgagccaacgagttcgagaccagcctgggcaacatagcgagaccttgtctctacaaaaaaatttaaaagttagccaagcatggtggggcatgtctatagtcctaactacttgggaggctgaggcagaaggaccatttgagcccaggagttcaaggctgcggtgagccgtgatgatgccactgcactccagcctgggtgacagagcaagtccctgtctctcaagaaaaaaagaagcttccacaaactccgaggtactagtttgggtgggaaggaagagcaggaaagagacagcttgcattagttgaatgcctccaaggtgacaggcactgtatgggaaactctttcacgataattttgttcataccagttctgttaggtagggataattaatttccactttacaaatgaggaaactgaagctcagagggccccagatcacagcaagaggcacagataagttatggctaacttatctactatgttaatgagaaacaactgaaggacctagaacttttggcctgaagaagaggaggccctggaagagcagaaccaaggttttcagatatttaaaagtctgttcttcaggagagaggttcaacttgcttgtctcttgtctaggatcacagcttcagggagcaaatcaatccatgataaagggtgggcattctcactcacagagctaccaaaagacggaatggttgtttggggaagtagggagtttcccatccctgttcttggatgactatcaaaagagaatgttgaaggaaaaaaaccatgattcattgattaaaacatctcatgttgttttaaaaattttgaaaagactgactatagaatggatttttcaaaaaaaaaaaaaaaagctatggctaatgctttcctacagagatggagaaaaatggagaagacaaagctacagcaactgaggaagcaggtgagaagagcatcttcgccagtgctgtcaaatgtggcatttaagacacagaccacatgtggggcctagggcaaggtgaagagttcttagacttgacaccaaaggcacagtcaataaaagaaaaagtcaataatttagattccatcaaaattttaaacatttgctcttcaaaagaccctgttaagaggataaaaagacaagcagccgggtgcggtggctcacgcctgtaatcccagcactttgggaggccgaggcaggctgatcacgaggtcaggagatcgagaccatcctggctaacacagtgaaatcctgtctctactaaaagatacaaaaaattagccaggtgtggtggcaggtacctgtagtcccagctacttgggagtctgaggcaggagaatggcgtgaactcaggaggcagagcttgcagtgagctgagatcacgccactgcactccagcctgggcgacatagtgagacttcatctcaaaaaaaaaaaaaaaaaaaaaaagacaagctacagattgggggtagatatttgcaaatcacatatttgacaaaggactaatatctagaatacagaaagaactgtcaaaactcaatggtaaaaaaaagcaaactgcttgcctcggcagcacatataccaaaatggaaatgatacagagaagactggcatggctcttatgcaagaatgacatgcaaatacatgaagtgttccattaaaagaaaacaatccagcaggcaaaagacatgaacagacgtttcgccaaagagaatattcatatatgaaatatatggcaaataaacacatgacaatatattaacataattagctattagggaaattcaaattaaaacatgatgaaatataacacctttagaatagtttaaaaatagtgaatccaggcatcatggctcatgcctgtaatcctagcactttgggaggcctaggcagacagatcgcttgagcccaggactagcctgggcacgatggcaaacccatctccaaaaaacacacaaaaaattagctgggcatggtggcacacacctgtagtcccagctactagggaggctgagatgggaggattgcttgaggccagaagttcaagaccagccttggcaatataatgagaacctgtatctctaaaaaacataaataaatatagattttaaaaaagaaaaaaaaatagtgaaataccaaatgctggtgaggatgtgaagaaattggatctctcatacattggtggtgggaatgtaaaatgataaagatactccaaaaaatagcttggcaggtaaaaaaactaagcatacacttaccaaacaacacagcatttgtactccttggcatttatcccagagaaatgaaaatgtatgcccacacaaaaacctgtacgtgttgtaatagctttagttgcaatagtcaaaaaattgaaaacagcccaaacatccttcaatggggaaaagaaactttggtatatccataccatggaatactactcagcaataaagaggaatgcactattgatacatgcagcaacatctgtgggtctcaagggaattatgctgggtttttaaaaagccagtttcaaaaagtgacatattgtatgattccatttatgtaacatttgcaaaatgacaaaattatagagatggagaacacataagaagttgccaggaatcagggacaatgggaagaggaggaggggagaaggatgggtgtgactaccaaggggtaaatgaggaatttttgtgctgatggaacaaacagttctgtacctcaattgtggtgatggttatctgaatctacacgtgatacaattgcaaaggactagacacacatagacacagacagacacacacacacacacacacacacacacagagtgcaatctgaataaaggtccatggatggtaccagggtctatttcctggtttgattattacatattatgtaagatgttacacaaacacctttccatcttatttttgtaacttcctgtgaatctataattatttcaaaattagaaagttaaaaaaaaaaaaaaaaccagaatggcagataatcagatgggaatatgtcaagcctgccaaggcagagaattgtgaataaaacctgcatgtattttcactgttctgtataattctttttataggtccgtaggccaccttcaaaatttctttattttagcaaaatcatctctggggatagatgggattttatatagccacataggcattcctcagagaaagagtatcataaatccaaattgttgttgttatcataaattctacatgaaactatttacctattataaattacttcagcagtctcctccagctaaccctgaatgattccatgtgagaaggcaccacagcagaggcctcctactagaccacttcccagccttctcctggaccactcagccaactgaggcagaggctggctcagcaagctttccctcacctcctggactggaagccagcatgggctcatgaatctcttacctgttgaggtcccagattctcaggggtgagaagtgcccgcaacaagccgtccctgtcacaaaagagctgccaaacaaaaggagaacaaagtcagatctggcttgtcagaacctgtggtggaaatggctaacaatgggaaatgccgtgctcattccctaggggattgtgggttaagccagaatgagagaagtggccaagggagccatcagaggagctgtgggaagacatcttggagcactgtgaggggtgtagcccccagtggtgcctggccagaagacccacgagctcagccacagctgggcctgctgcacagactaggttgagtggtctctgcacaccataaaaacagatctctagacgtgacaagtttgagcccaggagagagcgagcctgtcgggctcctgtttaggaatcccaagagcacaatggcagggcacagaaaagggctccagggaacaggttgctggggctggaaggtgctgcccgtggtcagaagtaggagcagctgaggggcattcctgaaggttttaagagctgggggaatctggtaatgtggtataagcacagggcaggtataaaggcaccaaaatgagaaaaggaaaaaatatgaaagatgagtgaatcccttggatgggtatatgctactacataggtggggcggagtccccagaagccaggcagccagggcttctggagagtgggatgggagtccgccagagtcctctgaggccaataacaaacaacgccgagaggcacacgagaaggagcaggctgaccctgttgcccagagtgtccctttagagccctaaaaacctcaacatatacaatctgcagagtctcactttaaatggaggcacaagcctggtataaaggatccacgcagtgggccaggctggctgtagtgctggcctagaacttgaacctatgagccagacaactcttgttagaggatttggtagggtggagaggggaagccttcaggaaacctgggcttgaaacttaaacagcaagcaagcaagttgaaagcagtggtgttaggaatgggccatgtccctgcatgtctttcatgggggggaaggaagactggacatactaataacacattagcaatgtgggggcaacagcccatctgctgtggcccagcccagcacctgtggctcctctgatcccaagcatgtcagtgaggagatggatttccacagagagggccctggagaagccagtggctttggctggggtggggaggttggcctgccagttgctgatgggggagatgttagggcaggcactggccaaaccactgatttacaataaaaattgcagggcaggtgtctgctcttcagccctaggctgataaaaaggccatacgagctatcctggggctttcatgactcaagccaagacttcctccagggacatgccccatcatcctagcttcttcaaggctgccagcagccactaaactatagagtgggagtgccaaaacagtcactgtgccatgccccaagtgactgccagcctgggaagcagccagtggatactgaagaaccaaactacaaagtcaggaggtgttgccctctcctccctccccaaacatttttctatttagggtaatccattaataactggtaaagccaattaccttgggctggaaacataatagccacttggaaatcattcgagcaggcaattggactctccagatttgaggagtgggggccaggtgaagggcgccagcacagacacaggcatctcttttttttttgagaggaatctccctctgtcaccaggctggagtgcagtggtgcaatcttggctcactgcaacctccacctcctgggttcaagcagttcccctgcctcagcctcccgagttgctgggactacgggcatgcaccaccacacccagctaatttttgtatatttagtagagacagggtttcaccatgctcgccagtctggtctcgatttcttgacctcgtgatccgcccaccttggcctccgaaagtgctggaattacaggcgtgagccaacgcgcccggccaggcatctcttaaggcctatggcaggcctctgactggccacaggcctaaattagcatcaaggtaaatcaatagagaggggagcaactttaatcctgctggagatcagagctgtgggagtggcagggatgagggtggtgtggggatgtaaatccccttcccagggactcctatcctcctctattctggcccacccacatctggccctgatcatctgccaccaggaggagtgcccctcaccttcataccctgtacagggccttttttttttttttttttttaaatagagacaggggtctcactatgttgcccaggctggtcttgagctcctgggctcaagttgatccacctgcctcagcctcccaaagtgctaggattacaggtgtgaaccactggcgctcagcctcctgtgaagtgctttcttaactgcctagatgtgacatctataaatgtttctttccaaaagctgcccttttctctcacctaaccactatgaatcaaggagaaaaaagagggagagaaagcagagtgtcttcctggcacttaggaggacttaagagtttaatcaaatttaacactcagtaaaaaaccatcaatagtcaagcagattttgagcaaacactcaccaggactcacacccaaaccatggggcctgcccaggactcttgggggtcaggctgggtgcagacacagttttgcacaccttcaactactccccactacctgcagccattcttgccccccaccccactcccttattcccatggtcattaggaagaatgagcaaaagctacagaccagccacactcaaagtcagaagattagaaagggcgtgcgcacatgcaatctcagggtacaacagatacaaggagcagaggaagaaaaggaattc

SEQ ID NO: 70 - DNA, 180574 bp, Homo sapiens
gaattcagctaatggattctgcttccccaaagagtactctctcttaataataattttaaaagcaaaaacatgtttttcctcctctttttcataatatgtagccacctgaccaagagtagtgttgggagagagactgtccctaccacccaggagacagcaggagggagaggtcatctagtgatcacactcctgcttctcctctccaagggcaaagggctgcctcagcagctgtcacatcctgctgccctttgaaacagaaaaccagtctagagtttcacacttatctcctgctttgcattaccaaattggcagtcttgctagaccctagtaattgcctttcatagatgaaggaagtgaacgctctagggaatggtgaatggggagggcatttgtgtttgggaaggggcagtacctggttcagctgtctgccatccatcagatggttctgcagatgaaacaagcacagaggaggaagagaacacacaaggtcacttggtctatctcaggcaggcaggcagaatcatatctttgtgcacagtgaaccatagagtcttgtgaggagattgctagtcatacaaaggcacatcatgaaggacttcaaagattcccattgtggactcacaaatcacagttactcaactcaccttctagtcagactagcccctgttttcccacatttcccatacaatgtcctgcttttgccatcttactgctcattagcagttccagcagagggcaggcgggggaaaggagaggagttgtatattatagccaaatatgtcttctgaacgtgttaaggcaaattttctggattacttagagcaacagatgtctttctgtccaattttttttttttttttactgtctatctgtctgtataggtatttctagttttcagggtctcctctttcaaggaatttacaatctggcttgggaaagcaaaatgaagacacatgaaataatgagaaagccatgccataaagccatccctgttattccaagcaaagtcatgggtttgaagagaagaaagagaggtcttcatgcactgaagttggtgatagcatttgtacattaaaaatataaattgaagtcaacaattagtgcagagaagtgagactcagcaaatgggcagatgtaattgttgaaaattctgtaaacaggcttgggtaacagtcccatagagaggacttgtaggcatccagtgagaatgtggtttttgtaggacaaaggtctcactggatctcagtaccaagcctttgccatgatcagctggaatgaaggcgctgggacactgaagcttggttggcattccgggaggaaaaatattcagtatctttccatatcattcattaaggtctgtgtgacaatgtcatgagcaattcactactgggaggtcttcatcagataaacagggctgcaaaattcatggccaaggaatgtggactggagagacactcccagccacagctgctacctgaacacccagagctggctgggaaccaaggagacatgctgaaaccaggagcctcagcgacgagtggcaacgttacagacgcttaatcctgaaatgaaaagtaattgcttctggcttaaagaataaaggaaaaacaagatcagccttggctggattacatttttttaaaatacaaccacgctaaagaccgggttctgctacttgcttggtgtttgaaaatgtgaggaaatggatgttttctgtcaatgtaatttaaatctatccaggagtattgacatataagaacacttgaatgcaagtacattttgatgaatataattaaatcaaatgtgtttacttttagctgtaaaggaggacatctaaaatttaacttacctaatataaatttagaaggtctttcttgaaaatagctcttgctttgtattttgaagcatttcctactgaaaagtcttggccaaagttaccagagctccttttccatacagatgaaactgcaaatggagaaatatggaagcagagagaggggaaaggcattttaatacctctaatatatttctgtgatgaaatagtcttctctagagagaagagaattcatgaaaattcactaaggaagagctgcaagtttgttattgttagaataatagaaagatgactttaactcacaactgagtaagtaatatttgtgttcttacttgtttacccctcaagacctacagaatggcaaatgtcaggagatgttctgtacatagagtcggtattttccttgaaagcaagagagcaatgacacagagtaaaaacaaagtaagaataagaggaaaacaaatctttcctttccagttccaatttttaagttatatgtattaatttaagatatttgtagcagactcacaatgatgtacagcaaattaattgaattatatcttgtatcctagaactgaagctgctttgtttcctgtttggttgagtcatatgaaattgtctacacaaatagcaatttcatataatttaacctaatatcataaaccttcacaggaattcatcaaccaataataaccagtaagaaataaaacctagctggttttcctgccatcattcagcacgaacactaatactataaaactaatataacacgtactatcttcttgcaggccttaacattgaggacattctgcataaaggaacaaaggctatttacagacaatgttcacagtttgtgtttctgcttcattaattcaaaacagaaaaaaataattcttataccagaaatgttttggataccaccaggatgacttaacctaacagaacagcacaatgactgacaattgtgtctgcttcttgtgagctcagactgatgaacaactggaaggccagccacaggcccaataacctgatgcacagtgatcacaaacataaggatttatttaaataaaaggtgtcatacagctcatgaggtaaagaaacagccacaaatagcactaagaatgcaaaaaatggctgtgagttgtactctctattggtatataacacacagctggtgacccaaaaagccatggtatttccaaaggcgagggactacggtacttagcaacactttgcagatttaaaaagaaaagacagcagtcctttttacagcagtgttctgtcattctctgccaagaaagagtactaactgttaaattggccccaactatctttttcacattgaacatgattcagatgttaacatggtttccattatcattacagaaaatttttagataatctttctgatcttgcaaaatacaataatgtccaaaggaaatagaaatttaaagtataatgtgaacatatattttaactgagatacacatgattgcaaacatttaaatgattaggaagtacatatttatggtatgttgaatgcaattttaactcaaatacaatacttgcagatttaaggcaatctgttctctacataaaaaataagattataaaatgtaacacaattatactaatgcaatttctcatgttatatattattaaatcatcaatgacacattttctttaaacaccagatgaccttgagagaagcaaagttctttcttccccctgagatttcaagtagagtcatcccttactacttgcattttgctttctggtgatggaactagaattactgacaattcaaatataattaccagcatctctctgggtgaactaaccccctagtgtcttaaaacttgccttccagaaggaaatatatctcttcaaattatacttcattaatagtgaagcttaacgagcctttaaaatacagtcttaaagtggtttcattctccccatctccttgccagtatttcccttcctctctaagcatccttctcttctccttctccagggtgaattttgaagagattctgagggatagccaacaggactatagcggtgacttccctcaaggattgcttcatccaacccagcaggtagggcctgtaaaggacttcacatacgacatttggaaaatacagtaatcagagtaaacctaggaagttttccagaatggctctaatatcaacctttatttcatttcttttaaagacaattgattatttaaagcaaaaataataaaacttatcgtggagctgttaacttatgtagaagtatgacaatagtgcaaagaacatattggaaaacagaaaatttgcttttgtaggttttttatactacacatgtagtgatgtgaaatcatagtagattctgctaagctaaggatgcacatttcagtccctagatagcccaaaataaaacaacaacatatagttttcaagccaatagaggaaataaaatgaaatattaaaacattttcgagccctgtgtggtggctcatgcctataatcccagcactttgagaggctgaggtgggcagatcacttgaggtcaggagtttgagactagcctggacaacgtggtgaaaccctgtctctaccaaaaaaaatacaaaaattagccggaggtagtggcgtatgcctgtagtcccagttacttgggaagctgaggtaggagaaccgcttgaacccaggaggtggaggttgcagtgaacagagatcacgccactgccttccagcctgggcgacaaagtgagaccctgtctcaaaaaaataaaaataataaaaaaaattctcaacaaattcaaaagaaggaagaaaaggagaaacaaaggaacagcaacaacaggagacaaaacaaaacaaatagatgggagaaaataaatagcaaaatagtagctgtaacctcaacatcgaacaaaacactccaattaacaggcagagattatcaaactgaataaaaaaacaagaactaatgctatagagtttataaaagagatgctttatgtataaagcataagtataaacaagttagaagtaaaagggataaaaaagaatatatatatttttaatttcattgatctacttgtctgtctttttactataccacaataactttattaatgtatcttgaatttaacaagatccctaggtaattcatatatacattaaatttaagaaataataagtagatagcccttttgaggtatttagcaatgataaaaagaaacttcttgaggccgggtgcggtggctgacgcctgtaatcccagcactttgggaggccaaggtgggtggctcacaaggtcaggagttcgagaccagcctggccaatatgttgaaactccatctctactaaaaatacaaaaaaattagctgggtgtggtggcacatgcctgtaatcccacctacttgggaggctgaggcaggagaattgcttgaagccaggaggcggaggttgcagtgagccaagatcgcaccactgcactccagcaacagtgagactccatctcaaaaaaaaaaaaagaaacttcttgaattgttaccatttagagaggaatatcaagtattgattaagccacttacctaaggttacagaagtggaccagatcccagatttcctgattcccagactattgcaatgtctaccaaaaactcagctttataattaagttttactcattcaataataggcaaggaaaaaagtaatttctatttacccacatatttaccacttctagcactagtcatttttttatgttgatctgagtttctacctggtatcatttcttttagcctgaagaacttcctttaatatttcttacagtttatgtgtaccattgatacatttggtttttgcttggcagtgtttttcttcttccccttcccctttctttctctctcttttcttttcttttctttcctttccttccttccttccctccttcctctttcttttcttttctttctttctttctttctttctttctttcttttctttctttctttctcttttttccttccttccttcatcttttcttccttcctttcttccttccttcctttcttttttccttccttccttctttccttccttccttttttcctgtctctctcccttcttcccttcccattttctcttcttttcttactttcatttttttaaaggatctttatctttcactaggtttctcattccaggttgacaggttttatttcttttagcaccttaaaggtgttattcaattctcttttggcttatttgataaatcagcattattgttcccctgggtcttgcgcagaatgagtcttttcctcatactgctattaaaacttttttctttgatccttggctttcataaacttggttataatgtacccaggagtggttttctttgttttttatcctgcatggagtttattgagattcttagtttatgggttaatatttttcaccaaattgggaattttttcagctatcacttcttcaaatatattttctgccccaatttctctttcatctttttctggaactccagtttcacagatgttaggccacctcatactattccacaagtcagagaggctctgttcatttttttcagtgcttttttctctatgtgcttcagctgagatcgtttatattgccctgtcttcaatgtcactatttttttttcttctatggaatctattttgctgttaagctcatttagggatttttttttcattttaggtgttacatttttcagttctagaatttctagctggttttcttttatactttccatttttctagtgagaatttctatttactggagtccatattttctttaaaattttaaacatatttataagagttgttttaaagcctttgcttgctaattttaacatatctgctatctctgagtatgtttctattgacttaaaaaaatctgttgtggtcatgcctcttcacatatctagtaatttttgaattgtatgctagacattaaacgctacattatcaggtctggatttaaagagtgttaagttttgttacgttaatttactagtggagaagcttaatttttacaaagctgtttttaaactttatttggatgaacttagtatagccttgagtccagggctagagtagccctcctcctaccgcctggcctttcttggttcttcactgaaaaccccagggaatcactgagaacatctccactcagaacatctacatctccagttttgtgcaccttctggaatctccacccagtttacagccccccagtagctatttgccaccagactttgtagagtctcacccagaaagtgagaagcttagcatttgtccaaagactttatagtacccatatgcagatttctggacctgtttctctgtgcagctttctcttcattagcctgacctacaaattccaaccacctcaaccaccctgaactgtgatctctgcctcctcagaacagtaaagcaaccattatcaacttgggctccattttgctgtgccgccaggaaaaaagacaaggtgaccaagggtttcatctcatgtgtttcccttttcccagggatcaaagttcaacactgggtgaatttcaacgtctgaaaacagttgctccatatattttgtccagttttacagctatttatggcaagagggctggtactagtaacttcatcaaagccagaagcagaagtccttcacactggatacttttgctcatcatctcctgtttgaaattctccctggtttttagaactctaatcttgattttcctcctaaatttcttattattctttcactaccttctcctcctctttatcctttaaccatgcttcccatgcctaaattatattcattctttaaaatccaaactttctccataaagcttatccagtctgctacgctggaatttatgccaggtataagtatatatgaacatacttaacactttattggcactgcttcagacagcactttgcactttctgccttttgaacgatcatgtcacttccatattgtaaactctttgaagacacggacaatgtctaatttatcattgtttcttcctcagagcttaacacagtattcctctattcacctttaattctgatatggtgctactggtggttgcccaacaacgagaggaaacgacatttgctgactacaccccacgcactctgctagatgctttgcacatgttatcttgcttaattcttgagaatgatactgaaaagtaaacacaaccaaatgacaacaaagccagtggctctgactgagatcacacatgctcaactgctggaatttcagttctttgaatctcttcctttctcctgggaaaatgtgacacttttgaggacctccttgctgtcccttgcttgtcactgccatcattgcccccttctcagatccctctggcttcagcctggtaagaggctgcttcccatcttagtacctccctaagaagtttttcttgtggcatcaccaccactgctgcttccacctatccccaccgccaccaccactgccattgtttctgcagtgctgcagccactggtacagggctgctccaggccaggcagtttctcactgaagcctggcctgcattaaagagtcctcttttgctgcttctcttctgggttctccagagatagccctgcctctcctgcctcctaccacctctgtctgcagagccatggggaagccctggaggagtcacactaccagaacactcggggcctctgcctgcctttgtctcctggagtcagatctgcttctccttcagccagattttctcactatccatagctaccagtcagtggattgatgtccccctggtggtggatctcattgaacacggactcagtaaattgttaagtgtttgctaagaactttttatgtgtatggaatcctattaattgtcaagaaataagttaaaaaaaaaccccaacaaccaaattaataatttaaaaacaaacattttgtttgataagagttccttgctttaaaaaagttgaaatatattagactatatagatgttctttatctttttgtttgttcatttgtttgaaatggagtttcactcttgttgcccaagctggagtgcaatggtgtggtctcagctcactgcaacctccgcctcctgggttcaagcgatgctcctgcctcagcttcctgagttgctgagattacaggtatgcgccaccaggctaattttttgtatttttagtagaaacgggttttcaccatgttagccaggctggtctcgaactcctgacctcaggtgatccacccacctcgggcctcccaaagtgctgagaatacaggcataagccactgcacccggctgatgttctttaaagttcatctatctatctatctatctatctatctatctatctatctatctatctatccatctatctatccatccatctatctatctactaagcccatgaaggtaccaggttctgttcccagtacttggaatacaagatagacaagatgcctgctatcatggagcttccaataaacacacaaactaacatcacctactgataagtacaatattggacagtggtaagtgatgagaagaaaataaagcaggaagatgggataggaaatagtggcaggaaaacatgagatagggagatgagggaagatctctaaggtgacctctgggctaagtggcaggtgatgatgggggaaaaggtcagtctagggagggagaacttcagtattgctgcaatgtaacgatccaggaggtgaatcacaggggatgcggtcagacagacagactagcccagatcaggtagggcttacaagtccacagtaaagagtttggattttattataaatacagggaaaggattggaaggtttcaaacagactggcatgctgtgatgatattgctcaaagatcgctttggctgcagcgtaggctgcattgtagggaagcaagagcataagacctcaagactccaagacccattaggagctgtcataacctaagtaagagatgatggctctataactccacgaaataaatgtgtgttttattagatcatgccctctgttgatagcccactgtacaggatactggatctactgtataacaaaactagatggcagggtcattggcctcaaagacctttctgtaattcaatggaaatgacaggtaaaattaaagagaacaaagggtgataacttattgagtcaataaaaagttggcagagatgagcaggctctcaacaatagtctttggctgtgataaaatctcctgggtcactctcctgggtcacactcctgggtcaccatagtgctatagaagaaccaagaaaaccatcattcagattttgaatcacagtagcataaccaagcaaactgcaagcaaaatatgaatatgattgtcacatatttgctgagcacttagaatgtctggaactttctaagtgctcatgctctaaatgagtcatttagtccccagaacaacactgagacagtgattatcatcctcctcttctagatgaaaaaatcacagcttaggacatggtgacttgcccactgttacatacgctaaaaagcatgagaacccatcctcaaactctgactagtctgctcccaaacccaagcttataaggatgatggcaatgtttcccagggttgcctgataataagaactatctgtggcacttgttaaaaatacaaatacctatcctcattccctaccccatgccagacccactgaatcagaatttccagggaggggtctggtaagctatttcttttaacaatggccctcaatgattctttttttttttttttttttttttttttttttttttttttttgagacggagtttcactcttgttgcccaggctggagtgcaatggcgtgatctcggctcactgcaacctccgtttcctggattaaagcgattctcctccctcagcctcccgagtagctgagattataggcacacaccaccatgcccggctgattttttttatttttagtagagacagagttgcaccatgttggtcaggctggtctcctgacctcaggtgatctacctgccttggcctcccaaagccaaatattatgataaccgtattatctttttcttaatatcataattattcttattatatgtcttacaccagagtaggccacacctaacaaaaaagaaacacagataaatggagaatataatacagaggaacaatcaaggcaggtgatagcagacacttctaggaagaagtaagttttgagctgaattttggaaggcctgctaagagggaaaaagtatttcattaaagaaaggcatgaaaaagacacgaataagagaatcaggtgcatacagtactgataggaattgatgtcccgaggagagaaggtgatttgattcagtgcacaccccactgctcagttcttacataggttcaagcaggtttagagcacttgtggtttactgaacctgtctatattcttggcctgatcttgagcaagattgtgctagaaggggaatccttgaaataatactctattatcattatctgagattaaagggtcagaaagaatcctgatttgagaaatttttgttttttaaaactaaacttatttacctgacttcctacaatagacaaatgatctcaaaagagaaacttacttggaatattataatcatagaaaattttctttaattgatttatagacttttttaatacattttaaactggatgccatagaagccatgtcctaaattcttctatagcattacctttaacagcctgcaacttaaccaacagatgttcattgaacgctgactttacaccagacactgtgagcagctcaggggagacaaagatgtataaaatgtggctattaatcatgaggattcagaatccagtgggagaagacaaacaaccagatatgtaattccgtgacaagttctagaaggaaggttgtaaaaatgaatggctgaggtgcactaaagagagagcccctcagtctgcccgggcctgacagggcaacatgaatggtcttgcctgctgggttttgaagtattcaccagatttcaccaggaaaaggatgcagaaagtcttcccaccatggagagagaaggaagaatgacaaagaggtcagtgtgaaagagtgagcattaagtcccatgggttatcacagaatcatactctgcagtcacaattttttcattctgcagcagtttttttaaaaaaataaatgaccattagcatttaaaatagggcagtattagtatacaaatctttatttctgacttaatggaaacaaagatttcacacttggcccacatcctctcacagcaacactcacctggtcccaagtaatagctgcccccttcagacagggctcctgatccccagtccaccctagacccacaacttaaactcttttattcccagccctctatgcgggcatttgagtttgtgacctaggtagagcttaggctatgaggcagtaggagaacaccttgaacaaggatgtgatgtcagtgtagcttgaagcaaaagtgtggatggccttgcttgctaagcttattcagactttaccatgtgggtgatgaggaagggaatgactactgataaagtgaagcaaggtagagaaatggtgacaactgatttttaggaaggtgcctcggatagatggcttggaggcatttagactgaagacagaaacataggaggccaccacaaaggttcaggtaagaggcgatgaagagcagtagtcagagagtgaccacggggatagaaaggagttccagaggcacaaaagaagagggggtagaggcataaattcttttctaaattgtttaacatgaaacatctagaaaattggaaagaacagtaaaataaatatctctacaatctcttcaatgtagatgcaacaattgttactattttgccatatttgctttatctttccatacacacacaaatatatatatatgtgtgtgtgtgtatatattttgaaagttgttgaaatcattacacctcacacctaaacattaacacctaaatatacatcttctataggacagacgcagtggctcatgcctgtaatcgcagcaccttggaaggctgataagcagattgcttcagcccaggagcttgagaccagtctaggcaacatggtgaaaccctgtctctacagaaaatacaaaaattagccaggtgtgctgacatgcagctgtaatcccagctacttgggaggctgaggtagaaggactgcttgagcccaggaggttgaggctggagtgagccatgtttgtgccactgtactccagcctaggtgaaaaagtgagaccctgcatcacaataaataaataaataaataaataaacaaacaaacagcatctcctaaaaataagaattttcttatacataattgcaatgtcattatcatttctaataaaattaatattagctccttaatatcatataatacccatgttatttaatatatgctcatattcaggttttccctaaatgtttctaaaagttttagctgtttttatcaagctaagagtcctttgaagttctcgtattgggttgttatggccttttagtctcttttaacctgggacagctcccccagtccttctccccacataaaaatgacttttggaggaataaaaagaaaatagttgttttgtagaatatctcaaattcagattcttctgcaggattctttgtaatttgatttttctttgattccctgtaactcctatttatttgaggttaggcctgcctaaaagcttacttcgattcagattaagcccttttggcaagaatacttaataaatgatttcatgaatttcatctgtaccccatcaggaggaacataatacaaatttgtcccgtattagtgattctaaggtcaatcacttggttaaagtggtgactgccagatcttctcctttgtactttttacatttaggaagtgacatgttctgtgatgctttgtaaccgtgtgaataaccggttctgcaataatcttttactattaaagatccttgcctgaatcgattatttcattgggagttgcaaattagtaaatttcaaatattatcactccttcattggcattcttctctaaagataaattttccctcatcaagtagatgatataaaattccttttaaaaaggcaaggtaagataggccaagatggccaaataggaacagctctggtctgcagcttccagtgtgattgacgctgaagacgggtgatttccgcatttccaactgcagtacctggttcatctcattgggactgggttggacagtgggtacagcccatggagggcaagctgaagcagggcggggtgttgcctcacctgagaagtgcaaggggctgggagatttccatttcctagccaagggaagccctgatagactgtacctggaaaaacaggacacttctgcccaaatactgggcttttcccaaggtcttagcaaccggcagacaacgtgattctctcctgtgcctggctccgcaggtcccacacccatggatccttgctcactgctagggcagcagtctgagatcaatctgtgaggcggcagcctggctgatggaggggtgtccaccattgctgaggcttgagtaggtaaacaaagcggccaagaagctcgaactgggtggagcccactgcagctcaacaaggcctactgcctctagactccacctctgccggcacggcatagctgaacaaaaggcagcagacaacttctgcagacttaaacatccctgtctgacagctctgaagagagcagtggtgctcccagccaggcgtttgagctctgagaacagacagactgactcctcaagtgggtccctgacccccgtgtagcctaactgggagacatctcctagtaggggctgacagatacctcatataggcaggtgcccctctgggatgaagctttcagaggaaggatcaggcaacaatatttgctgttctgcaatatttgctgttctgcagcctatgctggtgatacccaggcaaagagggtctggagtggaactccagcaaactccaacagacctgcagctgagggacctgactcttagaagggaaactaacaaacagaaaggaatagcatcaacatcaacaaaaaggtcatctacatgaaaaccccatctgtaggtcaccaacatcaaacaccaaaggtagataaaaccacaaagatggggaaaaaccagaacagaaaattctaaaaatcagagtacctattctcctccaaaggactgcagctccttgccagcagtggaacaaagctggacagagaatgactttgatgagttgacagaagtaggcttcagaaggccagtaataacaaacttctctgagctaaaggaggatgttcaaacccatcacaaggaagctaaaaaccttgaaaaaagattagacaaatggctaactagaataaacaatgtagagaagaccttaaatgacctgatggagctgaaaaccatggcacgagaactttgtgacatatgcacaaccttcaacagccaattcaatcaagtggaagaaagggtatcagtggttgcaaatcaaattaatgaaatcaattgagacgacaaggttagagaaaaaagagtaaaaagaaacaaatagagcctccaagaaatatgtgactatgtgaaaagaccaaatctacatttgattggtgtacctgcaagtgatggggagaatggaaccaagttggaaaacactcttcaggatattaaccaggagaacttccccaacctagcaaggcaggccaacattcaaattcaggaaatagagaaaacaccacaaagatactcctcgagaagtatctttctcgacaactccaagacacataattgtcagatttaccaaggttgaaatgaaggaaaaagtgttaagggcagccgaagagaaaggtcaagttacccacaaagggaagcccatcagactaacagcagatcactcagcagaaaccccacaagccagaagaaagtgggggccaatattcaacattcttaaagaaaagaattttcaacccagaatttcacatccagtcaaactaagcttcataagtgaaggagaaataaaatcctttacagacaagcaaatgctgagagaatttgtcacaaccaggcttgccttacaagagctcctgaaggaagcactaaacatggaaagaaagaaccggaaccagctgctgcaaaaacatgccaatttgtaaagaccattgatgctatgaagaaattgcatcaattaatgggcaaaataaccagcaaacatcataatgacaggatcaaattcacacataaccatattaaccttaaatgtaaatggactaaatgccccaattaaaagacacagactggcaaactggataaagagtcaagacccatcagggtgctgtattcaggagacccatctcacctgcaaagatgcacatagactcgaaataaagggatggaggaagatctaccaagcaaatggaaagcaaaaaaaagcaggggttgcaatcctagtcactgataaaacagactttaaaccaacaaagatcaaaagagacaaagaaggccattacataatggtaaagggatcaattccacaagaagagctaactatcctaaatatatatgcactcaatgcaggaggacccagattcataaagcaagtccttagagacctaaaaagagatttagattcccacacaacaataatgggagaccttaacaccccactgtcaatattagacagatcaaagagacagaaggttaacaaggatatccaggacctgaactcagctctgcaacaagcagatccaatagacatctacagaactctccaccccaaatcaacagaatatacattcttctcagcaccatatcgcatttactccaaaattgagcacatagttggaagtaaagtgctcctcagcaaatatgaaagaccagaaatcacaacaaactgtctctcggaccacactgcaatcaaattagacctcaggattaagaaactcactcaaaactgcacaactacctggaaactgaacaacttgcttctgaatgactactgggtaaataatgaaatgaaggcagaaataaagatgttctttgaaaccaatgagaacaaagacacaatgtaccagagtctctgggacacatttaaagcagtgtgtagagggaaatttatagcactaaacgtccactagagaaagcaagaaagatctaaaatcgacatcataacatcacaattaaaagaactagagaagcaagagcaaacacattcaaaagctagcaaaggcaagaaataactaagatcagagtagaactgaaagggatagagacacaaaaaacccttcaaaaaatcaatgaatccaggagctggttttttgaaaagatcaacaaaattgatagaccactagcaagactaataaagaagaaacgagagaagaatcaatagatgcaataaaaaatgataaaggggatatcaccactgatcccacagaaatacaaactaccatcagaaaatactataaacacctctatgcaaataaactagaaaatctagaagaaatggataaattcctggacacatacactctcccaagactaaaccaggaagaagttgaatctctgaatagaccaataacaggttctgaaattgaggcaataatcaatagcctaccaaccaaaaaaagtccaggaccagatggattcacagccgaattctaccagaggtacaaagaggagctagcaccattccttctgaaactattccaatcaatagaaaaagagggaatcctccctaactcattttacgaggccagcatcatcctgataccaaagcctggcagagacacaacaaaaaaagagaattttagaccaatatctctgatgaacatcgatgcgaaaatcctcaataaaatactggcaaaccgaatccagcagtacatcaaaaagcttatccatcacgatcaagtcagcttcatccctgggatgcaaggctggttcaacatacgcaaatcaataaacataatccatcacataaacagaaccaaagacaaaaaccacatgattatctcaatagatgcagaaaaggcctttgacaaaattcaacagcccttcatgctaaaaactctcaataaactaggcattgatggaatgtatctcaaaataataagagctatctatgacaaacccataaccaatatcatactgaatgggcaaaaactggaagcattccctttgaaaactggcacaagacagggatgccctctctcaccactcctattcaacatagtgttggaagttctggccagggcaatcagtcaagagaaagaaataaagggtattcaattaggaaaagaggaagtcaaattgttcctgtttgcagaggacatgattgtatatttagaaaaccccatcgtctcagccccaaatctccttaagctgataagcaacttcagcaaagtctcaggatacaaaatcaatgtgcaaaaatcacaagcattcctatacaccattagcagacaaacagagagccaaatcatgagtgaactcccattcacaactgctacaaagagaataaaatacctaggaatccaacttacaagggatgtgaaggacctcttcaaggagaactacaaaccactgctcaatgaaataaaagaggacaccaacaaatggaagagtattccatgatcatggataggaagaatcaatattgtgaaaatggccatacagcctaaggtaatttacagattcaatgccatccccatcgagctaccaatgactttcttcacagaattggaaaaatctaatttaaagttcatatggaaccaacaaagagcctgcactgccaagacaatcctaagcagaaagaacaaagctggaggcatcacgctacctgacttcaaactatactacaaggctacagtaaccaaaacagcatgatactggtaccaaaacagatatatagaccaatggaacagaacagaggcctcagaaataacaccacacgtctacaaccatctgatatttgacaaacctgacaaaaagaagaaatggggaaaggattccctatttaataaatggtgctggggaaactggctagccatatgtagaaaactgaaactggatcccttccttataccttatacaaaaattaactcaagatggattaaagacttaaatgttagacctaaaaccataaaaaccctagaagaaaacctaggcaataccattcaggacacaggcatgggcaaagacttcatgactaaaacaccaaaagcaatggcaacaaaagccaaaattgacaaatgggatctaattaaactaaagagcttctgcacgacaaaagaaactaccgtcagagtgaacaggcaacctacagagtgggagaaaaagtttgcaatctagtcatctgacaaagggctaatatccagaatctgtgatgaactcaaacaaatttacaagaaaaaaaacaaacaaccctatcaaaaagtgggcaaaggatatgaacagacacttctcaaaagaagacatttatgcagccaacagacacatgaaaaaatgctcatcatcactggtcatcagaaaaatgcaaatcaaaaccacaataagataccatctcatgccagttagaatggcaatcattaaaaagtcaggaaacaacagatgctggagaggatgtggagaaataggaatgcttttacagtgttggtgggagtgtaaagtagtccaaccattgtggaagacagtgtggcgattcctcaaggatctagaattagaattaccatttgacccagcaatcccattgctgggtatatacccaaaggattataaagcatgctactataaagacacatgcacacgtatgtttatcgtggcactattcacaatagcaaagacttggaaccaactcaaatgtccatcagtaatagactggattaagaatatgtggcacatatacaccatggattaagaaaatgtggcacacatacaccatggaatactatgcagccataaaaaaggatgggttcatgtcctttgcagggacacggatgagactggaaaccatcattctgagcaaactatcacaaggacagaaaaccagacactgcatgttctcactcataggtgggaattgaacaatgagatcacttggacacagggtggggaacatcacacaccggggcctgtcaggggcttgggagctgggggatagcattaggagaaatacctaatgtaaatgatgaattgatgggtgcagcaaaccaacatggcacatgtatacctatgtatcaaacctgcacattgtgcacatgtaccctagaacttaaagcattaaaaaaaaaaaaaaaggcaaggtaaatgtttagttctttcccttttactatcaatgtcagagtaaggatttattgaatgatcacttccaatgatggcaaattagtttttttttccttttctttcacttttttgggtattactatggactaatgaatttttatgtattcaatgttttgcaatcaatatagccatattcaaactgtccaaactttggctagtgggagccctttcacactagcccctgtgtccttgtatcatgcctccataaatcgctgagcacttccttggtatatcaaaatgtcctaaacttaccttgtagtttccatgctcaacacctagaatcagctatttctcctgtaaacaggaacattgtttactgtgtttcaataaacaaagatgagtagaaaccaagatctgggttctaggtattgctcattgctagaggaatatcattgcttctatgttctttcagtgtacagagctagaatacacacacacacacacatatatgtttttaattcatgagtccatattgatattgccaattcaaatttaatatagtttaaaattacaagtgttggctgggcatggtggctcacacctgtaatcccagcactttggggggccaaggcgggcagataacttgaggtcaggacttcaagcccagcctggccaacatggtgaaaccttgtctcttaaaaaaaaaaaattacgagtgtttttattagacattttaaaagaagcatgaacagactttgaataatgagttaaatgtaagaggcaaggacaaagaaagaatgaagaatgagtccctaagttcccagtttgagaacctgaacttgggttcatggtgttgctgctgccattttacccaaggtaaggagtaagaaaaagagaaaaattcatagggcaggggtaggggatgagaagtcagttttacatagttcagtgctttgttttatttgttggtttgttataaaattaaataatctatttgagaactgacacaggtgagcaataagaaaaggaatttacagaggtataaaatgtaagttatatccaaagtaccagtcaagactcatctcaaagactgagcactcttcgaatactgttaaaatttgtggaatctttgtactccagtatgtggatgaatttagaaacctgagtatgacttcttagggtgtagaaatctagctcaagcaaaggaggaaagaaaaacaaatttaaaattaaggttagaaacttctgaaaaaaaaagagaaacttaaaaaaaaaacctggatttaaaacatagtggatgagtttgctagggctgccattacaaaataccacaggctgggtagtttaaacaacagaaatgtgttttctcacagttctagagaacagacggctaagatcaagttgatgtcgacaggatggttttcttctgagatctttcttcttgacttgtggatgtctaccttagtgctgtgtcctcatatggtcacccttttgtttctgtgttgtttgtgtcctaatccactttttttctaagcgcaacagtcatagtgaattagggaccacctgtatggcctcattctaccttaacgacctccttaaatgccctatacccaaacagtcacattctgaggtactgggggttagaatttcaacatatgaatttgctagggagactacagttcagcccataacacatgggatagaaaaaagctatgtgatagaacagatacatacttgagaaactcaggaagtcttctctatggctgggtctcatttctagctggacaaagtttggtggtatcattactccacaatagctttagcaagttggagatgatggttaatggtgagccacatgtttatccacatttctatggtcaacaataaatacacacagagaaaattgaagatagaagaatatatccaccctgtttccaccaagattttctaggctttggatttgagtcattacgcttagtttgctttctgcccagggtgggtggcatttaatcattgcattttccctcttttttctggacaagtagccctatgccaatggcctcatctgataccagccttagttgtcataaatgatatgggaatggtgggtttcatctaccttagtacaggaaaaactaaagaagaggaaatcaagttttgttcaggatgctagaagtttggcacttttacagatgagaaaagcacagggctggggctagtgaagtgattggttcagggacttgcttggctagttaggcacacagctagggctccatctcctgactcttatcccagtgttctttctgcttctacacaactaagtagttctgtgtttagttttttctggttaaaaaatgttcctggaagcattgcttacaaataacttgaaatgccaaggaacgttatagtacagtggttaagagtgcagactggccaaacaagcctgtgtttgcatctcagctttatcattctactactatatagccttgagcaggttgtctaatttcttaaaacttcatattcctcaacagtgaaatcgggataacagagcacctaccacagaacagccctgaggacttaaataagtgaaagcattctgaaaaattaatagtgttaggtacatagtaagtgttcaataaataggaggtgttattattcatcataacactctaaaatttatcagaattcaaatttccattcttgtttcttaggtaaaatgaagcaaaaataaagtaacaacagacaaacctctttaacttgacatctttccaattcacaaccaagaggatgtttactgcaacgtgctaggatcaagcagttgagcgcaaggacaaaaaacaagcctaataattgagtcaaagggtttcacacctctaattatttaacatcacagctgaaggagaaaacaaaaatttccaaggcagtagaataaaaggaagttctgaaacaaaggaaagagcatgggaaaaaagaaaggatgctaccagatctgcaagctcaccaaaatattggtgcaagccaggagtagaaaaagccactttctagctttttcctcaagatagtccctaaagcaaaggaagtcctttccccttccaaagcagaagctaaagcaaaggttttgaaggccaagtagacagtgctgaaaggcatcacagcatcacaaataaatatctacacatcacccaccttctagagtcccaagacactaaggctcccaaaggcagcccaagcccccaggagaaacaaagacagaatagcgccctcggagaaacgagcttgtgccattacatcctgatgagacccttcatcagtgactcccataaaatgctggctactcactgggccctcatgtttgagctggctgctacattaattttttaaaatcagtgatttctttcaacagctgggttccagggccctgttggacagcctatcgttcaaaattaatgagatgttattcataaagtatctaattgtgcacatgagaagctctagcctccgttgaagaaatatagcatttttagaacagatgtgtggcacaagtgatacttaaaaactattaattttgaaagccacctaatgcccaccagtaatggactggctaaataaactctgatttagctatatatatgcaccctggaatcagactacctgagctcccatttcactacaacttattagttgtggctgcttgtattcatttccattgctgccttaacaaatcaccacaattttatgggcattaaacaacacagacattattttacagttcagcaggtcagaagtctggtatgaactaaaatcagtgggtgggcagggttgcactccttcctgtacagtctaagagaaaatccctttccctgctcgttcaggtgttggcagaattcagttccatgtggttgtaagaccgagatctctctttccttgctgactattagctgagggctgcccttagctcctagaggcctcttgcttgtccctgcacataaatgtcgacctctcaaaaacagcgacagggtggtgaatccttctcaggctgctatctctctcaccctgcttctaccatcacatctctccctaacccagctggaaaaggctctacctttaaggactcaagtgattagattgggtgcacctagatagtccagcatgatctctccatttttaggttcttactattaatcacatctgcaaagtcccttttgccatgtaagataaactcacaggttccagggatttggacatagacatcttgggggaccattattctatctgccactcctctctaagcctcaggctcctcatctctaaaatggggcttcttttgacatataattgttgtgacttttagatgagacaaagttcttagcacatagcaattactcagaaaatgttagctatcatcatcattgctatgtagccattagaaagaatgagatagaactgtgttactgacatagaaggatattcaaaagttataactgcaaagtaagctatggaagagtgcatatagtataaccatttttctataaaacaagaagaaacgaggaaagacggatctttttttttttttttttttttttgagacggagtcttgctctgtcgcccaggctggagtgcagtggcatgatcttggctcactgcaagctccacctcccgggttcatgccattctcctgcctcagcctccccagtagctgcgactacaggcgcccgccaccaggccggcgtaatttttttttgtatttttagtagatacggggtttcaccgtgttagccaggatggtctcgatatcctgacctcgtgatccgcccgccgtggcgtgagccaccgtgcctggccaaggatcattgcattggcttagggaaaaaacggatgaatatcaacagattaagactgagaagataaatacagacttggagttttaaaaatgatgcgtaaattttattttcatatttaaagtggcagccccactaaaaagacaaatagaatgtttattttccaaaccagtgtggaaacaaaaaggaattttaaaatgattacttacacggacaaaaaagaagaagaaaagcatgaaaaatttcaataaataaaaaattctaagaaaaatgctaaaaacaatcttaaacttatcaataatcacaataaacataaaagatcacatctgcttatcaaaatacagagattctgaagttggagaaaataacaaaatccatatgtgtaaagatattacttgggtaaaattttaaaacacaaacattaattaatatattgatcacagaaagatacatatttagtaaaattataggaacagagaaaggaaataaatgcatcaatttcaggcttgtggttgcctctaggaataaaaggaggtaaacggcatgggggaagactacaaaaaggatatcaactatatttgtaatgtttcattcttttttttcccctttatttatttatttatttatttattggacttatttattataagttctttagtggtgattttggaagttttggtgcacccatcacccaagcagtacccaatgtgtagtcttatatccttcactcccctcccacacttccccctgaatccccaaagtccactgtatcattcttatgcctttgcatcctcatagcttagctcctaatctttttcataaaaataaaatatctgaaacatggtacaagatatttaccttttttaattctgctgtgttacatcctgtacttttctgtgcatataaaatattttgaatatttgttcaaagaactgtacttagaagtcagaaatagagatgctgacctaatggcacgtatattttgggttctagaaaaagttctaaacttttaaaggtagacatggaactagggcagacagggaaatgtatttctactacttgtccattggttaaggttgtcatctattgaacagttgcactaggttaaggatgatactgtttgaaaatgcccaaaatatgtacatgaaatgtttaagaagacttaagtagacacttatatgcaaagttaatacagttcagatatgtcaaaaaacaaagcagcaattggaatagtgactaaatgtctcagagaagtttaattttgagccagaatatgaagaagttcatggatttctaagacggaacaattcagataggaaaatggactgtgccgaggcacaaagaagggacctcattactgaacgcaggggacaataggagttcagtgtgattggaacagatttccttctgaaattctgaagagctgtaaaagcagatacaggaattttatgggcataaacacaggaatatgtcaatatgcaattaaatagaagaggtagattaaccacactaatcaacttcttccttatacattcgctggctccacagtaaaaatgtaaagcataaagaaggtatttatgaactgctttgaaagaaaaatgggaaatgctgatggagagctgtgagtcagcctcagctccttccctgctgaaagtgttaagttacctctccagggccaggtacagttatttaatagatcgacacagacaaatatcctcccccagaaaggatcctctattttgaaaatatcccacttcatgtcatcacagtactttaatgtccggctattcatcattctgccttcaagttagtttgagtgcaagactcaacctatgttctattttgggtgatgcagacagccacaaccactgattggaaacttgagtccgtccagatctcgtggcttacagcccaaggcacctgtgacctgcctggttcatcaccgggtcccactgctttggcctcattattgccctccacaccctgattcttaccagtgttgtttcagatctgggctcatcccattttgccccaacactgtggcagcttctagatgctgtctccaccatacagccgccagtgtgaactcatgctgtctttaatggccaatctgaaagatccctgctatgctgaaaaccttcgtaagagagccttaccacggattgcctcactgatgtgtttctgtgagttgtgaggtgggtcacaggccatttgctactaataataaaaccccaaagactccatagactcactcctgtatctagatgccttcccccgtcgctgagtcaccagctgtgctgcctggcaaattccttctcctccagcaggtctcggctcagatgctctctctgtgaatccataatccgcagtgcccactcctaccccatccggctcacgtccttctcctacaggcttgctgtgctttgtatagacttccatttaagaattgtcttgtttcattgcaattgtttatacaaacgtctcccatttctttgtaagctccttaaggacagaggccaagtcttagctcttcttacatctccagtaaatagcagtttgtggcacattttaggcacacagcagatgttaatggatgaattagtaaattagtactaccgctcacgtggagtagactccccagttaatcagagcaacaattttttcccattcctactataagtggcagcaaagaaaaacctttcttcctaattatttcatataacactgtatcatgaaatatctgcattttgagagcaaagcctgaaggaagttattttttccctcataaaattaaagactttaattattggcaataagatgatactacattcattggaagaaagagtggtctagcgattctttctatgttcctgtaactaattatgggtgagtaatttttaaaaaattggtacccataaaaattgaccacaaaccaataagaacaatgagttgaatcataaaaattccatgctatttatatttctccacacacactcagtacatttatttattctaaatggaaaagtacaaatattgggataaaaacatttaaactacagaaataagaaattccaaatgctaattctgcctaaggggcagaatttaattctgtgctaagctactgtatgtgggattaagaggcatagttaaccaaacatttgagaacaagtaattaccactgcatctctctatcacatatttgccttacacataatttatacaagtccacagaggaaaaataaaatgctgtttgcaacattttttttccagccacacatttttcaggcttactttttttttcctcatcaaagactattcatttttatggtcttatattggataacagtgggatattttctctctgttatatagggacagagaaacaacatctctaatcagttattcttggctgtgtccttcctgccaaatcttgggcatctaaatgtggaggtgcacagtccctgaagttggtttatgtaatactttcagagtggtatggacatgcaaacaacaccgtcatttattcattcagcaaacattatgagacactttctatgtgcccagaattgtgctgggctctcaggatacccatgaataagagagggtccctatccttgatgagactgtaatctagcagtagagacaattaaaccaacaattacaaaataaaacactaacagctgttgggggtgggatgcacgaggagttgcagggataccaacacctgtctgagatggtcagaggccatttaagttgcttcttgaatggcctgtagggctcacgcagttgaaggagggtaggaaagtggaaaattcaaagctgagggaatacctggaagagatcagagtatgaaacggaaagtggaagtagatgaggcaaggggacgcctactgatgcagcagagcagatatttacaaacagaagtaagtctgagtctctaggtgactgttttctgtgctcacaaccaagtaacagctcctgcagccctcctccccttctctacctggggcacctacaatacagagaacagttgagagctcaagtatatttgagacagacattaaagtctctatgcattagcatcttggctggactaattctggtatttgcttattttagcattttgtatgaaacatggagaaatggtgccatcaaaccataacttgtctgcaactccagcccagctctggctacaatgtggtattcagcaagagcctggcctggagcaagggatttaaccttcttgtacttcagagcctcatctttaaaatagattgcagcaagaattaagtgagtgagtgtgtgaaagagcacagaacagagcctggcataaagcaaatgcccaaaaagtatcagctataataattttactcctcatgtgggaagtgtgggtgaaactagttgcctagttatttaaataacaagcatgtcatttataggaactgggttcaggagtaaagctgctattgttggttgtctttggcattaacattaaggatattaggaaagttaactctatgaacacaaaggctgaactttggcagcctttcaaaagagttagcaatcgaattttttgcctatatccattcattgaacattcattatcctcacacttattgagtatctactgatgtcaggcatgaggatgcaaagatacctgagaaggccaaccatctattattcattcgacacacatttaccaagtactttttttttccccagcaagtcactgctgggaaaaaaaaacgatgcatcagacccttcagtagcttacaggttaatgggggagataagtggtgtgtacacaatggagacacaaggaggaagatgatacatactacaaagaggtagggacaataataatgaacacttctttacacaggctccatgctaagtgccttacttggattatcccagggtgctgtgggagttgagaggatggagagatgctctcagctggggtgatctggaaaaacttcatggaagtggaggcgtttgaataggaccttaaaaaaaacactacttctggagcattttgcttaaccctggttgtacaacagaataggcccaatggctttctctaaagatgtttggtataagcctatcttaaaggaaatactgtatctgataaaatgggattgtttctactgaagactcatctggctacaaaacagaactactatcaacctgagaaagaatccagctgttgctttaaaattaacaacttcccattacatcatcaagcctgataatcatcttgcctgcaactccaattccatctcaccctttaatactccttctttcccctaggtcactgggaagcttgcttgtggcactctctgggatcctgtttccagttactggttgcgtaatgtattgataaagcaaagccaaatatgagtaagaagaaaagcctaattagaaatgaagcacgcagtgtcccaacaagaaaaatgccagggcttcaaaaataggaaatcagtgatgcatagtttcttctgtcactgaagaaatcatcccagtacttaataagccagaaaatggattaagcagatggggggaagttgtcagcggcaaagaatgggcacctacggagaaacagaattatttagaatcaaaatgactgactggcacacattaaagaatatctgtttgtgtcttgaaatgaatgctatagaaaatatagtaggtatgaaatatagaaaatatagtaggtatgaaaacaaatgcaaaatcggccaccaagagagaacatcacaggctatgggctgatgtagaaatgctggagatgctgacttttttttctttatcgaattgactatttgagtgaagcaaccaaaataataacttggagtagagtgtggatgcagcttaattctaataaacttgcccttaaatataaagaaaacctttctttcataagaatccactcgtacagcatatgtatctacatattcttctctccctacacatatctgaacatgtttctagctagctgactgttgacacttaactcagttgataggacatgtcctctggctcataggagaaacagcaaaggttcagtacatttaagtctttgaagattatgggaacaaaaactcagttttaagtgtcagggaattgctgtatgatttttaccacatcacttaacttctaagttttctaattattgtattgtacaactgaaagaatgatattcacacacacacacacacacactccatacccttgaacactgagagacaatagactgatcaggaggctcttacatctgcaagaaacaaaactggagactagcaggacacatagcttctgagtgatggcgtaacaagttgctatttataccccatcttccattcaccaatgtgaactaggggtctatccctgcaagagagtaattttagagaatgagcttccgggtgagctcacaggttaacactgcttgtatcaccatcttgagtcagcagtggataatgctgtgcagaataaactaattttagtcctctgcggtatccttgtaaacacttcatagtgattctttaaaaagtcagtgggaacttgctatctctgcttcatttcctactcccaataatttgctagggttatttttaggtaactgtgtcttacaggatttgtttaggtgagctcctctgtttcagaatggccatgtgaaaattctgccacagattttgaagtcagaaggctgtctggttaaatggatccagaaaaattactaacagatatggtgacaaaggacatggaaatgtaagtgtcctgtatgtgctacaggaaaaagtgctgcccatctttccctcatttcagcaacactttcagtgagccccagctcatggaaagagagacgaggagagaaaaaggcttattcctgaagctaatagctttccttctctctctaatactatatgtttgcagtgacaatgatccctcagcttctgaatcatctcctcattctgtgatgtacccctgggttctgagtttcatttctttggcagtcagtcacatgctgaatatagagcacctctaatttgttcagtgtctcatggatcactgagaaagaatagggccttatgacaaactccactggtcagagcgcccggatctaggtgtgtgatcacagcctttaacacttgaccaggaactcatatttcatggagtgagaattgtgagaccttgcactagggttttgtgattctgagaaagatgctgggtttggctgtatttatcaaggaatgtggataccaagagaaggggctgagttgggaagaagggggtaaagagaattctaggcaaattaaacctctcagcaacgagtatcccataggccagaaagagtgtgaagggattcagtcatatgtgaaagaagttctgtggtttttgtcttgtctttcttgaaaacctctggccctggaatgtttgatatcgattttccctggtctaaaaagagaattagagaatttcaaatgaagtgtatgtgacacaaagtgagaagagaaggagggagggagaaaagagaggcagaatcggaaatgttaataggaaaaaggaagaaaatggtgtgtcctgtaattacttatataagaaaggcagctaataagtgttccagggtagaacttctatttcttgaattcattaaaagtaattttgagactcctggattggtggcagtggaggcaagactttgctaaggagaactttgtttaaatgtctctttccaaagcaaatacacatcataccaagatatacaacctatgtgtagcttcactgtgctgctggaaactctgcctcactaggtgattcttctttactgaggatcctgctgtcctcatctaccccttgaaaagcgagtttgatggactctgggtgagtaaagcaagtctttcagaggagaggagaggcagcaccattggctgtctgccagcgaaaggcttgtgcagcggtctggtctctgtgaaccatgcaggcagtgttgctgcaggatcctaagaaaccaaccttttcaggaacgttgtgtaaaggaatgtctggaatgtgtttagccttgagagtttgcaagaagcctttatggttcatgatgaagaatgggaaaagcagtactataatgttaggcaagactggttcagaccagagagagatggaggaagaaatcattaaaatgaaggataggattgtctctttgcaactattagatgcagtttcagaatttccttctggattctgtgcatcacacagactgtctactctcatcccaggctaatgagagggtaggtactatataagtaggttataaactttaaaataaaaaagcaactccctgcaatttttttttcatattggtctttagcttagagtagatgaatgaatgaacactgtgaaaatatcagcataattgcatcttttactttatattattaacaaatgctattcatggaatcagaagttctattttgaattacattttaaaggttttaaatatatttgaagtttttaaaaattctatttatgggtagatgtctgtatgcatgtacgtatacacatatgggagtacattttgcctccatgcctcttttctttattaaacaaatttgtaaatttgttaaagctgaaggcattgttttaacaaatgttatttagtgtttaaaatcatatttattgtgtaatatggttatttacattttacctttattttgaactcttcattttaggatttcttaaattttttgtctgcattccacagtgagttagtacactcacatgtatatgtttatatgttatttgtatacacatataaatatgtgtgaatatatatgtgtatatgcatgtatatgtgtgtaaatgtatataaaaaaaaatttcacaaaacaaaatctacccttaccaagtgtgatgcattctggtatttctattccattctattacctcatttgtataaaatttatattaatttccagactcaccaatgggtcatgacccggagtttggaaaatactgctttaccaagccctttgcaaaatttcataattgtattaaagtaaataaaatattatagggcaataatatgggtatgattttaaatgattcaaggaaataaaaggttgctaataaaaggactctatattttacttacattagttatgataactgttgttatattatcatattctgaagaatattaactttttaaagaggaagacagacatgcaatcccttctttgctttttaaagaacattttttgcaacttttcaaacttaaaaattaagctacttccttcctttaagcttcctataccccatccaattttttttaaagaaaagataatgaggctcatgcctgtaatctcagcacttttggaggctgagatgggcggatcacaaggtcaggagtttgagactagcctgaccaatacggtgaaaccccgtctctactaaaaatacaaaaattagctgggcatggtggcacacgcctgtaattccagctactcaagaggccgaggcaggagaatcgcttgaaccccggagagggaggttgcagtgagccgagattgcaccactggactccagcctgggcaacagagcacagaattaaaagtctggttttagaacaagctcacttgagactattctaagaaggccatatgcagcaggaggatgaatgcagattcaggctctggacacttgatggttccttaaaatggatgtgtaaatttaacatttaagatagggtcggatattaattaccaaaaaaagggtaattatttaaagaaactttgtggtgattacatctgtgaaaatgaagaatcattctgtaatgtgaatcctgactctaattcagaggtccttcactcactaattaaaactgatggactggtcagaacccagtagatcccatgtattccaacttaacacgtatggtttataagtataaatttttgcatattgagctggattaaaataggggcctatccataccttttcttgatgctgcctgcagagtttacaaattgagactgagaaatatatatttcaaaactccacacatgacagtatagattccctggacagcaaaacagactgttctaataagaatgaccctttgagaatctcctttttggactggccccttcctcagtggcaggtggggtagaagcactgcacaaacttctccccaaccaagagcagggaattctgagtacacgattctcaatatgccgttccacccccattcccacctggctttcttcatattgcctcacctgaattgcccaccatactcagttgtaagtgcctgctgacttctgcctcctgtggtagattgtgggtggcagaggccaggcagggtgctatcctgttcgatgttgcgtccctaccctaacacagttactgggcacattttctggtcactccataacaatgtgttgagggaaggaatagataagtaaatgaatgttaaattaatcaccactttaactagtagacccatcccagagtcagctttctccttacaccttgcccagtgtgaagcaggtgccaagtactcttcagggagcttacttcccgggccctcccaccagtgtctgatgacagctacagctctgtgggaaggaccctgggcatcttggaggggttggaaactgctgacccacgcatttggaaaacccagaaatagcagagctggtggtacccagggtctgaaaaaaatattcagatgtcagtttttggcttatcttcctccaaaccttttgcaacaagtatttcactgataaaatgtgagggagggaggtaatattttacaggtaaattgctatggacagcatggtccaaagtatatagtaagcgttccataaatatttgctcagtggaggtacaaactgggagaatccagtccccatatactaatcatcctccttcaggtatttggaaggagtacctgaaccaggtggatgcaaatggcacttgccgtcactgtcctaagtattagtttgaaccacatgaaattgtcatttagtaggtcaaaaatgttcaaatatcagcaatttcatacagttcaaaatgttacaggttgaaatgtgctgcctcatcactagaaacaagtcaaggctgaatcctgctgataataaaaagtccaaatcgtaaagcaggacattagcagccttttgggagaacaaaggaccaaagcaaacatgaaggatacacaattgcccttggtcagttcttcgtaaagtgcattctaagccattttatgaggaaaaaagaaaaggactcatttgggaaatgctgcaaaccacatctttttcctagagtttcaaaatgtgaattaaaggctgggcatggtggctcacacctgtaatcccagcacattgggaggctgaggcggtcggatcacctgaggtcaggagttcaaagccagcctggccagcatggtgaaaccctgtctctactaaaaaaagaaacaaaaaattagctgggcatggtggcacatgtctgtaatcccagctacttgggaggctgagccaggagaatcacttgaacctgggaggtggaggttgcagtgagccgagatcgtgcctttgcagtccagcctgggtgatagagtgagactctgtctcaaaaaaaaaaaaaaaaaaaaaaaaaaagtgaattgaaattgaagtatatattagcgtatcaaagaatctgagtgtatatacaataaagaaagtcatttaatgatatttaatccagggcattctaaatttatttgactagtgaaaccttatttgaagataatgcctactctcacagttaacagtttgggactaccaggacctacttctgccccatgatccaagtgcctctacccctttcaatcctgacttcttaggcctaaacatactacacatttaaccccatctgagacatagaggcccttgacagaggtccatttctactctttcttgctgtttcctcataatgtaaaaagggtagaatctcaggctactccacgtgtcaatcaatacacaggttgcattctatagatacagtattcagtttgtgcatatttcacactgctatcagcccagtgttcatgtattttagtgaataatagtggggataatttggggaataacaagacctaccatttattatacatttaccatgtgcttttcacactgcactgtgtcttaacatttcgaatatctctcatgtgtattacattcctcacaatgagccagggaagtgggtatttttttccctattgtacagacaattattagtgcccctaagatgtcaagtttgtgacccaaagtccatagagggattaaatgataccagttcctatgcttcttccaccacattaataaaggccgatacgtgtataatgcttactgtgaaccaggcaccaaattctaactcatttggctcataataaaacaatgtaggtactattagtattcccattttcaactggggaaacagaggctgaagaagttaaccaatctgcttaaagtcacacacagctagaaaaaggcagggctggaatttagactactactgaatagtgagtggttctacaataaattaaggcagttaaccatgtttaaaccaagactttccaagcctatttgactaggtaatcattatttgtagggcatgcctattaccacagctaacaattttggagaatgcaatttgggaatcaccaaaccaacttcctcccgttgatccaggcacctccagctcccaatccagagttcatgcctttttattctacctgctgtcttagagaccccatagtctgttttctgcctgtctcctggttgcagaggctacgtgtcaagacctgtccatctgcactcttgattctctctaagtgccttataatgtgaccaaatcaatataacacatttgtaaaggctaatgtaaattatttcagaatataaagtgaatttttcctctaacatccctataaagaaaaacaatcttttgtgctttcagtaactaaaaaacctagaagtctctagtattacaaagctatgaattacaatgtgagtatcaaattctatgaaggttttctaaaagaattgagttcaacacaagtcaccttcagtttcaccacgtttgcgatgaataaaatctaacatttattgcatgtttattatggaccaggcactctgccatgtgctttacctagattatcttatttcacaacaacttatgagttggatgctgttgttactcccatcttatagaaggcactaggattttaagtaacttgcccaagaccacacagctatctagcaaatggtggagcagcatatgaaggggagaatccctcttttaagtgtcttctgccactttagatgctaactctggggttcacagagcaaagccaaaatgagcccccaggttttaacaaagtgatcatttgctttttgcaacccttcattagaaagtatatgacatctaccaaatgggcatccttggggaagcttcaaaatctgtcaactggaaataagattctagaggggaaaccctaaaacctttaattgctccaagatgatacgctggtttggcagatctggctcaacttaaaaggaagtttttttggaaggtataactagcattaaagaaacatgattcttgttctcatacttataaaatcatagttgtcatttctaggtttgctgaagacttggttttataatcttttactaaactggagaaaactcacttaggtacattctgcactttttgtcccttcaccaaagaacctcatagggtcttaaatatttttaagttactcaagacaccaagtattaattttcaccgtgtagacattagagggaaaatctctttatatactaaaataatttattttacattaacctttacaaattgctacattgatttggttatattaaaaggctttaagagaaaatcaaaattgcgttaagaaagtattttttttctcttcttttcttttttcaattgagatggggtctcactatattgtccagggtggcctcaaactatcctcccaccctggcctcctaaagtgtgattacaagcatgagccaccacacccagccaagaaagtattataaaatctaaagtaactggagcttcaattagtttactgttttcttagaaatacaagtacagatggattttcaaggaggtaaaagagatgaaaacagaaggtaaaaatgataatttaatgaggcaaagaggtgaacttgagaatttgcacctaaagacaagcttaaaaaaaacagaataaataatcctgggaggctgtacaagaacaaagccttagagtcccatagcatgggctcactaattagatatgtgacctagtgcaagatacctattctgccctacttggctccttcctatttaaatgagcttgctaataagacctacctcataaggttgcttgctgtgaaaattaaataagacaatgtgcaaaaagcccttaggacaatgtctggtaagtgttcaataactgttagctattaaaagcagaaaatgtcattatggctgcatatttggatggcggtggagaaggtaaattaaacaaaggtaagttaaaacaaaacgtgggcaatgataggtctgctgaggcattaatactagaactgacaccttgtaggtgcttagtaaatattgaatgagtgaatgaatcagtcaatcaatcaatcagtgaatgaatcaatgaaaggagtcacaggaagaaaaacttactcttagaaaagctcaattctttgcattctacaggctccgtaatctcccctaatctatccataagacagaagttatctgccacaattcagaatagcctttccatgtctcatgtagcatctcacgtcagtgcagtaaatttgtaacttcttgcaaaaactaccctaaaatatacacaaagacaccatgaacttataaacaagaactctaacttgaagtgacctcaccatgaggataggagaaaaagatgtttaaagatgaagtaatatttaacacatcccttatttctgcctaaatagtgtgatttgaaatgtctgagtgttgtgtgaaaaaaaagtatatatatatacacacacatacttttttgaaaaatataactataaaagaaaagagagtgtgttgagtgaggaagttgaaatgagaagccaagatattagttatttttctgccactaggagaggtatcattattctatgttccttccattcagctatgtaccttcagaaattactttcagcttctttccaattctgaatcatgagtaaaatcacaaacacgttcaataacaatatgttcctcttgcataaatgtctcttctaggccacatacataattaaaatcctgttgactcaggaataacatctcagaactgaatgtccaaactctgtaacttgcttccttttctaaccagacagcacagctgccaagagcttctgggccctctgcctcttttctccatgtataattattatatattatatagcatatatttgatttgccaaagcctcccagtaaaggttcctgtgactacttatttgaactttgttgtgtatacacgtgaccaaaaacacagtgtaccaaagaaaaagaagaaaaggaggtggcgtgggagtggatgtgcttagcaattctttttttttttcccgtggaaatgagatgaaagtcttaaggcaaacgaatatacactgctttgtaaagcaaaattcacttaaggtgaaaggatattttaaaaattagtgataccattacgtaattcaaatccttggtttacaacatttgaaatgagaaaatcgatgttaaaattcttcaaaatatacgtggggcataaaataaaacactttggctttctttcacctttgggcagcaccagatttaaaccagacatgaaaatctatcgtatttttaaagatctctagagaaagaagttgcacaatgcttcttaggaagttgttccaatattcctcccagtcataaaactcttacattctaacctaaatcccgcacgttctagtttcagcccatttccctttgctctgcctaagtatgattggagaacagttgctcacttaccaaaccaacgttatgagactatccccagtgttgtatatatgtttcagcaatggaaattaaacacatagcccacagttgcctggatctcttctattccttcaaaaatatatagatatgatattggctctttttcagttttctgaaagttctccattcttctgcaaattttcagagaaatctgcccatcttttaaagcatttctccaggcaacaaaagcaaaagtagaaaatgggattacatcaaactaaaaagcaaagcacagcaaaggaaattattaacaaagtaaagacactacctatagaagggaagaaaacgtttgcaaactccacatctggcaagatgttaatattcagatacgtaagaacttagctcaacagcaaaaaagtccaaataacccaatttttaagatgggcaaaaggcattaataaacatttctcgaaagaagacatacaaacggacaacaggtgaatgaagaaatgctcagcatcagtaatcatcagggaagtccaaatcaaaaccacgaggccgggtgtggtggcttgtgcttgtaatcccatcactttgggaggctaagttgggcggatcacctgagctcaggagtttgagaccagcctgggcaacatggcgaaaccttagctaggcatggtggcacgtgcctgtaatcccagctacttggaaggctgagggatgagaattgcttgaacccaggaggcagaggttgcagtgaacggagattgcatcactgtacttcagactgggtgacaaagtgaatctctgtctcaaataaaaataaaaaaataataaaaattaaaaagcctgctgggtgcggtggctcacacctgtaatcccagcactttgggaggtggaggtgggtggatcacgaggtcaggagatcgagaccatcctggccaacatggtgaaaccccgtctctactaaatatacaaaaattagctgggtgtgggggcacatgcctgtaatcccagctacttggaaggctgaggcaggagaatcgcttgaacccgggaggcgaaggttgcagtgagccgagatcacgccaatgcactccagcctggcaacagagcaagattccttctcaaaacaaacaaacaaagcaaaacaaacaaacaaatgaacaaaaaaacacacacacaatgagatactactcattccagttaaaatggctattaccagaaagacaaaagaaaacagtgttggtaaggatgtggagaaaagggaacatttacacacttggtgggatcctaaactagtacagtcattataggaaaacaatatggaagttcctctgaaaattaaaaagaaaattaccatacgatccagaaatcccactactgggtattattcaaaggaaatgaaatcagttatgatgaagagatatctgtactcccgtgtttatggcaacactatttacaatagtcaagttatgaaatcaacctatgtcaaacaacagatgaatagataaagaaaatgtggcatatatatatatatatatatatatatatatatatatacgtatatacatacacacagtgtgtatgtatatatatatacacagtggaatactattcagtcacaagcaagaatagccgagtgcagtggctcatgcctgtaatctcaacactttgggaggctgaggtgggcatattgcttgagctcaggagttcgtgaccaacctggcaaaacctcatctctacaaaaaaatacaaaaaattagctgggcatggtgacatgcacgtgtagtcccagttactcaggaggttgaggtcggaggatcacttgagcctgtgaggtggaggttgcagtgagctgagattgcaccactgcactccagcctaggtgacagagtgaggacctgtctcaaaaataataataataataaaaaaaaatcctgtaacatgcaacaacatgaatgaacctgaagcacatcatattaagtgaaataagccagacacagaaaaacaaatactgtgtgatctcactcacatgtggaatctgaaaaaaaaaaaagattgctatcacagaagcagagagtagaacagtgtttatcagacactggggaggggagattggtcaacagtcacaaaattacaattaggaagaataagttctggtgttctattgcagggtaggaataactgtgcaatagttactagtaatagcaataagttccctacttatactaagttttctaactaatttcaaacaaacagtaatcattaaactttaaagtacattagagaattagggaagcttcttaaaaataagatgcccaagttttgacccagactcagtaaattataatctttaggactctggcatattttaattgttctcatttacaagtattaattctatttagttaataagtgcactttaaaagttattaaaatcattataaaaacagaaacaaaaaaccaaaaaacaaaaaaacccactaagcagataagtgttctctttgtccttggtaaagccaattctgcttttacacttaaaacccacacattaacagtcaggcattcagggtgtactgaatgtagacatcacaatcctcatcagcaggaaaataaaaaccatacctgatctgttcctacaagtttcccacactagaactaaatgcactgccaacaggctattgatgtataatacattatcacatgaaaatgtgattacgacaaatacaagactgccactgtctgcaagtatataatgcattcaacataagttatgcaggaactttctcaaaatttaagctggttttagtggacatgagctcattcaaggaccctgaatggtatggtatggaaagaaataattactgcataaaataacatgaaaagagaaacatcaggatagtaccaaaagctgagaagtgggaaagttctatgtgagaggtggcagcaccttttccaagaaacttcaaggtgaatcaggctaagtctgtactcagatcctaaaccatatggtatcattattattagtgttggattgccctaaaaggggaacacccgggggcctacctcaatgatttgcccaggtgggctcagtttcatttctttctctgacattctcaagcatcagtgctggattaccctaaggggcttcctcagatcgcctgtgctgtgcattttcccaaaagttcacaggcaagagagggaaaaaaaaaagaacaactcaaagctactaaagcaaccgcagaaatgcaggtcaaaatgaaaaggctctgaaattgctgagaaaggaaagaagtgaaagcagcaaaaagatggcagtcaaatgccaagagagattcaagggcaactcaggtgtgtaaagaaagaggtttctgttcctaccaatttgtgtttatgctcacaaatgtgtgcctgcgggatcaattatactctacactgttggccagcttttcttttctctttggagaaacgttccaaacgttcaaatccttctttttctggtccccctacttcttttcaatgagttatctacagcatgttgttttcctctagagtttccattcttcaacctcttgtcttttcccccactattcccttcctttaaaaatcttatctgcagccaaggcttcaattaccatctaaatgaaaatgactctaatattacatgtttagttccatctctttctcagaatgaagttacagatttctttttctttcttttcttttctttttttttttgaaacagagttttgctcttgtcacccaggctggagtgcaacggcacagtcttggctcactgcaacctccacctccagggttcaaacgattctcctgcctcagcctcccatgtagctgggatgacaggctcccgccaccatactcagctaatttctgtatttttagtagagatggggtctcaccatgttggccaggctggcctcaaactcctgagctcaggtgatccgcctttctcggcctcccaaagtggattacaggcgggagccaccgcgccttgccaaagttacagatttctaaatgcctcctggataatctccatctggagttggattcagtgtttcccagatcaaacatatccatttccttccacaattgtttcttttcccgtacctttgacttcggttaatagcacagttctctcaatcatatccacttctcccttttctgtaccgtatcagctggcaggccctgtcaacagcacccctaagggaaagctgggccattcactttcataagttctccccctcaattacccctcattaactcttttccagactattgtagtagtgtcccagataggttccatccctcgatcaattctttacattactggcaggtgattttaatgacccagtttgatttgcctttcttctttttgaaatccttcaatagttctccattgcctgtcaaacttaattcaactctctttctataaaaataataactttattgagcccactatgtgaccagtgctttacatatataattttacttatttctccaaaaagcttataaagtaggtattataccatatccttgaaaatgaaatcaattttataactatgaaatattaaaatatttctatcaattatgaatattccattgattcaataatctctttttaataaaaaattattacattaaatatacatgctaagatttttcttgatttaaaaaacactaaaatgagaaaaaaataatgtgaatcttagaaactagtaaatagagtatcatccccattttaaactaagtcaacaatctttccaatatactatattcccttttcctttgacctggggttacaccttttagtcttatttccctatcttcctctttatgttccttacatttacccagccctgggccttggcgttgatttctgctgtgcctggactatgaattcctccttactctacatgcccaaagacaaccaggtttcaaagcccagcacaacacccactcctttgttaactctttcctgattccccaaattaaaatgacctcttattcctctgaactaccatacattttgcactcttgtatgaaactactctttgtatcttgtgctagggttacgtatacgctttctctccattagagtatgcttcttcaagacctagactataattcacacatctttgtacaactacctccaatgctttcctcctatccccaccataaagcccagcaacttcttgcatgtaaccggctctttaaaaatatttatcatttggccaggtgcagtgactcacgcctgtaatcccagcactttgggaggctgaggtgggtggatcacttgaggtcaggagttcaagaccagcctggccaacatggtgaagccctgtctctactaaaaaaatacagaaattagctgggcgtggtggtgcatgcctgtaatcccagctacttgggaggctgaggcaggagaattgcttaagcctgggaggcagaggttgcagtgagccaagatcgtgctactgcactccagcctgggtgaaagagcgagactcagtatctaaaaaaaaaaaaaaaaaaaaaaatgtatatctatatctatatctgtatctatatctatcatttggatgactaatcagaacacattgaatggtttttctctattattcattatgaccaaatgaataccagttattgtcacgtcaccaagcatgtcaccactattcagccaagaattgagatgtcgtgtttcaagagacgttcattctcctgccatgatccagtcacaactgatgggcctgcatagtagcacttttctaagtgatagcctttatatttctttagaaccaaaacttatttgaaggttctctgtaagcacttaggctaagcacaccttgctttaaaaaatataaaatccttcgaaacaacaaatggaggaaatgtcctgtgtgctaaaatggaaattgttttgtcattttgttcttgctactgcctggaagagaaggagttgctggaaccctaaatatgtcttggccctggccctagtatttcataggaaactgttatttttttaaaaaagtacttctcaggtattgcaacttcagacattagtaaatgatgctgtgttgggtttttgcttgttcatgtgtttgtttatgttttataggttatagcaaaatcctgtggtgatctatcactaaaacccttcatttgggtggtagagttcacagaaatttttaaacactttgctacagactgaatattgtgtccccgtagaattcatttgtagaaacctaattcccaatgtgatggtatatggaggtgggacctttgggagatgattagatcatgaagttggagccctcataaatcagattagggtcctggtaaaagagacctcagagagctcctttgcttcttcagccacgcaaggacaaagtgagaagatggccatctatgaaccaggaagcagggtatcaccacatattgaatcttctggcatcttgatcttggacttcccagctttcaggactgtgagaaataaatgtatgttgttgatagcactcagtctatgatatttttgttatagcagcctgaatggactaaaacatatgttttctcatttagtcctcaaaacaacttcttgatgtggatattaatatgtaaactttgcaaatgaataaactgaggctgagaattattgaaaaatcctttcacctaaggtcatatagctaataaatggcagaggttggattttaatccagattttcttacttcagggcctgaacactgtctataatacaacatgggaatgcctataagaagctggtgttttcaagtatggggccattcatagaagagtctgacaaactgctgttgtgtcatgatctttgaaaagacaccaagagtgaatattcctgaaaggcggcagctcagacatgcatagaatctatgtgattttaaaatgtttcctcagcctgttactgatcagattctaaggaaatcagtattctctagcccctcaaacctcttctccaacttctcctatttccagatatctggctaggaatttctgtcacaagaaaacgaggtttgtatcacctcatatctcaatttctaaaaatttcccaacaccataaatggtgataaaatgtgagggttcaagagctacttggaaggttttccagtctttttaagggaagagccttctgtctattcagacccttaacctatgtattggtttataaaaagctacccacaaacagggagaaagtgatggcaccaatattcagatccaccttgtccaacccaaatacactttcacacatatgacctcctgtcattttccattctctttccactatggttagtattgttattggcccataatgtcaaagaaacacaggtttttaaaccacatcaaggaaatctttgaaacaaacctatgttggttggctaacactgggcgatttcacaaaaatttgtacaatattatgtttcctttttataatgacgtgcagagatggacatcattatctcagtttcatgaaggaggagactgaggttcagtaaggtgaagtaactcgcccaagatcacatagccagaaagtggaatccaaagtctgttttccttcaaagtcaatgcttttaatgattctactatactgcttctcagatctttttttatatgatattaacatgcagatgaagtccaatattatgtatccccaggttatgttcacaaggagccaggaggtataacaaaagacaaaaatgattcaacccttccattggtttctatttcctctctcatctcaagaattactgttagttaaattctcagtcacaactatctatatacatgttcaacacattgaaatttttaaaatttcaaacattttgttgttttgaagagaacaacaactgctgtacaacatgcacggagaatgctgggatccagccgggtggtaggcttcacctagactggtaagaggcagacttgctcacagtgaacacaggaaacaagcaactgcctccaaccctgttttccatcaattcctgtggctctggaccaatgacaaaagttgatcacttcaaggaaacatttccacagcagcatgcaattttgatatctggtaatttccgcaatggtttagacaggttaaagaaaggagaacacttaaagaaaggagaaacacaagcacttaaattggtcatgataaaactggacaatggcaggcatagctattctgtctgggcagcatggcaccatctttgtactagaatacttgtttaagtaattattagaataatttgatgggttttatccatatacatctataaaagtggggctgaaaataaattctgatactgttgatgagaagggttagtttcataaacttaacacaattaagatgaacatggaaaacagcgggcaagccaaaagcagataaacttttgcttcaattggatgatggttggatgtcagccagtatttcatgggtctagtggtgaaaggaaagcattaaagaacaaagacaatgctggaaatacatgattaaagactacctctaaaaacatgatgtatttagggattttatagtatttttggttcattggtactagaactccatttacaattatttggttcttgcaggtttgttcatattttcaagaatgcattatgcactgatgtacatagaaaactgcctgtacctagttgttttgtctctatccttattcatttaagctaaacaaacaaattggatgtcagaatgatgaacactgtagaataagcaaatgaaaaacaaaacaactttagattcaggagctggggcaagcatccagatctctgtacagggaagagctgaggttaatgcagctgcaaaaaactaggcacatgcacgtggcattgcttgacagacaggaagcctttccagggtttccaaattctttcagatgttttggggaatagttaaaggcactagatacatgaattgaattgcatttaactctacattttaaagaacagctaaataaaaactcccagagcacaatgtctattcccatccccaggaatttcttgagctgggaagaatgcctgccagtgaatgcctaactctgtcctcagtttacagtcacagtttttctcttcactcagacacccagaaggcttctcttaggtgtggtttcatccagccagccctacctatcttaatcagactgacttccccagtactaaataaagtggagaggaaatttctacccacccactcatcagagactataagacccaactcacatcctgcaagcctcaggatggaacacgactccttttaactacctgggcacagtagctgactatcaggaaactgctcgtggcctccacacattgccacactatttacacagctgatggaagtttgccctggttgaggaatttggctctagaggagtccccttaaaattcccaaagggcctattcaccctgtcacacccgcacagatgcctgtgaagatagcaacagtggggttcattttctaactccttctgtacacagttataactcaacatgtttatttaaaagtggggggttggagaagagctaggggagctgcaaaatctaacattatatgagatattttcaagaaatattttgagcaaagtcaacaacccccttgccctgcctctcagacattcctcagcttcattcagcaacccaaactctgccctccatactcacaggcatgaagcagagccaggacgtgactcccaacagaaaatgagcctttctaaggcagagggaaagaagctgaaagagtcaaccaactctcaaagcacagagggagaagcagcaaagcagagggtcaacattcttctcctttaataatttaaagccctgctattagcagaggaaaagaaaatatcagacacatgattgtatcatgacaataaggcacagcagaggtgataagatgaagggagtaatttcctgaagcccttctcgcttttttaaagataaggatcaattcttattctttcaactattaaaacatgatagaaatggcaataagctattaattttgcaattgcagtggcaggcccatcctggcagcagtggggcctgctttctctagctgtgaatgacctctttcactaggaaaactgttcaggaaacagctctgcatttggaaagaggtgtatatgagaggcaaatatatatccaaaatgttccctttcttaatttccttcccctcctcctaattttctcctagcccaaataattaatcttcttgtgttagccaaataaattccatttaaattagttcgttctaaaggagaagaagaggcagaaatggtggagaaggtgggaggaggaggagatgcagagggaggaggggggagaagaagaaactgatcttcccatgtattgcctacttctttccttctgaggaggcaaaagtctaacctcaagtgtgtaggttttggtgccaaactccctgagtttgacttggattctgccaaatgactatgtgactttggataaagcactggcatgtcaactttcttatttgtatcaatgttcctgctcgtaaaatgggagcaacaatagtcccaaacttctgcggtggttgtgaagattgaacataacacaccttgaataatatctaaaacaaagtaaatgctgagtacaagtttatgactactatttgctatgatttgaatgtgtctccaaaaaaaaaaaaacatgcgttggaaacttaattgccattgcagaagtattaagaagtgggacctttaagaggtgattaggccatggcaactctgccctcatgaatggattaatgccgttttctcaggagttatcttgggagtgggttccttataaaaggacaagcatggcctccttttgtctctctagccctctcaccttctaccatgggatgatacagcaaaaagtcactggccagatgtgacttcggtattgatattgaaattctcagccttcagaactgtgagctagtaaatttctgttcattataaattccccagcttgtggtggtgttacagcagcacaaaatgaactaagacattattgttggctcctccatctctaaactgtcagattcaaggcagatcatgcaagaacagaaggcaaacaacactaactagagataaaagtcacatacagaagagctctaaatccttactagaacagaagcaaatggaagtaaatacagtcactcttttattaaaaatctaaatatgatattaaactggtaattacttataggcttatgatttgtaagaggtggggagaaaatggtctttctgtatacatgacaataggcagagctttatttgagaaattaaggagaacttagaaaaaagcaactaaaaaaactactgaaggattaaaaaaagaagaaataaataaacaaagaagaaaatgttaatgaataagcaataaactaacctcatgttcagctgatctctataatgatactggtgtttggggatagaaataacttcatattataggctttctgggattcagggagggagctgcactataaattaccctgtactctggggattgagttagacccacagtgtaactcaatctctgccctcatccatctcaaaaagtccagctcaaacctttttcccatcctctcagaggagaaatttggccttgtggttaagagtgaaagaggccggagtggagaacaccctggtaggagtactggaaccaccactcactggctatgtgttagcaggttagcaacttcactgagcctcaatgtcctcatttcaaaaatggggctactaatagtacctacgtcagagggctgtgtaagcattcaacatgagaatgcacattgtagataaaggttttctaccagaggttggcaccaggcagaacctaattcaatcatccattttacagatatgaaaactaagatctagagaagttgagactatcccagggtcacacagtgagtttgtttcaaagtctggaaatgtaaattagaaccttagtcctgattccttattcagtgtttttgcactaaacatgcttttgccttcacagggcttcacaaatactctcccacattgattttgtcctttgccgaacatcaagcacattttcaaccagtactgtcaggatagcatttgaatactctctatgactgcattccatcaactacattataagttcctcgaagtgacaaaagtggtttaacacttctgtctatctaaagatgtctactcaaatactgggcacaagagtgattgacagcaattgattgatagagaggtttctttaagaagagcttttactctgaataaaatattcctgtgaggaagatgctgactggccatccaggtctgcagaagacaagaccagaggaaatggattttgaacatgtcccaagagatctataaaaaattaactgcaaaggagtttaaacacaggaataacagaacaaagaaagctgagggttctctcctgaagtgaatgttttaaaaatagacagtctatttgtagataaaataagttgacacaggccattcgttcttaacctatagtctgtaaaccccaaatatagctgttattgctaaggatctgcaaattgatttgcataccaaacactgtagaatgaataatgtcttacacttatatgcaataccttttttcaaatccatgtggcaaaatatatttaatttgacttaataaaatacaaattctttaaaagcattatgaattttgttgtaacttttgttcattatgtatattttaatcaagcaataaaaacagtggctaacattattgaacatttacagagatcattttgtttaactctcattagcacccaggaggtaggtataattgtcatccacatttcagagataagaaactgatatttgaagagtttaactaactcaccctttagttttactggtataaataatggagctggcatctgactccaaagcttgtactataattacccagcattaggtcactttttaattaaccagtgtaaaacattttacctattttcatccatgtacacatgtgtaaggggtggatgtttatccataaaattttatgtttaaagaagaatctcatatctgcaagggttaataacaacacaaactatagataaagagtagcttcagaataattcactttgactttcagcaagccaggtgctcagaagtaagggattcaactggttgatccctaggaatagctccaagccagaaattctatcattctataatttagatttgcatttcccaaaatggattctgcagaattctggtcttaagagatgcttcacagaagtttgaggaacaccataaactaaaagagccaccatacacaaaagtgaatatcctcttttggagattcataattacattcacatagtgtaagctctgagaagtcctccagagcactggatcacacaaaatgaaacaggtctccttattataagacttagcaagaaaacctttttcattttgcagagcctggggtaccctgaaaatatctgggcatcgaactcctgttctacataaatattttaaatatttcatggaactggttccacagaaaagacttaggctagaactcaaattgggcagttgaaacatttttgtattatgtggcaagctatgaaaagtgaacttttgagatttttcctaaaactgtcactctgtatgaaagcatgggttttcataaaggtttttagtcaaaagccatattatctaagcactgtacagactgctaagtatttttgtctctctttcagcatggaataaactttttattacactacaccactctaaatgttatgtccttctattcttcaaaattccttctagactaaaggttctcaaattttaccatcctcagaaccacctggagtgcttgtttaaacaagagttgctgaacccctctgccacagtttctcattcaatagatctggaaagaggcctgggattttacattattcacagttcccagggaatgctaatgctgctgctcagggaccataccactcttgtgttagatgtagacttcttgtgttagatgtagaccatgaagtggacacggaaggcacctggttcatctctgcttccatcatcaagggctgttatcttttctcctgctttctgttaagcctgaatcttggatatcctgccaaatatttatgttctttgtgctttgcatttttaaattacaaacgtttttaaaacttccatcagtgatgaagaaaggagttaagagaaataagagtgtctttgagctttaagagaagaagatattccaaaaatattcagcattaatttatatgagttaatctcttatttctcattcaatcatataaattaaatttcagtagaatgagtttattcttcccaccttggaagagtgattaagtaatcatttgtaaatataagtggacaagttttatatcattaacacttcgactggggatccattcactggaacccagagctcttccagacctttaatttctataatagaatattctatgatgctagagaatctatactgccaaggggctctttaaaatggtgactaaatgtagctacagtgtcataaaatcctcagcatgtctggtatagtagatgtgttcctgggaaattgcaagtcaaattaccgtcaattggattctatttacatatttacatattctatattttagatatgcccaactaccactgtttcctaactctttagtttaaattttctgctcctttcacccctcccaagacctaatgacctgtctaggaaacaaggacagaaattaatctttgctgagactcttctaagggttacattattcaatctataccaaatctgtgatgagggtttcatccaaagaaaagctgaggcccagaggttctggtcaatggagcagcggtagcatgaggctgccaagtgtgcccactccaaaggcccctctcccttcaccccacctcctgaactactctgctccaagttcttggtgattcttaaaatagggagctccgtccttaaaggataattaagagctccccttaaaggggagaattatttggtgttgtgatgaattgcccataatcggtatgttttaaaaattgtcattttcataaatgtgtctccttagaggtgaaaacatctgaaactgaaattaagtgagagaggcagcatgggtgttagggggtaaaattaagtcaaacattttagtcaggaagatgcaaaatgttacatctttacagaccattgtttaataagcccagtgaataacccaagtaagtaataataaaaaacacacacacacacacacaccatttagaggctctccctgagcacgtatgtattaacttgaggcttaagaaggcagacgtgtcatctatctgctctagccatttgaaagcagcaacaacttgctagcactgactggattacataaagctgttcatggcagagttcttggtaaaaaggaaaacatcttctctacccaagctctgaaaccttgtgcaaacaaagttctctcaagtaagctgagctctgcccacggagcattcttcagggcttagtctatgtataagctgagttacctgctattatccacacaatgtcaggaaggattttatgaatgtatgaccttagcttttaaaaggtgaccacagaagttgacaatgacctaaactactcatgaatgtcaggctttcagaaaagaaaatgttactgacaatccaggggactacatggggctgctctgcactctgaaaccaggcagggaattgctggttttaatagttgctggggtgtgagagacatggcaattgggctgctcatgatacctctgggaaacggattgttagaaataaacaaggtttgtgaacagagctctactactctgggatctgctggttttcactggctaatttcccagattacttcggtaactgtatgtcaacagaaacccagcttcttctgagcacacttaaccaccactgtttgcacagaatggaaccaaccccttgctcattcagagtgttaggatttctagatcagaaacacagaccaatatgagttaagtgaagtttcaactttcactccttcttgtaacatttactgatcacctactccgtgctagggcctatgagagacattagtgatacaaagatgataaggagctttctgctccttcaaggggctcagtctaatccacaaaaataaacatgaaatacacatgatgctaaaatgggacagatgttatgacagaagagagaacatcttgggagatcagaaggcagtagcctatgcatcgtgcttcacagaggtgacatttcagttgggtgttaactgatggctaagaaggtagagagatgatcatatgcaaacatgtggcagtgagatagagcatggcatgctcagggaatggctatgggttggcaaaaaagagagtttagaggattggggaagaaacagctgagggtctgggccctcttagctagggcaagagtttgaagtggacttgggaaattgaaggtttccaaggaggctgaggcatagattcactgggaaaggggtgcgagaggtgggatgaaatcccaaggggataacttgtcctacccaatatccaatccaaatacaactggacaaatctttgctgaaagaaggcccaaatctagtgatgaatagtactggtttcagctattatctctggaaaaagtcatggctactgtttcttttatagaccagaagagaaagaaagccctctcctttccattcacctggatacactagccctctacatactctggtcatctttttttctctacaatctcacttctccagtgcatcttccacactgctatcagagtttcatcttaaaacacaacttaaaaacctggtttctcaacggctatagaatctgaatccccaattctttagtactcttagcttttcctcgtacaatatacctttcatttctacattgctgtgcctttgctcatgtaggaatgacatgcctttctcccctattctcaatgtatcatattctacttgtccaacgaagtctagcataatggccacttcctcaaggaagctcccttaattcttctcatcatcattatatcttcctctgacccatatcatcttgctggttccagctaagacccatgaactctgccttgtcttttagatgatctgtgggaagcttcttagaagcaggcctcttaattaggtggaaaggaaagaagggagaccagaagggaggaagaagcttgcttttgagtagacaaaataactgactcttggacaagaatcaggtattcagagtcagttgaacagtaagtaagtaaaacaaggttgaaggccaaagtagattatattttccaaagatgacctcaacaaaatttcctaagctcttctataggtagcctcgcatcaagaaatggagcctaacttctctcctcttgcatctgggatggccttatgactgcttgaaaccaacagaatgtagcaggacttttgaggctagatgagaaaaaaaagagggcttcctccttgttctcttgaaattcttgctctgaggggaggcagctgccatgtaagatatccaaccaccctgagactaaggtgctggagagaccacattatgtattccaatagatagtcccaggtgagctcacacttccagccacccctaccaaggtaccagatgtgtgagtaaagtcaccttagaaccgctcagccagccaagctagcagctgggtaccaataagtgaccttagtcatctccaggaggaacagtagaatcactcagaggaggcttgccaaactgctggcccacaaaatccatgttttaagttactaagtttgggggtagtttattacacagcagtaaatactggaaaagccagagagtgaattttttactctgctttttattcctaaagctaaccagtcttctgaaagagtcaaaatcactgttcaagattaaaacttttgggatctctagaaatcatgtagttgcttggtgagaaacagggagtgacctgggtcctaactatgaagatgaggccagaagaaactggaggcccagaggtttgttaccagcaaagggcactattgctgacctaaccatagacagcaggcagacagacacaggcctgcagatgctcactgcacttggcagaagcacaaattggaggtcagaggcatgaacagattcttcatttctgatagacagtacagtctagaggtctgatatttgttgtatgaatccactgcatctggggactgtcagcaatattggtggtagtgtttactgtgaggcaatgggccactaaggggtcacaggtgctacataactggatatgtgatctggactctccttccttctgaaacattgtagtgagagagctcaaaggctgcagagttggagctagtctgccagactctccatggagggactttctggggattctggctgggagttgtctgtcttggttcataaggaagcccaggcctctgtgcctgccctggacatcttggcttgaagattatacttgctgctcacacaatgttacatctcacttagcagcattccatggaactcatttgttaaatgttagcaccaacatgtcctccactagttttcaaccattcttttgagcactaaatggaacattcctcttttctgagttcacaatagcttctttttcctaaggaccatctttaagatctctcacagtgatttagatctattcatgcctgaaagagaggccagctcaagaccaatgtacaggccctcgtagttttcctaaaaaggaaattgtaagagttttttttttttttttttttttaatctctaaagcagctttcttttactgggagaagagatcagtatcatgtcctatactttccaaagacctctagtattcttattcaatgaatatttttaaagccagaattctgactgagaatgtgctttaagctagatttttataagaataagattttgtggtgatttttaaatgactggaaattgcataattttcaggattataactgtgtatatttccctcatgtaaatattaagattccttagtctcctggagaagtcttaactttgtctctacttttagaataaagtcaaggatttattaactgcactgcaactaaaatattaaacagaagggcctttcacacacagattcagcgttaaaaagcctcaaatcaaaacaaatggagaaattggctttaaagccagaaagaatcaattgtttttgggtcagttttggtttggggagcctaatgaagactgattgctcaacaagggctgtgattagtgcactgtcagtcattgctaatcactacagtacctcacattgcctgtcctgaatcaagacacctttgcctgcacaggcatttctcagtactcttgactactagcatacatgttaataagtctattaacaggcaaatgcatactaattaacatgtacattgttatttaaatatttaagagggagtgctaagtccctttttaaatgtcatattatgctcagttatgacatcatttgaagctaaattagagaaaccaagcagagcatttttcagtagtttatctgcctccttatatcctaagttctttgagggcaggatctgggtatgattcatctttaaatgcttcttggtgcctggcatagtgccttgcacactggagtggcacagtaaatagttttggaatgaacaaaaagaaagaaacctccttgaataggagatagtggattcgacttgaacatatagactggttctctgacaaccacaggatttaaggaacatttgtacagcattgtatagttggcaagcacttccatacatttatcgtctgtcagccaagtgtcaataagtttagttcactattgagtaaattgtccttaggaaggttacgggattcatcccagattttttaattccctactgtatggaattactatattgtgtgcatacatgaacacaaacacatacacacaatcatctgccaaaaattccttcaagaggcctgtgattttaacatgtcctcatctactcgcctcattattgtcaaagctatatttgcaggggagggattgaacagcatatctaagatataaatttcttcactcgcagccagatatgcccacacccatgcctacagaatattcagagtggctgatcgacccaacttctcatgaatgcacaaaaactcagtgcttggctctgcaaacactcacaattaatcatcaggtatagtttaggaagatgacaaaaagtcaatttgaactggtaaaacctaaaggtctggtccagaaaaaagctgaaattgaggattcttgatccaaaatgtttaggtcttccttgcaatagtagcaatatggcagtaaggtaaaattctccatgcttcttattttgacatgtttttaagcattatataaatacactttctatcaaaataatttaaaggcagtcagcacccaggacaggaaaatgtgctaaccatcctccctaccctacatttctgcaacacagatatgagtggcgggtagaacagaaggcacgaacaggctggggagtgcggccaccgccaccaccaccgccgccgcctcctcctcctccttctcctcctccttctcctcctcctcctcaccctccttctcctttccccttcctccttctcctccttctcctccttcccctgggaaccaaagccaaaaaatgttcctcattactgctggttctttgatctcttactctctatttttagaacactcctgtccaacatcctctgccccattgccatgacctttcatgacatgcttctcttctcctggtggttattttgggatcatattcctttcccaaagtattactacagctaggattaatgtatgaggtagatcaccacaagtccttgcttgaaaatgtacccaaagcacatgttcctacatgcgggtgagaaagcggctgtacgaaggacacgtcatctgtatttttagtcatcaaagcattctagaaggactgcttaatgaggtagataccacactgtcacaagacaacattatctagatgcagaatttgcgcacgtggaattagataatgtgtccagcacagctaaaggtgtgtgtgtgtgtgttgtttaaggggtagaaaaaaaggagacataatcataaaggagatataggatttattactttcaagtttctttcagagtttacatctccctaaatctaccaaccacgtataacaagaatcaatgctttcaatgagggaaagtcagagagatcaaacatgctttgactgttcagtatcccttagaaaagtatttctatacagaattttttaaagtagaataaaagtggctgggcatagtggctcacgcctgtaatccaagcactttgggaggccgaggcgggctgattacctgaggtcaggagttctagaacagcctggccaacatggtgaaatcctgtctctactgaaaacacaaaaattagccaggcgtagtggtgggcacctgtaataccagctaatcaggaggctgagacaggagaatcacttgaacccaggaggcagaggctgcagtgagccgagatcataccattgtactccagcctgggtgacagagcgagactctgtctcaaaagaaatagaaaagaaaagaataaaagcttcctcaccagaaataagaccaacatctagattcaggggaaaatctctcttcagtgaagacaggaactgtcttttgcatttaccactatatctcctgtgttaagtacagtgttaaatagctacacagatgagataatttgatataacagtaacagctaatctttattgagcacttagtgtatggctatgtgacatgcactattctgtgagttctgcatcaattaaataattgaatgcttacaacaatgttataagatatgtgcttgtgccatcctcatttgagagatgagaatactgaagtgtagaaaggccagatatcttgttcaaagttggacagctcttaagtgagagagccaaaattcaacaacagacacttttggattcaaaacctatgcttggaaagtaaagaaattagctttttttcactgtaacatgcatgaaaaatttaaagagaagaaccgaacttagtgttatgggctaaattgtgtctccccgaccccaaattcatatattagagtcctaacccccagtatctcagaatgtgattgtatttggagatagggtctttaaagaggtaattaggttaagtgagatcattcagggggccctattccaatatgactggcattcttacaggaagaggaaatttggacacagacatgaatagtggaaagagtatctgaagacacaaacagaaggtggtcacctgcaagccaagaagagaggcctcagaagaaaccaactctgctgataccttgatctcagacttctagcctccagaatcatgagaaaactagtttatgttgtttaagccacccaatctgtgagactctgttatggcggccctagcaaatgaatacattcagtgttaagatgtaaaacaggagacaaagaaaatgcacttggtccaaaccagtaaaaaaaaaaaacatcaatctggttgggtgcagtggctcatgcctgtaatcccagcactttaggaggccaaggcaggtgggtcacttgagttcaagagttcaagactggccaacatgatgaaacctcgtctctacttaaaatacaaaaattagctgggcctgatggcgggcacctgtagtcccagctacttgggaggctgagacaggagaactgggtgaacccaggaggcagaggttgcagtgagccaagatcgcacgactgcactccagcctgggcgaaggagcaggactctgtcacaaaacaaacaaacaaaaaccaaagtcaatttaagacatatagctgtttctgttccatggatataaattgaccagttatacaacttttgcaagttccattaggtgggatgcctatcaggacattctttttgatggcccagacaactccattatcacaaaatgaatacagaaacaaaaaagtgactccagttctagtttgtgatgggtctctatgttttttgattttattgccctcaggtattttcatgttctgagtaaagcctctttcttttctatatactcatttatcaggtgcctcatgtttttaaaataaaagttttaaaagtaataatgctaaaagtagtatataagttatactaaaataaaataaaataagaatatgaaaatcattcataatctcatcatctggagataaatgctattaccaaagaatacatattatctttatgtcaaaatgggatcttgatgtacatagaattttttgctctgcttttgtttaattaacattggtttgagagccttttctcaagtcattaaatagtcttcaaaaatcatgcttcttaatggctgcataattcctcccaaaggatatactataatttattaaattcaatactaacaaggttattatgaagcaggcacttttctaaactggtagtggaagtataaactggaaagcagtttgacattatatatcattattaaaagaattcatacccctgactcagtaatgaaaggtataagaaaggtattaatgtgcaagccaccattttcacagtgaagtcatctctgaccattgcttttgaaattgcacacctgacttttcactttgactagtagagagccctcagtgtcatcctaggtcattcagtagagacaccagcagagtcacatcttagtagtaggactgaactatctcttgagtgaaagttattctagacctgccctagaaatatattaaaataggcctcgaatgggtcaaactgatctacatgtaatttactccccaagacaaagctcaatactatttaaagaatgacaacaaatccccaactcaacaacataatagccataatactcagctttcagttaaaaattactggacataccaagaagcaagaaaatgtgatccaaaagaggaaaaaaatcgatcaatagaagcaaacttagaaatgatggagataatgaaattagaaggtaataccattaaaacaactattatagctatgtactagtatttaaagtaaaacataatgtgatgagaagtgaaaatctttttttaaagaatcaaatagaacttctagggatgaagagtataacatctaaaataaagatttcactggatgagtgtagaagcagatatgactctgcagaagaaaagaccagtgaacatgagggcatagcaaattagaatatacccaaaatgaagcacacagaaaaagactgaaaaaaaaaaaatgaacagagctttttgtcttgtggaataatagcaagcagtctaacacatgcaaacttgtccacatggagagaagtaggaggacagaacgagtataaattatggtgagaaaatttcccaatttgataaaaagaataaacccacagatccaagaatctaattaaatcccatgcaggataaaaaatgaatgacaccaagacaaatcattgaaaaccagtgataaggagaaaataccaaaagcagccagagagaaaaagactaattacctacaagtaatcaagatgaaataaacagcagactttttgtcagaaatatgtaagcaaaaatacaatggaacaacatctttaacatgctaaaagaggcaggggaagggaaagcctgtcaatctacaattccgaacccagaaaaaatattctgcctaaatgaaggcaaaataaaaactgttttagaaaaataaaagcaaacagaacttactgttggcagacctgaactataagaaatgttcaaagaagttcctctagtaaaagaaaaatcatatgagagaaatttggatctatacaaaggaataatgaatgtcagaaatgataaacatgtgagtaaatatgaaatactttctttaaaagataattgaagcaaaaatatttacaatgaagtatggcgtttgtaacatatatagaagtacgatatatgatgcaatagcacaaagactcttgggggaaaatgaaaatatattattgtaaggttcttacattatatatgaagtagtctaatactatttgaagagagactagtaagtttaacaatgcatattgcaaaccccagagcaatcaattaaaaaaataagtagcattagaatgattttaacattggaagtatatagaaaataataaaaaagaataaggcttaaatcctttggagaaactaagtatcaattctgactgaactgattattgcttataagaaactggcaacctattttgaaaaagtgtatgttatctaatgagaatctttaatgtgtctctaattaatattaatgtataaacattaaggttttttttcctattgattctacattttttgatggaaagtaaacaaattaatgagcatctttaacacaaaattaactgaaatttttaaaaatgtatgttctttgtgtaataaaatctatattatgttattctacatcattaaatatttgtttacttttcctcatacgactttaacaaaaagataatgtcattccatttcagggagtgtatcctagtggtttacatatagactttagtatctgactatctgggttccaaccttagcttgactatttaccagatacatgactgtgagcatgttacttcatacctttgtattgtagtttcctgtaatgtagggaaaatagtgcctacctcaaagagttattaggaggatcaaatgaattaatatattgaaagcatttaaaaacataccaggaaaatagcaagtactataagagtgttaactataatttataaaaattactatactatggctagaggactgagatccaaagagataaaaaatacagatgttgtaaaaagaaaaaactacttgagaactattaggttggtgcaaaagtaattgcaccaacctaatagaagagctactttagttctaccctatcactaactagctgtgtggccacagacatgatgctaaatgtctctgggcctcatttactcatgtgttctcttctccctcatatcctactgtgatctcttacataatattaagaatctagtgtattatattgtgttaagtaccaagatagtctctcacggttcttactggggagaaagtcacatttaaaattaaagtcacgtttaaaattaaaattaaagacacaattaaaatggtataacatgttaggtgtaatgatggagaccagagaactgcctgccactacagaaagccaatgaatccatgggcattactaaactcttgtcacccaaaggaaggtcaacttagaacgtatacttctatggctactgttctaattttgaccgtgcttctgccattgatgatactagctcacggaactaaactttattggatgttggattagtaggtgaatgattccttttgcagtttctttctaagaagaatttgcaaatggcatcaagggtcaccctgtttgacagagttgcttctaatccctccaaataatgaagccagaattgactacacatttttattcttaggtaagaagctacttttaagatagcatcatagcagctaattactacaattttaagtttgaaccccttctaatccctaataatccaaggtagaacaaaaggccaaaaaatatacaatggctttattaaaaaaaaacagaaaatatgagaaattttaatgcaacaatctcactgtattaacaaatcatatttaagaaaagatagatatgaagttgatttagaaattattatgactatcataaatacttgaggatatttaaagataaactaataatgcagggcatttttaatagtttaccacaaagaccagtcatgtttgttccctttaaaatatgatttaatcaaaaagaagaataaaagtttctgttatgggttgagttgtgtcccccaaaaagataggttgaaatcctaaggcctagtacctgagaatgtggccttgtttggaaataggctgtttacagatgtaacaaagttaagatgaggtcatactgaattgggatggacctaatccaatgactggtacccttccatagaaagaggaaatttgatcacagagacacaggcacatggaagagaagccatggaaagatggaagcagatattggagcgacgcatacacaaaccaaggaacactgagaactgctggaagccaccagaagctagaagaaataattattttctataaccattgaaggtagcatggccctgctaacaccttgatttcagactctcagcctccagaactgtgaaagaataaatttctgttgttttaagccacccagtttacagtactttggtatggcagccctcaggaattaatacagatactccagcaaaattccaatggcaggacttctactttcaagccaaaatggaggaacaatgattttcctgcctgaaacaaataataaaactggacaaattatataaaacaacatttttcagacataggacatcaaactgcacagtatagtgattgcttagagtggggaaataagacaagacctacaattatcccagcttactgcttgaaaagaagatctaagctgtagcacaggcagggggaacccaggcagtctagcagtctccctgggttgatgagagctagttttttggtgaagcaagtatgtctagagataatgggcagagtgctggacaggaaagagctacacaaagagagctccagagatctgaaaagggcaccccttatgtcttcaactaagttctgttcagtacattcagatgaagaaattatcccaggctggggaaagaactgcctaaaaggagcagaagaaacagttcttgcgacatacaaagagctgggaatattttgtgttctcagcagccagagtggaaaacttcacaaattatggggcagcaagtgggatattcagaaaggttttgcctcagtcctggggacaaatcagccctaaattaaatgccactttggtctctacaaaacttaaaagtaagacttgaaagcattaaacagtttccaagtaactgtgttccaaaacaaaattcaagaatattttaaggaatataatatctagcacccgacaaggtagaattcacaatgtatgacatccactcaaaacttactagcatgcaaataagcagaaaaacatgatctataaaattaggagaaaaattaatcaatgtaaacagactcagaaatgacacacatgatagaattagtagataaagagattaagagttattattttaactatattccatatattgaaaaaggtcaaggaaagattaagcatgctaagtagcaacatggaagatattttaaaagacccaagtcaagcttctagagttaaaactacaatgtctagagctgggcgtgatggctcacgcctgtaatcccagcactttgggaggccaagttgggcagatcaaaaggtcaggagatcgaaaccatcctggtcaacatggtgaaaccccgtctctactaaaataccaaaaattagctgggcatggtggtatgcacctgtagtcccagctactcgggaggctgaggcaggggaaccgcttgaaccctggaggcggaagttgcagtaagctgagattgcaccattgagctccagcctggcaacagagcaagactccatctcaaaaacaaaacaaaacaaaacaaaacaaaactacaatgtctgagataaaaaaatatatataataaatgtgattaacagcagattatatacctcccataaaagattaatgaacttgagatatagcattagaaactttccatagtgaaaacagggaaaaagactaaaagtaaaaaacaaagagagttccagtgagttggtgaaaactttgaatgacctaatacatatgtaattggagtctttgaagtgcagagaggggtagtggtgaggccaaaacacatttgaaaaaataatagctgaaatttttgtttaaatttcgtgaaaaatttaaactcacagatccaagaacaccaagtgcaagaaacatgaagaaaactacacccaaggcacatcacaaattgcttaaaaatggtaataaagccaggtgcagtggttcatgcctgtaatcctagcactttgggaggccaaagaaggcagatcacttgaggttaggagttcgaaaccagcctggtcaacatggtgaaaccccatgtctactaaaaatacaaacaaatgagccaggcatggtggcgggtgcctgtaatcccagctactcaggaggctgaggcatgagaatcacccaggaggcagaggttgcagtgagccgagattgtgccactgcactccaccctgggcaacagagcaagactatgtcaaaaaaaaaaaaaggagaaattcttaaaagcagccaaagaaaagatacatcgtggccaggcgcagtggctcacgcctgtaattccagcactttgggaggccaaggcaggcggatcacgaggtcagtagtttgagaccagcctggccaacatggtgaaaccccatttctactgaaaatacaaaaaaaaaagattagttgagtgtggtggcacacacttatagtcccagctactcaggaggctgagacaggagaatcacttgtacccaggaggcagagtttgcagtgagccgagattgtgccactgtactccagcctaggcaatggaacgagactccgttaaaaaaaaaatgcataaagaagaacaaatttttgaatgtcagctgatttctcatcagaaacaacataagccagaagcagcagggctataatgcaatgaaagaaaatactgccaacctagaagtccaatatccagtaaaaatatcttccaaaaattaaggtgaatatacaaatgagtgcataaaacaacgggttaaaaccttattaaagtctgtagtctagttattagtattgctctcatgtcaatttcctggtttgatattgtactagtgataagatgccactcttggaggaagctgggtgaagggctcattagattgactctatgaactatttttgcgacttcctatgagcctatattatttcaaaataaaaagttgaaaaaaagaaaataaaaaaaagtttttcagatattcaaaagctaaaagaatccattgccagcacacctgctcaagaaacattaaaagaagtgcttcaggcagaagcaaaaataatacctaaacaaaggaataaggagcaccagaaatggtaaatataaaagacttttgtctcattttgtatatctttctaaagataattggatgtttaaggccaaaatattggctgggtgaggtggctcacgcctgtaatcccagcactttgggaggccaaggtgggtggatcacctgaggtcaagagttcgagaccaggctggccaacatggcaaaaccctgtgactactaaaaatacaaaaattagctgggtgtggtggcacgcgcctgttatcccagctactcgggaggctgagacaggagaatcacttgaacccagtaggcggaggttgcagtgagtcgagatcacaccattgcactccagcctgggcaacaagagcaaaactctgtctcaaaaaaaaaaacaaccaaaaaacaaaaaaccaacaacaaagagttatagttcatcagccaataaaaaaggaaatacaacagaataaaacaattcaatccccaaaaggaagaaaaggtagacagtattaaaaagtagagaatgggccatgtgaggtggcacatgcctgtaatcctaacactttgggaggtcaagatgggtggattgctccagcccaggagttcagcctgggcaatatagtgagagctcatttctacaaaaaattatctgggtgtggtggtgcacacctgtagtcccagctactcaggagactgatgtgggaggatggctcgagcctgggaggtgacagttgcagtgagccaagatcgcaccactgcactccagcctgggtgacagagcgagaccccatctcaaaaaaaaaaaaaaagaaaagaaagaaaaataaagtagtagagaatgtcacattgaataagaaagcaaaacccaaactataagaaacctaatttaaatataaagacacaagtaggttaaaagcaaaaggatttttcaaatagcatataaatactaatcaaaagaaaactagaatagggattagatttcagaacaaagaatattactagggataaagaaattgtattagattagttatggttctccaaaagaaacagaaccagaaaaatgtatgtatgtatatatgtgtgtgtgtgtgtacatgtgtgtacgtgtgtgtatgtgtagaagtagagagagatttattataaggaattggcttatgtgagtatggaggctgacaagccccaggatctgtagttggcatgctggagacctaggggagctgatggtgtagttccagcctgaaggccagcaggcttgaaacctatgaagaatcaatgtgtcagattgagactgaaggcagaagaaacctcccatctcagctcaaaggtaatcaggcaggaagaattacctcatacagaagagtcagtcttattgttctattcaggccttcagctgattggatgaggcccactcacatcagagagcaccatctgctttactcagtctactgattcaaatgttaacctcatccaaaaacacccacacagacacactcagaatgttcaaccaaacatctgggaccctgtagccctgtcaaatttaacacataaaattaaccatcaatgatatggtttggctctgtgtccccacccaaatctcatcttgtagcttccataattcccaggtgttgtgggagggacctggtgagagatgattgaatcatgggggcgggtatttcccgtgctattctcatgatagtgataggtctcacaagatccaatggttttaaaaatggggagtttctctgcacaagctctctttttgcttggtgccatccatgtaagatgtgacttgctcctttttgccttccactgtgattgtgaggcctctttagccatgtgggactgtaagtccaataaacttctttcttttttaaattgcccagtctcaggtatgtctttatcagcagcgtgaaaacagactaattatgaaatgaaagagtcatttcagaatcacagatgagtcaatttatccagaggatatagcaattctaaatgtttatccatctaacaacagaagttcaaaatacatcgagcaaaacctaacagaagtaaaaagaaaaatagacatattcataattgtagttggagatttcaatattcctctctcaattatccaaagaataggtagacaaaaaaatcaacactatcaaacaattttgcctaactgacatgtatggatcactccacccacaatagcagactagacattcttttcaagatggactatattctgggtcataaaaccagtctcaagaagtataaaagaattcaagttaaacacagtttattttctgaccacaataaaatgaagctagaaataaataacagaatcatacctggaaaatatccaaatatcctaaataacacacttctaaataacctgagtcaaaaaaaatcaaaaaggaaattagaaagtcttttaaacagattaaaaataaaaacatgtcaaaatatgtgggatgcagctgaagcaggagtagagggaaatttatagcattaagtgcttataatagagagaaaatgttttcaaccagtgacctcagcttccatattaagaaactagacaaataagagaaaattaaacccaaagcaaacaaaggaaaggaaataaagacagatggcatatcatgaacgacagtggaatcaaataaaacaatatcccaaaatgccactaaatgtaatggaatcctggagcactgtcattttacccaatatgctctcccttcttatccactgtgcccactgcctagggaagggcttcaaataatcaggctcacctttaacactatacaacagaaacctcgcatcatttcaagtaaggccaagaatataattcacacattcactagctatcattagaacaccagaaacacacgtttacccaaaaggctatgcacattaggaaccctagattgcttaccaaagggaagtgcaaagacatttaaaataaaaatatgcaattccttatgaatgagagttcataattaaaggatccttattaaaggatcctcaagtctttgctgatactatgtccaaagcataataaattatatccaagcagagaaaaacacagcttgcccttccaagctttatggaggaagctctggaagtctcaagagcagcaccatccagtgtgacaagaagacttcaccccagtgtggggcagtgttcaggcagggctcctaaagcagctcatgtatactgcacctttatgaagtcactcattatatacacactatttatgcaagctctcctctagactgtgtcatcctcaaagtcagggaccacatctgtcatctttgtatccccaaaccctagtatggtacgatcatttcacaaatgtgctttaaaaggcctgtgtgaactccccaagaatctactgagttgtaaataacacctgatgcgattgcctgaagactgaacagtaaacaaaacaagacttcagatccacattgaaaccaaagaacagaggcttatgtctcctttctgagttcaattagatttttaaaacattctttttaaagtcgatttgttttgtttccagtctacagtaaaagtttgagtgggtccaggttttatctgaagcagtctgcccattcttttcccatgatgttctggaggaaagcagactgctgatgactcacaactcagcacacttgttagttcctatgtactgacaccaaattgtgttccaaaagagaagcctttacaaaggatcaaaacctggccctaggatgtggttcatgttctaagctttccaacatggtgctaaattaactgcatttggttccaggtgggttaatgactaatagctggacaggtgatttcaggcagaaattgtctcaattctcactttctgtcactttagaagttttccctgagtttgtttccaaccccatcttcgtcctccacctccttctctggccccagctttcagggctgcagctcttggaaaaagcatttgcaggatggcccagctatgcacgctggccctttctagttgcttctcctgaactgggactcaaggacttctcctctattcaaaatagcagagcaatgaaagtgcaggaagcccagaggaaagaaaggtggagggagtctggatcagtggtgataacaagaaatgaatccacgagaatgtcctaattcacggttgctcttcagcttctcttgtttccacaacctagtcttgctaagtcagttcttccttatcactcgctataccccatgctcacagtgactgctgactttctctattcaccacagaatgtgaccctcccctcccaaaggctctccaggagcttcagatttaaaccaagctgacgctgatcacaaacatttggagggcacatctcagtttctggagagctgaaacaagacttcattcaatcctcccaataattcttgagatattattatttctgttttaccactgacgagactgagaccccgtgagattaggtggttaacctgagccgcaccatagcaagtgtaccctctgacccctgcattctttcttgctaccacgtggcctcaaagcctctacaaagagttcagcctttcttctcctgatgcctgatattttctatttttgtttctgagccttctctcccttgcttattccatacctttgatccttaacctcccttctccagcacacacactgtcacacacacacacacacacacacacacacacatctcagtgcacttatctaacaccttcttcatatagtcatctaacttccttctcaaagcagtcttccaggttacagcatagtactctagtgcagcctcagactgcccgtggcaactcccaaccattttttaaacacaaaataagaaaatcatacttccttagttatttttaattatactgcaccatttcctctggaatctgtcatctgtccctggaaaacagagattccatatgtctaaatcattctgcccagtgcctagcaaagaagcaaagataagtgcaggctatcaccatgcctgttctctgatcaaaccgatggtgacaggaatgttcacgtgatggcaatgatcccattcactttaatctgtacctccttttaaaagctagagtcatcagtggctcaaagacttcaaatcagtgcacctgaaagtgctaaggaatgtgtaaagggctggctctataaaggcgaagtggtggtaacaaaaaaaaaaagagagaaaaatggcaaacactcatacagggagtgaaaactcaaggaattaggactgtgtagcagaaatgtagaaagaggacggaacttggagtcagacaggcctggattagaatccttgtttggtcacattctaactgtctgatcctggacaagttgcttaacttctctgagccttcattccctaagcttagaaagatgtcaaaaagctcatctcagagggctctcctgaacatgaacctgtaaggcgtttggcccatggcggtgccctgtaaatgtcacttcccttctctttccccttctgaaagaaggatccataatgataagaattttcaatagcacccaaagggtcggtcccatctgtaatcaatgcattttaagaggctcacctgaaagttctcacttttagatgttttctaatctctcaggaatgtgcacattccttgcagttcccagcttcaaagggaatgtgtatgttagggaataactgtgcccaatccctctcatccataaaaatgtacacactaacaagacctcacatctttaaagggtgagactcagagttggacatcccttgtctgtactcccaaagctgcacggcttctagagctttaatccacagtattgtattatctgtttaagcatctgcatctcccctaggcagctagagccatgaagcaaagtccatatattattcctctttgcattgctgcctagcatgcagcatgccatacatgttatgtttattagaatgaactgaatcatctatcttctgggtctgcaatgctttagcatatagtctacactttctaattctcccaaagacattttccagagccttggaaattttaagcatacaatacatattgcctttgtccttttagaatgaactgtttataagctttttttttttttttttttttttttgtcttttgaaagccaaaacctaactacaaaagaaggggtaaatgatttcagagaagcacctggcactatgttttttctttattgctataaccttgggcaacccccaccccacccaacattcaatgctcagggacaccttgcgtaaggcacatgcagggtgcgcttggcaggggcctggagggctccgtgcttagtaactctgttgtgaggataaccacaggctgtgggaggtagcagctctgcctgcctcaggtaacaaaattgatggtgatgactaagttacagtagacggatctctcaatctctgagaagttccacctctgttctgacacatctctttcttttttcctcccagaggaaatagaaacaagctcaggcaagggccctaaggagagaaccctttttcattgtttaacttgtttattatcagactctcattaagaaactgtgggccacagttactgaaaacacaagctaaagacacatttagaacaatatttaagtgacagattcacagtcagttgttaaggggaagtcaagaagttgcaggcaacttcctgaactttaaggcagatttcatgaaggacaaataccatgctctccccgaaaggaatggtctttgaaacaggtattctgctctaccttaacaaccctgcccccttgcaccaattactgacatctagcaaagcttcaattttctcatctttttaatggaaataaaatattcatcctacagagttgtttataaagatctgatgagattgtgtatactaaccatttagccaatgggaggcaaagcccaggccccatagatgcttccaactattcctatgtctcccaagtgctaaggccaagtgtcagccggcactaacgctcaggcatggcattttttacctctctgattcctggggcacttgagtgtaccactcctgagctggtgcaatcctatcatctcatagatgaggaaaccaaagcaaaacatcacatggctcaccactgcctgtaggcaaagtcccagtgccatgagaggtaagcccatttgagtggttttttagatagtcactggtgtctcagtgcagccagaatacctggctggatggatccttttaatcatatcatctatataccatataccaaagaattttattgattttataactagagttctaaagaatagaaagtattctctagagaataagactagctcattctatgttaattgcagtgaaagtaaagataatgatggtgcttggcagtaggaataattgtaattaagcacttactatgtgccaggcatcaggctgagcagtaaatatgtcttatgtcttctttcacatagtaagtccaactgcttgaatactcccttacactcaatccccaagacttgcaaaaatttgtcacaaataaatcacttcaatctctctgtagaatctgtgtgctcatctactgtgcccagagcaaatcctttctaaattctggatgtgctacgtgtgatgttagtggttggttaagagacaggtatctccagaaataaaacacgaaaggcagaggttaattgctgattctctcaatctggagccaagccatttgataatgacttacaattattatatttcatattgctcaatcatctctagaagatggattgcagggtgtggtgggagaggtgccttccagtcctttccaataaaatgtttctgtgttatcacaaaacaagaagttctgtaaggtaagggagttaggaatgctggcttcctgtggatagatgccaagtggagaaaataaacagataagagttcccacgggatatggatgccctaaaaaagtgtttcctatcatattgccaaggcaatgccagctgcttacatcatcaattcagggggacaggaaggagggagacagagtagtggctggagagtggatgaagtagaaaatttgtaaaaagccaattccaattttcttaataggttataaattcctacaaccaagaggtaagtagcagccctgactcttaaacaaaataaagtctagtcaacttgacaattaaatggagcccagggtgctgttccctacaatttcacaggtggctgggagttatagaatgctggagcaagacagattcttagagatattcagtccagagatcacaaatggcacccacagacattgtcttcttgggttttccaaggattagtctagatggcattttaacattgtaattaattgccaacattttaaaattttgaagacttcacataaaaattcagatctctagtatctctttttaaaatgagaaaatatgcaaacagtgaacctacattttcacctagtaaccattcagcctctcatagatggttccagtgtccccatggttcccaaggccaaggccaaatatcagccagcactaatcctgagtcatggcatggtgttacctggctgaatcctgcaggcacttgagtgtgtgtcctctgagctaggagaatcctgttatcttatagacaaggaaacctaggcaaaaagctcacatggctcactctgcaaagttccaatgccatgacagcaaggccattcgcagatggtcccaactgacatctcttgccagttttcagaaggaatcctatggtccagtgcatcagactgattgttatgcccagtcaaggccttgttcccttcctctcaaatgtcctgccctgctatcaaactcctgttcatcctttcagccccagattagtcgttccccctaactcctctcaggcagtgaagtatccacacagcatttatgtacccacttctgcaatatgccttacagtcctgcgggggacgttcaatattaaaatcctctttctcatgtcaccagtacctagcactatgccatgacacatcacaagctctgaataaatctgggattcagggaagggtaaatacattgtcctcaaatatatgggtaattagtccaggcgctatggctcatgcctgtaatcccagcactttgggaggccgaggcgggtggatcacttgaggccagaaattcgagaccagcctggccaacatggtgaaaacccatctctctctctctctctatatatatatatatgtaattaattataacatagttggggagaaaacgggttaaaaacagacggggagcctggtgcagtggctcacacctgcaatctcagcacttggggaggccgagatgggcagatcgcttgagcccaggagtttaaaaccagcctgagcaacatggggagaccccatctctacaaaaattagctgggtgtggtggcatgagcctgtagtcccagctactcaggaggctaaggcgggtggatggcttgagcccaggaggtcaaggctatggtgagcctagatcatgccactgcactctagcctgggtgacagaaccagaccatgttacaaaaaaacaaaacaaaacaaaacaaaacaaaaccaacaacaaaaacagactgggtccacagtgaacacccagactgatgaaccatcaagtaagtgatgctgaaacctttatctcaatgacaaattcaactcctaccaggccaagccttattccagaagtagggattgcctgaacaatgtggcttatgaggtgtcaaaagaaccccagaggtcctaaacatcttccccaccagcctgccaaggtgcttaaagaccactctatatatgtatctgcattaagaccttttctgttaaaatacaacactccttttctccctccttcctaagagccagtacattacgcaattctcaggggttagcacagcttcaggtaatttatcaactattttttatatctgatgcatttcacctagactatttgggtaagctgtgatagagttaaataaaggtaaatttccaggagaagaggatgggcctgaatgtctgaggtaagagatagagagtaggcagtatagcacagtagttaagtgtgagaccttatgatctgggcccaaatccagtttcgctgctggctaggtgagtgaccttggctagtcacttaccttccatgcctccatttcttcatttagatagaaaatggtgttactcaggaaagggaacatcacacactggggcctgttgtggggtcaggggagaggggagggatagcattaggagatatacctaatgttaaatgatgagttaatgggtgcagcacactaacatggcacatgtatacatatgtaacaaacctgcacgttgtgcacatgtaccctaaaacttaaagtataataaaaataaataaataaaatttaaaaaaaaagaaaaaaaaaagaaaatggtgttaccaagatgacctgcttcaatggggcatctgagaattaaacaaatcaatatatagaaggcatttaaaatgatgcccaacctatgtgaaccctatataatgtgttaatttctgactaatttattagaggggatgacatgagatttggccctgaaaggagctgctctggctttactacttgctgcctcctttcccaatttactgagaagcaggcaaggtcccgagaggatgagcagcgtccccaaggccacagcctactgatggcagagccaggacttcctatccagggctccccacacgcggaacttctcgaggaggaagaggggaaggggtcgtgggaggccaggagaaaccgagagccagctttaccatgtgtcccttctggggataatggaatccaggcccttcggggcttttccccagagctggctacacgtcccgctctcgggtgcgcttggtgtccacgcaaacgccatcctccgaacatccccccgcccacacacacacatacacacacagccccacacccttgcgccggacgcaccctctacgtctggcacagcacggcaactcgctgccccgctgggaggactagtcaacaggggggcggacgggaaaagtgacacaactgggccgcggcgccctccgcgccagcctcccacgcagcgcagggcggacttcggccctcagaggggtgaggactggggccaaactgcccgggtctaccccgccgcccgcaacgctccggggtcccgcgcggagggaggcctgggcgcgggccgccgcggcgcacttttcaggaacgcggcggccgcaagcctgccaggccgggtcgcaggacagccgccgccgccgccaccgccaccgccaccgccccccgaagctagatgacggagtcttgaaagactttcaccaaatatgggccggggctggaaacgtcctgcgccgcgcgccgccggaaacctcgattcttggcaaccgcggtgactgtgggcgcgcgggcggggtggccggcagggggcggcggtagcagccgggcaggcgcgtccggatgcctcgcgtcccgcaccctctcgcggtgcggaccctctccgctccctccgcaggggtcccggagccgaccgccctctccgcgcgtcggccacccagttcctgccgcagccaccaggatcctggcttcctggggctctcctggctgtcaagccaaggggatgggggcggggaaatggtagaggagagaaatgggatggtacgggggcgccaccttaaagccggtcttttgcagacaccattaagttctgttcattaaggtggctttgaagagtggagttgtgaggttgggtgtgcagccgaggatctatgaagacacacacacacacccctactacaggcactccggtcgtccagggcagtggtgctcagggtgtgatctccggaccagcagcatcaacatcacctggggacttgttagaaatgtaactaatcagaaactctggggtgggaacccagagaaccattcattaactagccctccaggcgactcggatgcacgctagtctgagagccttcctagggctaggaaactggagtcgccagatttaccgttattattctcggttgccgccagacagtgagcccttcattaggtaacctaaaattccctggcagcagcggttgagagacgtccccatctctcagcccgaagccaggagctgcagaagacaagtagccccttctccgtggattgcaatccaaggcagcccaaggaaacaaggcagtccgttatttcctcctggggcacccgtatggggagggtgaaggagaaactagcaaaagagccatacagaattagcacccgaagcaacacttacccataaacatttgcacatttcgcctcctgtccgtcaacttggactgatctgcggctcccagcggaggcggcgagaaggcgacgggaggctggggtttctggacggtctttgggcaggacttgaggagccgctgtttctcttgcctaatgtcgtcgattactagcaggcgcaacagcacatggtatatggagaggctgtgcacataggttactctagtgtctcccgctcccacacctcctggccctgttgctccagcttcccacccccatcccacaacacaccccctgctttaaatgggcagctgacggtaaggttctctaaatttctcttctggggcaaactcatcctcaagattccccagttgaagtccagaaacaaacccacacacccttgttaaaaaaactttaatgtgattttaaaggaatctctggaatggcgtgtgtttgaacgcagtgcggcagactggatctctgccgtcccccatccccaacctccaattaaggtatatacggccagttggatgatccactgtgcttttattttaaatcatgatggacagattgcgtgaaaaacaaggaattccaaagaatttcctgctctgggaagagaagttaaatctatatttaacaacatttgaagctgtcaagaatgctttgtggttggataacagaggcagaaaaatgttaaaaacgcaggctactgctatacccaaatatggaaatattgttacgtctggtgtctgattcaccatctggaaatacttacaaccatgaagtcaaatagaaaagacgccacaacagaagccaggaaccctcctctccattctctctctagttcaaccagtactgtccctgcacccctcctcccccctcccgccccccgtcacttcattaagaaggaaacaataatgaaatgataaggcaggaaaaacagtgttttgtaaataataattgatgtattaacctgtgtacgtgttgggcccacactttcctcactgtatttgcataacacctgacaatccattgtcttgaaaagtctcccacccctaaccctctaacagagctttagagatcccactccctctagcaaatgctgcttccatttatgaaagggcactttggaatgaatgaaactgaactccttcctgcaagaattctcttcactggagtgtgttttcatcctgacagattctcattgtgcttatcaggaaagtcagcattagcactaagggccttttcaagcaagactgctaaattatgaagtctgaatagccttaaacattaaaaaggataagtagttatcctagagcatatgagtcttacatgataatttttattaaaattatgcaaaaagtttttgaaacttgcagggaaagtttatcaatcacactaatggtattggtgatgttcaagtaaattgtcttgtggtggggtcttctactgagtgtgttgcaagtagaacgggatcttaaaatctgctgacatttttactgcaaaatattacatcctaaatctcttttctgtacttggagagaagggcattgcaattcatttaaaatgggaggcttccagtggtccctaggaaaggagttaaaaaccccacaaaatgtccagcttgaaggagtctgcttttcccagagattcatagggcacaatggtcctggaatctggtttggccttgcggtctttgcaggtgatgatttcaggccactccacggtggtctcctgcacttctggctggctgcttggttagcatagcctcctgcccgcggagggaggcgggaagggcttaccccgtctcctgcatccgtgaggaagtataagtcagcctcccggagaactccccgcgttcgtttcctctcggacttccaacccaggcagtgggctggaactaaagtgggaacctccaaaaacaaacaagtacaacatacccaaaagagggaagggctggaggagtgggggagacctctgcctgggaatttgccagacgatgggcaagtttccccccgccccaccccccccccgccttttcattcataaatgccactgtgggtattaatttgcaattcactgaactttgctaataaacatcatgccaaagctttgggacttgttccgaacacgcctctttgaagtccacaaatattcctgactcagagacacactcctcttccccgttctactctttcaacagataacttgcctctcaccttcgctgtaaaaaagcaaacagctcactgccttcccgggtgagggcttcagtggctgcccggtcaactcgcatcaccaaacaaaacgacttttgttcctccctctcaggtcctcccacccacccagtccaggcaaagttctgaactggcccccctcgcccctcacgaccctccaactaccatcaccaccatcacgccccaaagaacccttcccaacataagtcgtaatttaaggtggaaaaaacgaactgttttcttgacgggtctgggacacacacacacacacacacacacacacacacaccccccgaactgttttcttgacgggtctgggagacagacacacacacagacacacacacacacacacacacacacacacacacacacacacacacacacacacaaaggtgcaatggagccaggggaggcgcttggcagcagcccgcgccaaccagcattcctgagatgtttgagaattctggaacgcgcagacagagccgacgtcactgcaacacgcggcgcctccgccggcccgtataaaaggcgggctccggggcgcctgggcagaccgcgagcgagagcgcccccgagcagcgcccgcgccctccgcgccttctccgccgggacctcgagcgaaagacgcccgcccgccgcccagccctcgcctccctgcccaccgggcccaccgcgccgccaccccgaccccgctgcgcacggcctgtccgctgcacaccagcttgttggcgtcttcgtcgccgcgctcgccccgggctactcctgcgcgccacaatgagctcccgcatcgccagggcgctcgccttagtcgtcacccttctccacttgaccaggctggtgagttggactctccttttgccacctattccccgtccgctctccagccccttcccctggtcccagattgcccacggcaggaaaagttaaaaagttcgcgatcgtttgcgggtagccgtttctttaagcactctccccctccccccgaagacgtgtcgggacctcttggtgggagcagccttccgaggtggccgggctggacgagatcagaggctccccgtcgatagggtcggagacccccgtccctcactgcggcagccgcggcgcccctcctgcgcaccgcgccgagtctcacgcgtatcttctcccccttccaggcgctctccacctgccccgctgcctgccactgccccctggaggcgcccaagtgcgcgccgggagtcgggctggtccgggacggctgcggctgctgtaaggtctgcgccaagcagctcaacgaggactgcagcaaaacgcagccctgcgaccacaccaaggggctggaatgcaacttcggcgccagctccaccgctctgaaggggatctgcagaggtaagatgcttgtggtttggcccctttaaaaaaaatactagtccccatagtccagaagtttagtaattctgagaccatgtatggtgatgctttgttgttggtagcttggcagaaaggcacatgatttcagcagtctggaatgcaattcagtgtgtctgggcccaacgaaagcgcatacggaaaagtgattcctgactaacttattgttctggtctggagtctccggggaattgtagggaactttaccataaattgaatttaacagcagaaaatatgtatgagtttcaggcggtggtttggaatcttaactttatccccttctacctttctcttttggtgatctttgcagctcagtcagagggcagaccctgtgaatataactccagaatctaccaaaacggggaaagtttccagcccaactgtaaacatcagtgcacatgtattgatggcgccgtgggctgcattcctctgtgtccccaagaactatctctccccaacttgggctgtcccaaccctcggctggtcaaagttaccgggcagtgctgcgaggagtgggtctgtgacgaggatagtatcaaggaccccatggaggaccaggacggcctccttggcaaggagctgggattcgatgcctccgaggtggagttgacgagaaacaatgaattgattgcagttggaaaaggcagctcactgaagcggctccctggtaagtggagactgagcacttcagacactgtactgagatgcatttctggtctaaatctttgtagaaatgagtgcttgagcctgtttgtgtcggtatgcctctgagaagtcttccctcttatatgtctctagtttttggaatggagcctcgcatcctatacaaccctttacaaggccagaaatgtattgttcaaacaacttcatggtcccagtgctcaaagacctgtggaactggtatctccacacgagttaccaatgacaaccctgagtgccgccttgtgaaagaaacccggatttgtgaggtgcggccttgtggacagccagtgtacagcagcctgaaagtaagttccttcagggacgtgtagactgttgcctggcaggtgggtgggatgtgaacatctttttgaagaaagagaaatatcacccctaactttccttctctcctttctcttacagaagggcaagaaatgcagcaagaccaagaaatcccccgaaccagtcaggtttacttacgctggatgtttgagtgtgaagaaataccggcccaagtactgcggttcctgcgtggacggccgatgctgcacgccccagctgaccaggactgtgaagatgcggttccgctgcgaagatggggagacattttccaagaacgtcatgatgatccagtcctgcaaatgcaactacaactgcccgcatgccaatgaagcagcgtttcccttctacaggctgttcaatgacattcacaaatttagggactaaatgctacctgggtttccagggcacacctagacaaacaagggagaagagtgtcagaatcagaatcatggagaaaatgggcgggggtggtgtgggtgatgggactcattgtagaaaggaagccttgctcattcttgaggagcattaaggtatttcgaaactgccaagggtgctggtgcggatggacactaatgcagccacgattggagaatactttgcttcatagtattggagcacatgttactgcttcattttggagcttgtggagttgatgactttctgttttctgtttgtaaattatttgctaagcatattttctctaggcttttttccttttggggttctacagtcgtaaaagagataataagattagttggacagtttaaagcttttattcgtcctttgacaaaagtaaatgggagggcattccatcccttcctgaagggggacactccatgagtgtctgtgagaggcagctatctgcactctaaactgcaaacagaaatcaggtgttttaagactgaatgttttatttatcaaaatgtagcttttggggagggaggggaaatgtaatactggaataatttgtaaatgattttaattttatattcagtgaaaagattttatttatggaattaaccatttaataaagaaatatttacctaatatctgagtgtatgccattcggtatttttagaggtgctccaaagtcattaggaacaacctagctcacgtactcaattattcaaacaggacttattgggatacagcagtgaattaagctattaaaataagataatgattgcttttataccttcagtagagaaaagtctttgcatataaagtaatgtttaaaaaacatgtattgaacacgacattgtatgaagcacaataaagattctgaagctaaatttgtgatttaagaaaacagcgcttcatgttcatcagaatataaagcctaagggtctccatcactctgtgagatggctataataatttattattttaatcaccaggttagtgggcatgccactttagtagagtagagaaaccctttaatgaaaaggggtagtccataactcaggctgcccacatccagacccatgggcaagattgaatataattaatgtattctaaagacttgcttgtttataactttatattttcccaataccgttcctaaaaattagaactacttagaaatttacccttggctgttatgaggaaaaatctgagtctataggagtcagtttgttttcactaaatgagcttgaagcatgacttgtgttaatcctaataagccggtgattaggtaaacatgctgttaaatgcaaaggaatgcaaggaatttcaactacttttccaatagcgtgagggccaagctaccccatccccctttcctttttataatatacgttatattgatgggggagggagcagttatatagagttggctattcagaaggtcaaaggtccagagcattcctaaaagaaagggacccaaatcataggtctaggagaggttgagaaggctgtgtcaatgtttgtgaaaatgtcagtagtctgtttcagaagcatcttcatctttagaaagcgctgacaataaaccttttatagggagaagttttcctttcatcatcactgttggctcctgttcaaatccatagtgaaatatttcagtccgcacttagttaagagagtacttgagtttttaggcagaagagaaagtgcttttaaaaggaatggaggaggacagctcctgggatcctgaagggatttttccaagtagattaaataagatccatactttaatgaagacccacagaaaaatactgcctaagaaatggttttaaagccttatggaaatgcatagaggttaatataaatgcactagtaaaatctatggccaaaagccttcacttctgattttgacttgcctgaaatattacagcttgtgccttctgaatagtcaggtttcttgcctgagacattcaaatgttaaggtatttgagaatttaaacatcagctggcccagtcgtggatgcagttaaacttgtcagtgcaatgtaacgtgtgaaacataataaaggtgtgaggcttttgtggtgcaatcttgttgaacagacatctaaatccataggcaagatttacacattcccaagcatcaaccctgaagtattgctctccaacactggagtccaacaaattgcttcttatgcagagatcaaggagcaatattttacagatcctttcagtgtgcagggaagtagtatttgtccaaataagctcaaatgtgaaacagaacctagtatgggaaaacactgaatctttgggttattaatttcatcctagtaaatataatgagggtgattgaaagtgccaattccatttacaataagtgtgttcaattaataaagaagatgaatacaagcaaattatgtcttttgtttagctatagaaaaacctgaagaaattaaaagtagtggagaataaaattatgatatttagaacacgtaagttttacctacatccagaatggagctctgcccactttaaatattgagaaaacaaaccaaaaattatgcatctgcatatatgaaatagaagttacatatagaaatattcattataatatatatgtaccttcccatgcacagtaaagaccttgggttgttcttgcttttcaatccaaaagatcctggtggtcttgagctattttttggtagagattttagaactgagagagtgatctcagaatcttaggcattccacgaattttaagaaatactctatgggacattgagcagcacagcaagtagtctcactatgactattttttcatatgaacatatgtgttgtctgctccacaaagagatgcaactgagtcaaaattagcaaagcatattttagagttatgttttccaacagagggaacagacttggtttgttcacaacctcttcttgcagccttctggcactacttgaaagtcagttgagcaatagcagtggttcagtatgaccacagtacagagcaaagctatgctctgggcagaatggcaggtgatacagtggaaagaatcccatggaatcatgtcttttagcaccagctctgccatgaattcactaggtgactctgggcaagtttctgtttcactccctcatgttaaagtaggaaaatagctttcagcatttttgtcaccccaaaaaccctttctcatacacccacttcggtacattggctctcataccttaaaacttttatctcctcaagtaaccacatgtgtgaactgaaaactgctcaaggctttctgtcatcaaatgcacttgtttccatgaagcgtttgaaaatgtattgtggctagaccccttcccccccctttactttctaaagcacccttggttagaggacacagcaattcctggatctcagagtctacaggtccatactttaacctcactgtatagccctatccaggcctcattaactccttgccctacacaactgatgctttaaaacaaagcatattctgaaacatgacaatgatccatttgtcctacaaatagattagatatagctgtgactttctccattggtggtgggcaatattcatccatgtaatcttataaactacaattaataaatactcagatgcatttgttactgctttgctgtttccatatattctgttcatatattctgaatctacccctttctcatctccagagcaaacctctagatgagaccaccatcatcccttgtctgaattaccagaatggcctcctcatttatagcatattgtattttccaaaggtggctgcagcaatatctcccactccatgtgcccttctgcaatgtgcctctgttgctcccccattaatgggggggtctatttctccaccctcttggatgtgggtgagctcttgacctgtgaatgtggaggaagcaatgcaatgtggtacaagttccacatgcagtactggctaggagttcctccatcttttctcttagaaatgagcttccatgtaagaagtacaactactctgagaccagcagactgtgagaagctgaagccacatggataggccttagagaatgagttgccatgtggagaaagagaaaggaccaggagcacttgggcattacacctgtccatgaagaaaccatcttggaagtgaatcctccagcctcagccaccccagctgatgtcttgtgaatcagagatgagctgcccagctgagtccttcccatagttcctgacccacgaaatagtgggcaaaccaatacggtaattataaagaaataagttttgggtttgtttgttacatagcaatagataaccaaaatatcattggtttccattcttccccttttacatttttaaactgactctttaaaaatgtaaatcggactatatggacccttgggttaaaggctccaatggtgtcccactgctgtcaaagtagagatttagcttcttacttggcacccaggtcctggaccctgcctacttcttaccattcaccctcattcactatacttccacttgccttttcttcttctttgaaaaagccaagcaatttcccctgcagggcctttgcactagcgttcctctgcctcaaatgccccttcccctgacctaggcttcttcttggcatgtaggtctcagcacaaatgctaccttcttagcaacctttcttcaccacccagtctaaattattaatagttccttacaccaagaagttttttaaggggcagagcaaaaaggtggaataaaaatccccaacaatcatccccactgcaggaacaccaaatttaacaactacctacacaaaaaagaacctttacaagaaccagaattcagatgagcactcacaaccagtttctaacttcatatcgttgaaagaggcactgaagagtgtaggaaagacagtcttgaatcactgccaccacccctcccccattctctggcagcagccacatggtgcagagaatctgtgctcttgggagagggagactacagcaactaggagactgcctggaacgcagtgctgccctgtcacagcagagatgcccacctatggaggtagcattcagacctgtcctagccagaggagaatcacccatcccagtggtaagagctggagttctggcaagccttaccaccatgggctgaagtgccttggggacgtaaataaacttaaaaggcagtctcggctgtaaggactgcaagtcctggcactgagctgggctcagagcaggtggattttaagggcatgtgacttactgagataccagttggggcagctaagggagagcttgcatcacccttcccccaaacccaggcagcacagcttgcggctccaaaagagacccctacctcccacttgaggagaagagagggaagaataaggaggactttgtcttgcatcttggataccagctcagccacagtgggatagggcacaggtcacagttgtgaggcccctattccaagttctagcttgccaaccacatttctagacacatgttgggccagaagggaacctgctaccttcaagataaggactcggagctggcaagaactgttacctgctgactaaagagcccccgggccctgaataaccagcagtgatacccagatagaatgctgtgggccttgggtgagactttgagatgtgatgacttcaggtaagactcagcacatttccagctattgtgactatgatgagagactccttctgcttgagaaaaacagatgaaaaagcaaaggggaccttgtattgcatcacaggtaccagctcagccacagtggagtataataccaagaggggtcttggggccccaattccaggccttgggtcttgaatggcacttctggacctgccctgggccagagaagagcccactggcctgaaaggtgaatcccaggcctggcaccattcaccactagctgactgaagagcccttaggcctgagaagaatatcagtggtagcttggcaatactcctcttgggtccgtggtggtggtggctacagggtgaggctcctcttcctctgaaaaggggatggaagagtgggaaggactgtgtctcatggtttgagtgctagcttaggcactgtagtgtaaagcaccagatagacttctaaggttgttgactcgagtccctggatcctggatggcatctctggaccttcccagggcctgggggaacttgctgccctgaagggaaggacacaaacctggctgctttaccacctgctgattgtagagccctagggctttgactcaacacagatggtactaggtagtggttacagggggccttgggtgagacccagtgctgtgttgtcttcaagtctgacctggcacagctccagaggtggtggctgcaggggtgtttgtgtcaccctaccccccaagccccaggtggctcagcacacacagagagagactccatttgtttgggagaaagtaagggaagataacaaaagtctctgcctagtaacccagagaattatctggatcttatccaagaccaacaaggtggtacctctatgagcctgcaagaaccacagcattcttggggttggggtgccccctaatacagatatggcttagatcacaacacccaagtccttttgaatacctggaaagccttcccaagaaggataggtgcaaacaagcacagactgtgaagagtacaacaaatacccaactcttcaatgctcagacaaagctgaacatccacaagcatcaagaccatccaggaaaatatgacctcaccaaacaaactaaataagtcaccagggaccaatgctggagaaacagagatatgtgacctttcagacagaaaattcaaaatagctgttttgaggaaattcaaaataacacaaaaaagaaattcagaattctattaagtaaatttagcaaagagattgaaataattaaaaagaatcaagcagaagttctggagttgaaaaatgcaattggtatactaaagaatgtgtcagagtctcttaatagcagaattgatcaagcagaagaaagaattagtgagtttgaagatatgtgatatggtttgggtctgtgtccccacccaaatctcatcttgtagttcccataattcccatgtgttgtgggagggacttggtgggagttaactgaatcagggggtgggtctttcccatgctgttcttgtgatagtaagtttcatgagatctaatggttttaaaaatgggagtttccctgcacaaactctcttctcttgtctgccaccatctgagacatgactttcaccttccaccatgattgaggcctccccagccatgtggaactgtaagtccattaaacctctttcttttgcaaattgcccagtctcaggtatgtctttatcagcagcattaaaacaggctaatacaatatgctatttgaaaatacacagtcagagaagacaaagaaaaaagaataaaaaagaatggagcatgcctacaagatctagaaaatagcatcaaaagggcaaacctaagatttatcagccttaaagaggaagtatggaaagagataggctagaaagtttattcaaagggataataacagagaacttcctaatcctagagaaagatatcaatattcaagtacaagaaggttatagaatgacaagcagatttaacctaaagattacctcaaggcatttaagaatcaaactcccaaacgtcaaggataaagaaagaatcctaaaggtagcaagagaaaagaaacaaataacataaaatggaggtccaatatgctgggcaacagacttttcagtgcaaaccttacaggtcaggagagagtggcatgacatatttcaagtgctgaagagaaaaaacttttaccctagaatagtatatctggtgaaaatattcttcaaacgtgaaggaaaaatactttcccagacaattaaaagctgagggatttcatcacaacagacctatcctacaagaaatgttaaagggagtacttcaatcagaaagaaaaggatgttcatgagtaataagacatcatctgaaggtacaaaactcactgagaatagtaagtacacggaaaaacacagactattataacggtttaactgtggtgtgtaaactactcttatgttaagtagaaagaataaaagatgagctaatcaaaaataataactaggccaggcatgatggctcatgcctgtaatcctagcactttgggaggctgaggcaggtggatcacctgaggtcaggagttcaagaccagcctgaccaacatggtgacaccctgtctctactaaaaatacaaaaattagccaggcgggattgcttatgcctgtagccccaggtactcgagaggctgagacaggagaattgcttgaatctgggaggtgaaggttgcagtgagccgagatcacatcagtgcactgcagcctgggtaacagagtgagattccatctcaaataaataaataaataaataaataaataaataaataataataataataataactacaacaacttttcaagacacagtacaataaaatataaatggaaacaacaaaaagccttgaagttgaagtgtagcgtttttattagttttatttttgcttgtttgtttatataagcagtgctaagttgttatcagcttaaaataatgggttataggatagtatttgcagacctcatggtaatcggaggtcaaaaaacatgtaatagatacacatagaataagaagcaagaaattaaatcataccatcagacaaaattatcttcactaaaaggaaagaaggaatagaagatgacaaaacaaccaaaaaacaaattacaaaatagcaagagtaagggcttacttatcaataataacagtgaatataaatggactaaattattcaataaaaagacataaagtgactaaatgaataaaaaaaaccaagacccaaggagctgttgcctacaagaaacacacttcacctataaagacacaagtagactgaaaataaaggaatggaaaaagttatttgatgccaatggaaaccaaaaaagaatacctatacttatatcagacaaaatagatttcaagacaaaaactataagaagagacaaagaaggtcattcaataataataaaggggtcaattcagcaagagaatatattataacaattgtcaacatatatgcacccaacactggaccacccagatatataaagccaatattattagggctaaagaatgaaaatacatgatgatctcactccaactggaactctctcactgattacttgataacaataaaatatctgatattctgcaaaaaacaaacaaacaaaaaacaaaaacaaaacaaacaaaaaaagaatgaaatagatcttaatacaataaatgttagagacttcaacactccactttcagcattgaacagatctcccagagacaaaatcaacaaagaaacattggactttctccactacagaccaaatggacctaataaatatttataccccaaagaaaggaaatcatatattcatttccatgtttattacagcactgttcataatagccaagatttggaagcaacctaagtgtccatcaacagatgaatgtatcaaggaaaaaagtggtacatatacacaatgaagttctattcagtcataagaaagaatgagattctgtcatttgcaacaacatggatggaacggaaggttattatgttaagcaaaataagccaggcacaggaagtcaaactttgcatgttcttgcttatttctggaagctaaaatttaaagcaattgaactcatggagatagagagtagaaggatggttaccagagtttggaaagggtattggagggttgaggaggaagtggggatggttaacaggtacaaaaaaatagaacaaataagacctagtatttgctagcacaacagggtgactatagtaaaaaataatttaattatacattttaaaataactaagagtataattggattatttgtaacacaaaggataaatgcttgaggtaatgaatacttaatttaccctgatatgattattatgcattgcatgcctgtatcaaaatatctcttgtagtccataaatatatataccttccatgtacccacaaaaattgaaaataaatttaaaaagttttatgttcctcgtagcacttagcactatctgatattttcttgtttatttattacatctctcccttcaagaatgggagcagaagtttccctggacaacatggtgaaaccctgtccctactaaaaatacaaaaattagctgagtatggtggcacgtgcctgtaatcctagctacttgggaggctgaggtacgagaatcgcttgaacccagcaggtggaggttgcaatgagccaagatcgcaccactgcactccagcctggtgacagagcaagactctgcctcaaaaaaaaagaaaaaagaaaagaaaagaaaaattgctttacactgtgcccagcataaagtagatgctcactaatttatagaacatatgttgtcttatgctgaagctaaattagaaggcacccactcacgggcacaacgctttccttctacttcaccttggacttttttctagccaactgctaaccattctttcatttttttcttgctttcatacatccagtcactagacacttatctggtacctctatatttcaggcatagggctatgcagtagttaaagaagcaccacagttcctttactttgtggtaagggaggcatatctgtaagcaaaattgagttaagattaggttcagctataagtaacagaaaatccaaatcataatggcttaagaggtgggcatggtggctcatgactgtaatcccaacaatttgggaggctgaggcaggaggattgtttgaggccaaaatagcctctgctattttgttgcttcaccatgcacggcctctgttccctagtttgcctcatggcacatggcctcgcttagctgcagggaagggtaggaaatgtagtttttactctaggttgctatgtacttacgtgaaaattagagctcctgatactacagaagggagaacaggtattgggggacacctagcagtctatactacatagccaaaaatattctgtaacaaatctaatgagcacagaggaggctggaggagagttaccaactgcctggttctgggatcaaagagagcttcctggaggagttgtcacttcagctgttttttaaagataaatagattggaaactatttaaaagccttggttaacaggttgaaaatttctgaaataaccagtgatactttccccatttcagccataaagagaaatcaaagacagctgtgccacctgggtttggagtcaaaggccatttgtatttgaaatagtttgtgtttttgctttaggtttagaaatatcatgacaggtgtacctgtattagggttctctggagaaacagaagagagagattttaaggaattggcttatgcagttgtgggggctggcaagtccaaaatccttggggtaagccagcaggctggaattcaggttggagttaaatctgcagatcaggccaggtggactggaagctcaggcatggtttctatggtgtaatcttgaagtcaaattctttcttctttggaaaacctcagtctttgctcttaatgccttcaattgaatacatgatggccaccctactatggcaggatgctttgctttattcaaagtctactgattcaaatgttaattacatgtgaaaaatactatcacaacaatatctagactggtgtttggccaaacaaatgggcaccatagcctagtcaagttgacatataaaattaaccatcaaagtacacatctagtggaacattttcagaggcagaaattcttgcccactctctaaactagaatgaattttagcagagtcagaaaagcagaagttttgctgaattatacctagtgttccccagccttgtcattgtgcccacagaagtgtggggaagggctccagcatatattttgcattaactagattcaggggatacctcaaaaaggctcctgggccactgacctcaagcttcatgcagaacagcaagatctagccacctctcagtcaggatggctatggggtggaagactgtagggagagcctcctaagagctctagagaagggccctctccaaatctgcatggacatggcaggccacagcccagcacttgcacaattagtgaacctttctctgtcctttcatacaaatctccattgtagcaatgatatcgccccactgtgattgtctgcttaactgtttccccaccagattttaaactccctgaagttttgtcaatgagtgagtaccaagtaagaatagattgaaaggaatttgagagctatcttacagcacctccagatctcctttggagaagagagaacaagtttgttctacattgccccagggcagaggtccaaggctagtggtcccactagaatctgacaaatagacatgttttgttcagcatacatggcatttataaaactggattgggctgggcacagtggctcatgcctgtaatcctagcactttaggaggccaaggcaggaggatctcttgagcccaggagttcaagagcagcctgggcaacaaagtgagactctgtctctataaaaaaattaaaaaaatagccaggcattgtggtggatgcctgtggtcccagctacatgggaggctgaggcaggagaatgacttgagcccagaaggtggaggctgtagtgaaatagattcatactagtatactccagcttgggtgacagagtgagactctgacacacacacacacacacacacacacacacacacacaaactggcttgctgccaatgtttgaaaactgggagttttttttttttttaaagtaaaatttctagcttcctttgaaaaatttacacatatgagcaatttgtacatggtgggagctgagttgcagctctctcctgagagtgggtgctctgcagttcaccagcatagagactgatggagaacaggctgggcgtggtggctcatgcctgcaatcctagcactttgggaggctgagggggtgggtcacttgaggtcaggagttcaaaaacagcctgggcaacatggtgaaacccagtctactaaaaatacaaaaaaattaactgggggtggtggcgggcacctgtaatctcagctactcgggaggctgaggcaggagaatcccttgaatccgagaggcgaaggttgcagtgagcagagatcgcaccactgcactccagtctaggtgacagagcaagactctgtctcaaaaaaaaaaaaaaaaaaaagagagagagagagagattgatggagaacaggtgtgtgtgtgtgtgtgtgtgtgtgcccgcgcgtgcacatgcacacacatggtcaggggggttaaagggcaggaagagatgatctttaaaaattcagattctttctaaagaaagcacaacctggaccaccccttttactgtggaagtacttagaaaaataattttaggcatggaaatgctgttataaattcaagaaagaatagagaccatctcaaatcaccatgctgctgtaaacatgccgcaccgcccagccccgcttccttctacaattccagtctgtgtatttttgtggggaagtgtacctattccatttataataccatgtcatattttccaaccgacaccggataagttaatcaaagatatacactgcatcctgaacgtctgctgaatttaaccatctatttttatggtaaccaaagagacttcccaggggcattgctgcagatagccagggggttggctctaaaatttttttaatgactcaaagtccttatttccagtgctatcaaataaagaatacttatatttgcagaggcattcaatgaactccgagagatagaagacttgtccaagtagttatagttagttagccacttatgaagtaaaaggtagaccccagaggatttactctctgactgtctccctgacaaaggcatttggggcacaggaaggcacttgggtcacagggaggtctgtctaggagacagggtcttggtgtcaaccgggctcctgggaagatttccgcccatggatttcctagaggtgaatcagcaccaccaacttcccataacagaggtaacacctttctctagcaaacggagattgatctgagtggtaaaaactcagctcttctgttaagagtatttgctggttaaaataaaggagctcatccacagtgggagtttacattctgggctcctaagggaaactttcagacaggtccctcttatcctccaaattagtttgttcttggaaaagagcccatgtcttgagttgacctctttcatttaagacgagacttggccatttaagatattctctttaatgtttgagttctgttgttgttggtttccctttaaaagcaggcatacttatacagattcagtattacaagaaatacagaatgtcaaacatgaagcttcctagtaagccccccgtctttctctctctctctctctctcacacacacacacacacacacacacacacacacacacacacacacacacagcacggagagccacttttaagcatatagtgtatattcttacagatttggggggtgtgtccacttgccattaactaataattaattaataaataaataagattagaatacacatacagctttgcatttattataccttgaaaggcatttaatgttgatccatgtagttttccctcagtctttgtaatggtttcatagactttcattccattattgaagtcccatagttatttaaatgctgtacctgctgtgcccaccgaaaggccataccccatctccttgactcctcgtcagcaaagcctcagatctgtctgggtgttcttcctcccataagttctgggaaggcaatcccctgtctccaccctcaaccaaaggataatatcaggacttgcatgatgatctcatttcgttttcaatgatgggttgtaactcattattgatcaatgatactgaaggagaaatcttctgtggggagagaaacttctgagaaaggaaatccttgataataaaaagagatcagtagaagaaattccttcttctttgctgaacatcacctttcctgagccaggaaggagacatgactgacacactggagatagtggagcagcaagggaaaaacctccgggtccctaaagagatccttgagctgctggattacctggccgtggacccagctgccatgcagacctcttgtttggtggataataatctccccactgtttaaactttttttgttaagctgttacttgcagccaaaactatcctaactgatatacttgggtctttatttgcctattgacttcataaataatacaacaatggctacctccaaaggagaagaaagtactttctgagatgtgaatgaatgaacaaacaaacaaatatttggcaggagtataattctttcattcatttacctatcatttgctgagtgtatatagtgcatgacaggccacaggccagccagacgaggtggccaaacaaagaaataataagacatcgtccgagcctcaaggatgtcacacctagcagaaatgtccatgtataaaaataatcctggtacactgtaacagtgcgagagaacctagtaatatgagagcatagagggtagtcagagaaagcttcacagaagacaaaacatttggagtgggtctggaaggatgagtaagagtttactatttggggttaactcccgaagtggaaaacaccaccatattggaagccttggggtactctcaaagtcagcaaatttatagcctcatgcaagatctgagtagtaacagccattttgcatcttgttttttatggctaataagagaaaaagcaaaaacagggacctataggagatgggagatgtgccctggtgatgcggacaggcctgtcccttccatgggaggtatctttggaaatcccccatctccacggtaatacgagctgccagccggcagagggtgaattagcactggcaccatcagatacaagctggacacagctgagtgcagacaggacaccacatcatctgggacaagagagcagactgctatgacaggttggtctcaggccgacaggacccagcctgggcctgacccactggtgagtcacccaggacagccccagttgactccttggacccaacagcaaaggcaaaacaaccagagagaggaagcctggatgacttggttactgccacctgatgctcttgcgtctgtgccacaggtcagattcccgcaggaggccagctccttaacagcttccggttcctcctggagtagtgttcctacttaccactagctgtgcacagctctctcgtccaggattttaaagcctgcagcaatgtgataggtaaacaaagtgccacagaagcagctccattctggctccttaaacctcacctattccccaggtgcaaaagaactattattgctacacttgcaaacaaagtgcatgtcaaaaaaggtataaacagcaagtgtcttaacattctgtatgggcaagaatgataaagcagttcatagtctctatgtgccatattaataatgataactgaattaagaatttggattatattattatgtcaatacacttggtctaaaccatttcaggtgtttgcatatcctaagaacgtatttaattcctgtggttgctctcagtgtctgctagaagctgtacattctccttctgctctcataagtttgaagccaggtcccttggcatgctatgtaaacacagccatttaaataaatagaacatggccacggttcagcaccagcaacaggagccactgcttttttgggtgaggaatggtgaagccaaaaaaagaaaaggaagaaatcccctgtaacattagacagattgcaaggaatttttctgaattttggccaagaagctaagattagaagtcatattgcaccctttttataataaacttttggcctcaatcacagaaattcattcatttgacatacatctatatatcggatatggtttggctctgtgtccacacccaaatctcatgtcgaattgtaatccccactgttggcaaagggacctggtgggaggcaattgggtcatgggggtggatttttcccttgctgttcttgtgagttatcctgagatctggttgtttgaaagtgtgtagcaagtcttcctttgctctctctctcctgccaccatgtgaagatgtgcttgctttccctttgcccttctgccatgattgtaagtttcctgaggcctccccagccatgcttcctgtacagcctgtggagctatgagtcaactaaacctctttttacataaattacccagtttcaggtagctctgtatagcagtgtgagaacagactaatataatatctatctatatctatatccatatttatatatctgtacgtctatatctatgctcatatacacacagaaatgtcttttatatttctgttacaggttaagcactgggaggcacagatgtatgaggacttgccatctaggagtcagagaatcagcacatatcttgtcatgtcatagctgaagagctgccacctagacctgttcctgctgcttcactctggttttcccatggcccatatggaagggaaccagggttgggctaccaccattttgtgctcccagattggaggatgggtgaggcctctccatcccagcttccctggataacttaatttaagcttatgacacatattctctgaaaggcaaacccatgaggtgtattcacaaagaggacatcaaatcccacttggagtcttgtgtcattaaaccattacagtcagccctccatatccctaggttctgcatccatggattcaaccacccatgaataaaaaatatccagaaaaaaaaagttgatggtagtgtctgtgctgaacatgttcagaccttttttggtcatttttccctaaacaatacagtataacaactatttacatagcatgtagattgtattaggtatatataagtaatctagaggtgatttaaagtataaaggaggatgtgcataggttatatgcaaatagtatgccattttatataagttatttgagcatttcctctatgggttttggtatccatggaggtcctggaaccaatcccccacagataccaagggacaagtgtatttagcattttcatacaccctgtttcatctgcataagaccctgacgatttcaagatacgctatctttttacataccactaagaaaaaccagccaactagactatggcatgccatctgcagtaagatggattctgatttcagaactgttaaaggattttttgaaaagtactttctagaatcaacaaaatccaaaggctttcttctccaactagactgtgagttcctagagggcagagaacatacttataattttctgtactttgcagtgcctagcacagtgtcatacacatagaaaatacactgtaaaacactctaatgaatgaaagaaaagtgaatagttaatataaatcctatgctctctcaacagaaaagtgcactgagtaatcaaccagcccactcaagtagaggcaggaaggtcccgattgggccttgttcttcctattgggactaacattggaaacagccagactcgctgagtctgatgtgccctggagcaggcggggagggagcttccgaactacagcttctccagcacttggagcagctcgaggcctctcaccttaaggcctggtcaaccagctgctggccagacacactgcaatgctgggctccctgggaacctatttatgtttctcctgaaaaccagtatgtaatatcaaacttctgaaagtaaaatcacagtttaagtggattgtgggagctggctatttcggggaaccttctggtgagttctctggtaacgtcaataaccactccctgatttatctattttataactttggatttttgcgtatcctgttcccttagaacaaggcacacccttatattgggtttccccacagtagagtctttgtgctgggtcagtggcttgaagggtttttgcctctctcccttgagggttcctgttctgctcaggccccagttagactaaacctcttccccaggtgccagggcttccctgctgtgaaagtagtaaatggaaaccacgtgttgctttatttcactttattttagaataaagttacttctgaccagtttcattccaacttttgagagatggaccacagagagatgcacgctgcacacaacagggcatcagtgggcatgccacatgtgtgcaggggcaaggaatgtgcttcacacatgcttcacacattcaacccctgtgtactgagcaactgaggcatcccaggttctgtgccaactcttttggggactgcagagatgcccaagactcagcctctggccttgagaaactcagtctagttacagtaagctctgctgcatgataccatgcaggtcggaggctgctccttcctgagagagttggggaaggttttacctggggtagaatctggaagttgggtgttgggagaaaaggaaagggcaaagagtcaccaggtagtgaggcaacatgtacaaaggcacaggtgtgtgagaccacggggaccagggaacggtcagacagagggcgctctgcagcctccccctttactcctaccctgagtcagttacggggaggctgaagccttcccttgcctgggcccataattgcaaggtctccagagaaatctaaacttgatctcccagatctcctgtttcccacaaacctctgagcctgcactcctctcttttgtcctgctgctgctggtgttgcagcacccactgacaggaaatggggcccctgaaaagatctttgctcctgtagttttgcaggctagaaggcgagagaagcaggagagggccagttaggagcactgagcatggtcccagcacagggttgtgatacccacttagaaatgaccaatgacgtcctgatacttgcttagtcccctttcctggtccttcctaaattgtcatatgcttgagaaacctggatgtccatatgtgcctggcctgtttctctgcatctgcccccagggtatgataatccctggaatacacaagctctcatgaccccttcaaagtggtgagagacattagaggcagtgcccatgtgtctctctgaggcttcagtcatcttatccctaatctctgagctcagtctcctgggttcagatatcagggctaactccttaatccgtaatctcctgggctaactccttagggctagagctgagtccagtcatcatctgtggacaattctcccactcacgataggcaggcggggccacctgttttacttcttaacactatttagtcgggataaggatgctataattcatggggtgaactgtgagaccttacacttggaagtgacttggaggtccctggctccaccgactgccagacccctttcccacctcctcggccagaggtggtccaggcctctgtcactgatggagttggtgcctgctctgcctctttccacagctcatactccagaagtgttagccactcttctgactattagcttgacatccatctccttatagctttcagtaactgtttaggtttttccttccagcattcctcagaatgaatttaatcctctttcatattgccatatttaagacctctaaattaggtgcttcttccccacgtgcactctcaaccttttatttctttctaggataaacacagcagctacaattattcttcacatgatctgtcttcaggactttcatttccctggttgcttgcttccaaatacacctcagtctgttaaggtcactctaaaactgagatattgatagggtaacagaaccctccaggtcttccctgagtgccaactgcagcaagtctattagctcctgtaggatcctgaagtggacttctgtttacaaatccaccctccctcctgaaccatgagcacttactttcttgctctcttggtcctcacacccccaacccccaatccccaagctgaattaaagggcagatgtaaatttcagaatccaagagacaacacagtataggagaattgttttaactttcttggtattactagctcccagcacaaaacctaggagccagcaggcactcaataactgtatggtcaatcaaccagtacatctgtttaatgtaagtacggtaagcttgcatgtagtttcttagcagtatgtcaatgtttatggttaactgcaatctcatggtctatttcatgtgaccttctataagaagaatctgtcagttctacttgtagtgttgactttccttaatgtaaatttaggacctgacatttatgtaacaaacccttccaaaattgggtggcttaaaacaacaacaatttataattgtcacaattttgttggttgatgaagttcagctgggaagttactcatgcggtcactcatgcaggtgggagcttggctggggctagaatgttccaaatgactcctcatcctctggggtctctctccttgtggcttttcatcactcagtattctaccctgagtttctttacagccaaggggctggcttctaagagggagtgtcacaagaagacaagcctcgatgtacaagaacctattaagcctctgattgctccaaacttactaacaccttgttggttaaaacaagtcacatgatcaagcccagcatcaaggtggaagggaactatataaagccatagacactgggaggtagttcactggggactgccaatgtcacagtctaccacatttatccttattagatgtcattgttacacttttgagagggaagatttttgctcacatctttataaaaattcaaatttttcaggatatgggctccatgatgatggtgatgacaatgatacatcatttactgtctacagtatcctaggtttttcttttcatgattaaaatttatataaaaatcccaaggacagaattattgctcccactgaagagataagaaaaatgagattcacagagcctcaataagtttcttagtctcaatcttagctgaaggcaagatttcaacctaggtctctttaattccaaaggaggtgtttttttccactgtaccatactggctctgagtctacttttgactcaaggaaacatataattccctgcagaagagtgtttttcaaattctaataaggaactcaaatagttagacaatgcaaaatcacttttctttctctggagttctttaagtgtttaaatttcattttgttctagggtattttggtttcttttgctttatatagtgagttctcctgactagtgaaggagcccgaaagtgctgatcatacagtagggctgggatgtttaaatatctggatgaaggttctgataagacttcatataaatagctataaggcagggttcccatacaaaaaaaaattgagtttgaacttgaagttagtcttaactccatctatactgtctggattgccagtgtaattggcctccaagtagagaactatgcttttttctttatctactctggtaaattattaaaaggctcttctgcccaggggatcattaactacctgggaggtctggcaggtgcagcaaagtgaaccagggcagctctggttgggatggcaggactgagcttcctcaggcaacttccactgctcagccagaatgagggaaagaccagccctgggcagggctgcagggattgggctggtgggcaagaatagaggtaaagacgggatggaggaagaggacctccctgtccagcctgaaagtggacttccaactctttatgtcactcaactcccatttgcctgatggaatgtgtgccgtgtgcacctgcatttacccacattccctccttcctctcttggagggtgaaagtggaggcaaggacgagtcccagattggccaatgcagaaacaacatttgtgtggatgacacaggagagcaggggaggtgagcaggagtgacaaaacctcagttaaacccgtcatcaacccaatatcttcactatccacatgaagtgacacgggaggttatacgacacggccaagcccaccaacttccttagcaccagagatggcatggcactagatggcactagaacccacacctgccacccccaggcagggctttttccttggcactggtgcagtcaccaatctcagtagctttcacgagcctacaattgaaagcacttttctctatggctttacatcttggcctttagggcagtaacccacagcctagttagttctacttcttctgccacccttcccttgtttctgttggaaagtggtgcagctattggaggatgtgcttgactgaatgtgctccctcagcttttcagtccataggatgggccccagctataccctttcactccttccctgctcaaagatcatggaagaattcctgaggtaacattttcatcttgggtgagactcattctttacaattcacccctgtggtgagctcagcctagtgcagcctctcgtttgctctgttcacacacacacacacacacacacacagtcatgcatgtatgcacatacgcacgcacacatgagaaacacaagaaagcacctttaaaaaaaattagcggatgatactttccctttgtggatggttgcacctcataccaatcatgggtttaagcttggtgaggaaagagatggacggagatagaagctggggagaaagatttgtaattatttaaacttattgaatagctatgtgcctgctccgctctgaaaatagcgcctgggttaaaagtctctgtacctcagaaggtcaccatctgtaggagaggtagatcaaaacatatcattttaatcaggaagagtttgaggtgtgggaggttacaaggcccaggcctgagatggaactagcacccacatctgacacccccggcacagggctcactcctcaaccttggagctgttgccaacctcagtaggtatgaagaatgtattgggcacacatgttgaaagcaatgtttttctagggcgtttaggagtgagagaagcaagcgcaattccctgtggtgtcccaaccacaaagcctcttctacctgtagcagacagaggaggtgacacatgagctgagtctgggatgacaagctcacaagcatttggggtcaagcattccagggagaggagtcagcctgggcaaaaccaaggcagcgctctcggtaggcctgggcctctggctagtggtttccttcaacccacacactgcgcatggaaccacagaaggcagcacagcagagcatctgccctcacgttcttcctggtggggggcctcccaaggacattctgcctcaggttcttattgtctgaggtcactgagcctcctgaaagtatttcaggaatgtggaggcctgactcactctcttccttgagttcacagtctgaagttcataaaacctcttccccctttagtcattcttattcaaataccggcccacaagtttcacagatggagctggcaggaggaatcttgggaagcatttttttgctcaggatgtgaaagtatatgaagagtttgggagatccaggagcaatcattcactaagagccagacccctgtggcaggcgctggctaaacgcagagactggctggctcgctcacagagtggagatcactggcagaagagaaatgccatgaaagcatccactctgtgcctcagtttcctcaactgtaaacagagacaataaccacaccttcttcagagaactggatggggagtgagttaatccacataaagtagttagaatacagcctgacacataataagtgctcaataaatactagtttattgttcatactattgcttattgttggcagagtgagttgtctacacactaagtggtgtggggaagaggaggcattcctggaataggactgcgtgggataaacctgaaaggaaaatgtccaatgccgtgggtgagtgtccagatggggaggcctttagacatcacacacacacagcaggaggggcagcttgggagagaagaaacccgagtggcacatctagcctgatgccaaagtatcaattcatgcacttcttccggttggaaacagttataaaaatgtccagggaattaacaaaggggatgcaggagagatatttggagtacgggatgggcatacacatagccaagcatggggtttcaaattggtgttattcaccttatttctcctgctgccgtgcaggcaatgaaattctcagtgaggcaggccacagacagatcagatgctctgttttcctcctttctgactgtagctcagtttagaggattgaaaatgctaggagacatctagcctaccctctccctgctcacaccgcaccttgcctcagagctggttttgacatctgtcctagaagacatcatccattgccttgattcatgggtatgagtctaagcaatcttaaccactgctgggattccatttggacaaggaaaagctttctctgcttttcagaacactctacagagaaaccctaactttagtaaggctctggggaccccaggggagatccagagaagtaaagcacccagcccaatggagcttccagaatgcattttgagggacagtgctttagttcttcctttgacctcagtctcttttggtcattccttgtccccattctactccaactggaaaggctgagtagctgctcctgcatatgtctgttattgcagtgacccaaagtaagaatcttaaatgaatttgaaatcccttaaaaaaagagtaaaaatagtcctagtggaaaagatggttcaggagtttcacagaagggaattagaagaagccattactgactcaaagaaaaagattactgaatagatagcagaaggtaacctctgccctactttcagaccaatgagtagatataaatgacattacactctcgcttcatgaaaagtaactggagagttgagatgaggtgattcttgaaagaaggaaaggctattagatttcttactattaatgattaaggttcctcaattttttattaaccagcctttttttctaatgacaaaatacatccttatggtacataattcaaactgtagagaagggaataaagtaagaagtaaaattccttttctccactccacaccctccttcccacacctccctgaatacttccctgcggaaaccactattaacagtttcttctccatctttctagaattgcctatgtatattccaacctcctctgacaatcctcttttttactcacccacaagaggccttccaacttggcatctcacatcatgataccgcctttgtctgggaagctcttctcctctttgcatggctccctcatggctgctacaaccttctcggaattgtcaactactcagagaggtctcctgtgacttctctatttaaacaaccccaccaccatcaccattctccaccctgacaccaccagtgtctgcccaacccttagcacaatgtccagcacacagtatttgatcaatacatgacggatgcgtgagtacattaggtacgtgcgcatgcacacatatgcatgtattctccccacaaagtataaaggggatggtattacagagataattctgtaatttgctttcctacttcacaacatataataaaaaacaataatgataatatttcttaagcacttatgttccaaggactattctaagcattttacatgtattctttcatttaattcttacaacagccccttaaggtggtactaatactacccgacttgccagataaggaaacaaagaaatggagacatggggaggttaaaacacagcttgcaagtggtagagccaatacataaatttacactaatcgtaaaatggctgtttagccttaattcacatattaaaatattttgtggcaaaatatactcaacataaaatttatctttttaataatttttaagtgtacagcttagtggcatcaagtatattcacattgttgtgcaaccatcaccaccatccatctccagaactttctcatcatcccaaactgaaactcagtacccattaaacattaactctccatgctccccttcctccagcccctggcaatcactatgttatttcctgtctctataaatttgagcactgtaggtccctcatagaagtagaataatatagtatttgtgcttttgggattggtgatgggtttgttgcacttagcaagtcttccttattaattaattaatatctaatgaataattttattgagtaaaatatttgagtgcatgatacaaaattcaaaaggcatagaataaaagagcaagttctccttctacctctgtctctaggtaccccaggggcaaccactcttcctagtgtccttccaaagatgttctatgcatgtacaattacattatttgtatgagtcatatatgtataatatatgtatagcatactatacatactgttttgtttcttgcatttcccatttaactctataccttggagatagttacatgtcaatgtacatggaactgcccctcagtaaacataatttacataatgtatccagctgtacacttatagtatattcactttgtatgtatgtttcaacagaaacataatttacagttcaaaacataaattatgtttttcttgaaatatacatacagaaagtgaacagctggatacattttcacaaactgaacatacccctataaacagtaccctgaagaagaaacattaccagcattactagtttcccaagtctctcattttttattccagacgttactcactgtcaccaatggtaactactctcctgacttaacagaatagattagttttgcgtattcctgtagttttgttgttgtggtggtttgtttgtctgtttgtttgttttttagagacaggatcttgctctgttgcccaggctgtagtggcacaatcatatctcactataacctccaactcctgggactcctgggcttaagtgatccttctgcctcggcctcccaaactgctggcattaaaggtgtgagacactgcaccaagccctgttcatgtagtttttatgaaaataatcctgctgtatacactcttatgtttggcacatttcactcatccttacacctatgagattcacccacgtcgctgaccttcagttgatccttaacaacatctttggataggtgaaggcccttgcagctgtggatgagcccagctggcatgaggtcttacatgtcatacccaccttctctcagtcttgccctcacaacctttgaatttctataaagtgctttgtaaatgccttaaagagtccacatgtatccaaaattcatctccagatgtatctaatgatgaaaaccagcagcccggagctgaggtttgtgtaaagttacatcagagtgaggaggggggaaggagcacagccttcccattctgatcagtgtctctgtggccacagctcaataagacttgctttttgaggcctcatccactcagcccagaactcaaatctcaaattccccaaacatgaggaatcatgacaaagcactggtttgcattctcttggcaaatgttactttaaaagtagagtcaaaactacttccaagtaaagagcaaagcagctttaaccaatatcagcaaagggtctaagaaaaaagatgtggctaatgtattccgtctgtttgtttgctttcttgtgccctaagactcaggagaaaatatcagtttgggaaagaagtcataacacatggggcaggaacaaaataccaacagagcgaagttgcacacgctgtccaacctggtggcctgcttatgaatttgaaatcccagaccttcacatgagtccccagcctcaccccatccctagcctggcacagacaggaatatctatttccagatatgagctgttacatagcagaaccaatctgtacatccgtgtggggccaatcgtcagtgctctgattggctcatcagccaacatgcagggctgcattcctgtggttcacccttccagaagggcctttcccaacaccacatgctgcctgtgctgtgtccagcaggagagggggaggcaaatgatgtgtctcatggcaccacaggctctgttttaccagaataatactgttctttggcccactgcatccgttctccccacatgggccttttcctcacgtggaccctaaaagaccacttctctatttacctgccaacctgtaacagataattatagtggctgccagatatcccttcaaattggtcatgatctcattcggttattctagcagcaaaaaagttacagaaaacccaagataatattaaaaaaagaaaatcatcccctggctttcacctttcttgtggcaggcaagaaaaggtaggaagaataagcataggaaaagaaaagtaagagcttgtggggcaagttgaaaacaaaccttaccaagtccagaaagaattttccatttaaatgctttataacaattttctctgatgagtagtagaatgctgaataagacatgttactttttagtgacttttcaatctggcatctattgaaaggtgttttatacccactgcagccaagaggagagggtgcaggggagatcacatactctcccagcaaggcagggatagaaagcccctgtcaccaggggctgccgtttctctggcccaggaacctgtggaggctactcctggataactacacactgttcagctgtattgcatgcaattatatcacattccttcctggaaacttctccaaaaagagagcagagatgagaaacactcatagagaaagctttcactggggcacacaagctgaactggcaggaatctgaagaaggcaaagcaatggaatgttaacctcgaatgagtgaacaggagataagaaaacatcagctgacagagcaaacaccccggaaatgtgacctgcctaccctgggaatggctagagctcttgaactagcctttaaatggaaagttcttcctgactcgggttttgaaaccaagactgagcaaaagcctcagtcttcattcctgagatgaagtttagagtgcaaaagatttcgaatgcaaaagattttgagagttggttagagcccgaggacaagcctcttgtgaacagaagttccaagagtcaacagtagctggcagcagacaacctcttcaggctgaagggtggcagaacccaagatggctagtgcagaagacatctgagagatggcccaaggctgtcctttgcttttcaaatgaggaaaaggtccagaaagggctgtctaaggtcacatagctggttaatgacagagctgggagtagagccacattgagctaagttgtattcctacatctctaccaatgtgtaacccaaatcaaaataattggggggcagaagaaaggggaaaagttatggtctttgaaagtcattagtaatcctatcattagacacataattaatatcatttgccaagatactaatgtcttaaatgtgagaggcaatgtctattgcactaatgaggtgactggtaccatggccatttatggcagatatattttttcaaatttaagactttagcatacacatatacatatggagagagaaagagagagttgatttacatatatatttcccatctaaacacacaccttgaccattttgccaggaaaataaccaaacaacttccattgaggtatacaaagaatgatgacaaagttacgtggcttatagtttaaaaagaaagtttaggctgtgtgcggtggctcaggcctgtaatcccagcactttgggaagccaaggtgggtggatcacctgaggttgggagtgtgagaccagcctgaccaacatggagaaaccctgtctctactaaaaatacaaaattagctgggcgtggtggcacatgcctgtaatcccagctgctcgggagactgaggcaggagaatcacttgaacccagaaggcagaggttgcagtgagctgagatcgcaccactgcactccagcttgggcaacaagagcaaaacacagtctcaaaaaaaaaaaaaaaaaaaaaaaagaaagacagtttaaaaacaaaattgcttgggtccctccaccttgccttttcactctctattagtttttaaagagtggcttgagtcacagtgaaggtggagaaaaagcagaagcaaagacagaagcccattcaatcaggactacatatgccctcgcaggtgaggaacagttggcccaattgtgaagtctccaggctggggcaaggagggaaggcatgcccaggaaaagcatgggtgagctgggatagtttctatgcttatttctgaaggcccatcaaggaaccaagagaaactagaatgtcctgttgagggaggatgcagactttttccctcattgtttcctaatgtaggttagaacactgatggtctagaacactgaaaaagatcttttgtattctattcaagatagatgaatgacagtacagtcacagccagttagagctagaaggacctcataagtcacctagtctgacatcttcattttccagatcaaaaaatggggtgcagatagatctagcaacttgattaaggtggccacaagctctcagagtgtgttttgccaacctctagtgggtatattggggctggggggtggggtgcacagacagcaagcactccaacaggtctgtagatctttcaaaatgcaagccaaaatgcacaaaggtgtgtgcagagtacctccctggttggtttcataaattaacttgaaaattaaattgttacaattataataattatccagtcttccaaaagtattcatctggagtgtaagcactttaaacatgatcttctgttctcctaaaggtgctggagcatgggaaggctagcccgctgccagccacatggagtgggaggatcacggagcctgaagctgagaggccacagcactgcacctgacatatattaccaacttgccatgcaacttcatctcattgactccgcattcccattttttggagtggatcacctgcagttcccttgacaactgagtgtctgtatttttctgtatcgtccagtgtgatgacaactgtctacacaaccaagtctggccagcactgaacacactcagcttccccacagtgctccaagtctcaaagcccaaactgcagccaaatcttggcagtgttgtcctctggtcaggccagagcacctttctgaaggacctttctgaacatttttagaccattcgatgaatgaccctaaattcttggcgcataattgggactgctgccatcacgccagaaacatttattaagcacttactgtgtacagtgctcaagacctgccatcttgtttccatcttgacaacaatgatgcacagtaggggttgtcattccccgtttcagagaagagtaaagctcagcagtggcccagtaacttgcccaaggccacacagctactgggtggcagaactgaattaaaccctccactttttgactctaacacctttgcctccctccttagggcgcaggcacacccagccaggctgagaggcactcaggcactctcgaacttcatgtttgtcatgcatacatatgacttccttcgacttctctgcaaatttccaccatatgcatttccatagcaacattgcaacacaaacacggtgtaatctttgtccactgcagtacatagcttgaaaggtttttttgttttgttttgttgttttgttttaaataaaaaggagctgcatatgtttacagctgacctagatcccatggcaacaaataacagatataaacttgggttcttttcctttcctttcctttctctaaatctttttattcttttctcttgtatggtaatagtttagaacatcaaaaactgggttgcaccatttgcgattaagcagggcccctattcggtgaccgctgcgccgccagcctggcgcgggcctcctgcaagacaatggccacgacctgacgcgcgagcgccagccccagcccgggagtcacgccgctggcgcttgacgcacgcggagacccgggggccgtgccccagctttgtggaacctgagggcggctcgggtcaggtcggtccccgcgggaggacaggcgcgacccgtccctcaggaccgacggcgtgtggctgcgggggcatggggtgcccctctcggcccggtcgctccagcgaggggacgctggtaagtcccacccctgccatcgccgcgggcctcctgggcacgcccggccgcgggccccagattaccctcccggcgaccctccaggcggtattgctgtcagacacattttacaaatgcaaccctccagcctaacgaaggccagcacctggcccacgcccacaggctgggaagggagagtgcagggattagaatccagcactttttaaagattttgtttcactctacttcccgtggctcctcgccccaagggcactgtggaactatctctgcccaggatcacttatctgaagccggtgttatgcttccttcccgggcagtccctgggtgcagcttccggacgggctagcttgggaggcattcctttccctggctgatgcaggaaggtgggtttgtctgtctgtggtccctggttctcccctctgattctccctcttcccagagccccagcttttaaaggcttcatattcctgacaaatggagatccactgacatgaagaaattctcaagcaactaggcaactgggattgtgcaggggcttgcccctgatcctatagtaaaaggtccagccctcactagctgaaggtgaggaggaatttcattggggaaatgtcattctttgtttcactgtcatgaatccagtgaaacttattatcaccagaaatgccccttggctgcttcctcgctgaaattgtgctgaggtatctgatggcccactgaggtagtggataggaggttggacagccaagtggtgataagaaaacctaccatttcggtagtactcactcggtgccaggtgctctgagcagctctctataacactgcctcctcacaaaccccaaaggcaggattattatactattatatagtcataatattaatatgaatatgatactattaataataaatttattcttgcttaccacgtgagggatccaaagcttgaagaggtcacctatcctgtctagatcccacttccgactctagagcctgtccaggagtgatttccccatagaagggaaagggggctgctcagcagagaaacagaaataagattgtgccaggagagatcgcattattcctcagactcaaaggccgatttgcacacctttacgataggtagagggagaagagtggaaacacccctatctctttgtccaaacccacagcgagatccaaggctcagtcaggaaggctcttcatttagtcaattgttttctgttttcagaactaaagtggaaatgacccagtgaggaaggaaaataagcacagaataagcatgatctgccttggtcacacaattaaaatacataacgctgctaaaggtacaccactcttccacccaccccttcagagtgagaaaggccctttttgccctggaagcctactgaagcattctactggggaagtattctactgaaatattctagtggggaagtccctgccgcttctgaaggaacactgaaagaaaccttattccttagagtacagtcacccagagggtttattctagaaatgcagagaggcattagagatggtatgtgaacaaaagcagggcagaggatgcacgcccagatgctgtcttggccaggttgcaattcgaatgatctaatgttttctggcttcttattgctttgcttttccaatttggtttggatatttgcattactgtattattttccctgtacaattgctgttgtctgtacacaattaggtcattttcacagttgggtgaggacacacttcagaagtgagatgagctacagctgctagctggctctctcctgggatgtgtacttagatccctttcttgttggtcccaaagactacctgtacccaggacctgaaaattttaatctaagtcatctaatgagtggaaagaactacagcatccccttgtaatggtaggtaagagatatcttgtaagttttgggttgatttgctgatcaatggttccttgggcctaaccccatattgttaagctccaaacaaaagaaaggactgtttcccagttgcttgtggcttcttggtccatgaagttctgctgaaatggaccctgggcaaggaaaaaaaaagggaagttatagagcggaggaagcgtaagctgcccctagacgtgagcccagaattttacaagcaagtatagaagctggcctttgaacaaggaccttgaagagtgagaaaaaagggatcccaaaggaatggaggcttattgtgcagatgaatactgattatggccatgttcacaaagtacactgcaacacctcaacagtgtaaaatctcactaatacataccccactaattcagccttctcaactctctggaatatgtggccttttgggtaaagccagggctaaaattcacttttgtgctatctccaaaaatgaagttgggctaaacaaatagaaaggacaggctgctattaaagtcactggggaagcccgtgactctttaagttcataatcagacatgatagtatccacctcattaaatgccccattatgggcaggaccatctctctggctcagcttgtttcctatttgcttcctctcgtggtaccttaggtctgcatctatgacattgaccttgtttctcctctcctcttttctctctctctctttttttttttttttttttttttgagacagagtcttgctcagtcacccaggctggagtgcagtggcgctatctcagctcactgcaagatccgcctcccaggttcacaccattctcctgcctcagcctcccgagtagctgggactacaggcacctgccaccacacccggctaattttttttgtatttttagtagagacagggtttcaccatgttagccagtatggtcttgatctcctgacctcgtgatctacccgcctcagcctcccaaagtgctgggattacaggcgtgagacaccacgcccggctcttttctctttttatctaaattattcattcatcatttatgcaatagatattgtgctccttctataactcaagcatgtgctaaatgctggagttacaacaagtaaatacggaacgtttgctctcagggaggtcatagtctaatgtggaaaactgatgataaagtgtgatggacatggagacccacatccaagcatgaagtgatgcctgaatgatgaggcagctaagactcagagaaactgaagactttttccaagttctctcagttggctgatgacagggttggaactgaagagatcagtcagaacaaaagcctggtcttctgccactacctccttgagatttcccagactcccacgtttgggggcttctcctcttgttctttctatccagttgcacgtagttcatactcactcttttcctagcactgatctattcctacctcagtagaattcacatttatcactaaagccaggcatctgccctacctccctctaaggattgatgtgctgataaattgagctaatcaatgtaaaagtactttaagaagtacactgcaacacaaacctaagtcccaaaaccacaatctaattaacatattaatttaatcaatgaatcagtcaaaatatcaatcacaaattaatgctaggttctgtgggagataaggcatgtcttcatatacagcatggccccatccctaaaggaatttatggatgagttggtggtaaaaagttaaagaagaaagaaagtaggcatttattgagtgcctatcatgtagtatgcactgtgctatctgcttttccttatattatctcacaataatcctcacaacattctaggaggtagtcattattttcttcaatgtttggatagaatgtttcgatagaatgccctcccccaatgcctctctgttcgagcacaacatggcataatagctaaaaagccttggatcagggctcaaactgaatttgtatccaggcactgccaattactttctgtatactctgaggaaattgctcaaattttctgcacctcagttataaaatcaggaagataagaatagtaccaattgtatgctttgttgtaaggataaggtgaccatatatgttgacgtatttgccacagtggctggtccagagtaagcactagataaaagctaagatattattattactatccagctccaactcctttttatctgcagtcttcccagatctcctatcgaaattagtctcttttacctctgtatcttcacattactataggcatgcttctcatcatgttcatatgtgtacctgattattactgcttagcacagaaaaaataataaatgtaggtgattagatgaatgtctcccagaatgacatcacatgctcatagaaggaaggaagtattgtgtttctagctataaggcagacaaaatgcctggatattatagataaagtatactttcaaatgcctagtcaactctcatgtaaattggagaaacccccaaggggacacacacacacacacacacacacacacacacacacacacgagggattggaatccagcacggtaaacaggcactaaagctactgctgctctggaaagtctatcttattaactttgaggctcagtttaaagggcattatggagaacaggagccaaggcttagtaccttcaaaaaatggagagttggaactgagacccctgcataaaagtgagactcacaaagaaatatgtactcagtgaaagggtagactaggaaaaaaaaaaaaaagaaaaaaggaaacctgcttatctgcaataaagaaaagcagggaaatatgttggccttggcctgggctcataagatgttaaaatcacagatacacctccctaaccacaggttcagggtttgaatttatactacctacatgatcttggaagtctcagttgaaaaaatcagtttaaactggcctcaggttgataccaccccagggtacctggcagaagcagatcttatcggagggacagccacccaggcctcataggagtgtaacaaacaaagccccactgaatacgagatcacaatttgaaattacaaaccatactaggaaacaagctaccatgagtgagagccagcagaaaccacaatgaacagaattagactttacataacagttattctatataaattgttttaaatttaaaagaaatataagagaaatacgaatatggaaaaggaataaataacatataaaaagaccaaggagaatgaagaaagaaccaaatactacttacagaaatcaaaatatacaatcatcaaagttagaaacacagcgaatgagtctaagtagagaagacacaggtaaagagagaattaaggaaatggaagataaatgtgaagaaattacccagcaaaagggcagaggcacaaataaatgagaaacatgagatgttaaggggacaggaagaaaaaacccaatgtgaaaaaggcaatatttagagataatgtttccagaattaaggataagaagctgattagtttgatctttgaaactacagcacctggcaagtgcctgttagatgcctaataatgttctttgagttggattgacacaagtcctttagcatttgcttgtcctttacttcatatatttattcgttttaaaaaatattcagtagaaatacagaggtgaacaaaacaaagttcttctttgagtttgtgttctggacaaaaatgacaaataataaacaaatttacaaattaaaatgagatacttttgaattataagaagtgctatgaaggaaataaaagggctacttaatagcaacttgggaataggatttcactgaagaagtgagacctcagtaagaagtgaagtgaaagtattccaagtgaagatacagcacataccaaggccctgagtgagaaatcacttggtgtttttgagaaaaagaagtcaatgggtctgggctgagtgagtgacatggagagtggtataagatgtggttggagagtggtataagatgtggtttgagaggtaggcaagaacaatgggatttttttttatttttaaataaatttgagagcaacagaaagtcattggagagtttcaggcacaggagtgatgtgctctgtcaccctggctactctggaaatagaatgtagtgggggcaagaatggaagcagggagtctagttagtaacttcagttgtccatgcaagagacaacagcagcttgggctagggtgatagccatgagtatggagagaagtgtatggatttagatatgttttgaaaatagaaacattgtatttgatggagacaacagaaaagatgaaggaaagggaaggagggatcaagtatcattcctgttttctggattgagcagctgggcaaacagtggtgccattttccaagatgaagaatagaagagtaacgcttgggtaggggtgggatgggaacatgaaataggagtcctgttctggacatgttaagctcaagatgcccattagatgttcaggtagacagctgtatatggcaatatggatgacctcaggaaaatgagccctaaaccaaggaatgctcatattttgagacatgtgtttccttcaagatccacctgtgtcataggcttgaacaggggtatgtgtaggggactgagcacttccagctacagattctctgggaaaagggccagtgtaactcttgagttcaagaaacgctgcctgtacccctgcccaacttagaagtggagcttaggttcttccaggcctgcctaaccctgatgcttttggtagctgatgtagttttaagccaatgtgctttctgagggatgccaaaagaatgagtatggaaaatgacttggtgacaaacccaggcagctcttctgtggggaagggtggaggagtcctcatgcaatctggctcccacccattcccacccaccagctgagggcattgtatccaagagatccaagggagtagagtcaagaagatgacgcatcaggaggtacaaagaaaaaggagatcccagatgaggtaatgaccaaaaaatgccataacccattacataagtgaaagtgaaacctgaggaacaaataaacaaagggtatcagattgatgtaaaaatacaagaagctcactctgtggttgctgacatacatcattgtggaaacaaaatcatgtccaaaatgactatggttaaacttggaaccacatgacaggagttttaggaagttccaaaagaatcaaaaataacttgaacaaagtagcattcttccctgggcttatggctttgagaaaggacaagtgcccctctggagagaagaacaacagtccacaggggaccaagtggctcaagggagttcatgtgaatgaaggaaactactgtctttggaatgtattggaaaattgtctgacacctgatattagtcaggattcagttctcaagtccattagattacagtaggatagttgttgttgttgttgttttctcagctgaatatatatattcagacccactgcaatttctctcctttcattcctcaagaaaaccaagaatgtggccaggcatggttgttcacgactgtaattcctaccttaggaggctgtgggtggattacttgagtccaggagttcgagaccagcctggccaacatggcgaaaccctgtctctactaaaaatacaaaaaattagtagcaatagtagtagttcccgctacctgggaggctgaggcacaagaatcgcttgaacctgggaggtggaggttgcagtgagccaagatcacgccactatactccagcctgggtgacgaagtgagagtctgtctcaaaaacaaaacacaaaacccaaaaaactaagaatgttactttacacttgtacctaataacgcactttgcattggtcactaggaaactcagaaccaaatttgtggactacccttaatgtactaagtacataaaactttaggtagcatatatcttgtgtgttaacctcattactggcttaatcttatttctataccctatttttctcttatccccattttcttttcttaaaaaatagtgtattggacatattatgtgttttgaaacaaagtagaatacaaataaacaaataagtcgactttctgtccaaacaagacagcatgaaaagcaggaacttggtggtggtatgacgtttcaatgaaccaaagaggctctgattaccgtctgtagacacccacggcacaattattaagttcattagacagagaggaatctggattcagctgtgacaggacagcaaattaaatatacatggacaaaaggaggaggcattcaaggtaagatgtgcagagccaacaaaaacaatcaaatgcgtaattctaactcctgtatgggttgatttccatgtgggccagggaagccttccaggacaacctcctttggcctgcctgggtggttacctcttatagaaactcagctgtatcttgggcatggctggtctgtcagcttttacccatggggaatagccaaactcttgtctagatgagtgggttaaaaaccacctctgatctctggaaaggttactttgcctaccttctggtcatttatttacatttcgtagtcttcattatttatttatttatttttacaattacaaaaataattaaaaaataaaactacagcagtaatataaaggcaataacaattcaaataatatcaaaatacataaaatataaaatcaagcttccctttctttccctctattctcccattccattgctcctctcccattcctcacgagtaaccactggcagttgttcagtatgaatccttctggatctttcctatgcacatttagacgtatttacacatacacataccataaaaagtctgtgtatagctttgttttttaaaaaagaatttttctactcacatttttctgtaactggtttttgtaactaatatattgtagattctacttatatacagaccaaccacactctttttaatggctgtagagtgaatcatgaaatcatagtaaaaatatacattaatgtattcagcctagtaagtagcatttacattgtttctaatattttgatagaataaattaatactgcatcagattcttatgcctgtgtcctttggctcttatttctaacagtagaacagctgagttaaagagtatacatgttgaattttgataggcactgccacactgctttccagaaagattgaccaattaccattctaccaacaaagattgtcctttgttcacattctcaccaacagtggacactgtcagtgtttttaattttgacagaactgattggcaagagcatgctatttattttgatttatagttacctgatcagtagtaagattgagctcattttcagtctctccttttactatggctacaataaaagagctgaaagtgtggtttttgatttatttcttttagatataaatgaccaatccaaatagtgatattttgaactactaatttctaagaagattcacattggaatgttacatatctccatattaggaaaatcagtcataattgaactcccaaagtcaaattacatctgatgtttattctgggattcatataattgtttttggccaaaagtattgaaagatgccagaactatattctttttttacttttgtttcctttatttcttctaaaaaaaaaaaaaacaacaaacttaggatacatgtgcagaacatgtaggtttgttacataggtatacgtgtgccatggtggtttgctgcacctattgacccgtcctctaagttccctcccctgactccccacccccatacaggccctggtatgtgttggccagaactatattctgttgattttgtaccaaatttatcacactaggagttgcaagtaacagaaagaactgtgaccaaactatggaaaaagaaatttattaggagactatttggagtccattgttgtgctaattaatgggtgactggtcaccaggaaccactaccgcagtctcatagcaggcatggtatggctggtaggtcacctccacacagcaaatgttttaagtttcttggtctctgtgctcaagagtttaattctagggggaaagcatttgattggcctaatgtgggcctcaagggaaggaaggcttttaatgacagcccccaaagactaaatccaacgggaaagagatcttcctttaaaaggaaattggggtattgttaggacgtgaaatggatgctggtcagaaaaaacaaaacaaaccaaaccaaattatccctacactaaacttaccaattgccttttcttctctttaccttgtaaacctgtcagtgcccagtcactgtagacaacctcaccggcaacatgctgcccacacctagaataggagcccatggggcagaataatggagaccgtcccattccttacagtttgtataatgcttgctcaagtatattgaactctgccagtcctggaatcaaaacattttagtcttagaacaagaactgagaggttttcatactgactttcactcattctccattctccttaattctcctcaaatgcatagaaatcctgtgtttcatgtgttcattcattcttctatgcaaccactatttatggatggcaaccctgtgctagacattgttctaggtgctgaggaaacaaaagtgaagtggaaagacatatctgccctggtgaggctggaaggagcaagcaaggctggagttggactttagatcttatctgaaatgcaataggaagccactcaaagcttttgggcaggcaagaaacatgatcagatcatatttttagacacattatgcaaactggtatatagagaatggactgcaaggagaaatgaaccaggccaagaggccagtcagaggaccagtgtagtagctagatgaaaaaaaaagatggtagcctggactagtttggtggccaaagagataaagagatgtggacagaatgaagagatatttctgaggcaaaatgaatggggtggggtagggggagtggtggtagtacaggaaagaaaagagtcaaagataactgatttttctggcatgagtgaccaagtaaatggtgactacaatgggtaacccaagaggccttggctagagggcaagcagagtaaaggatgaattacctttgggtcagtctgagcacatgtgcaattctcatgtcaagtatggagtagactgtctaaatctgaagctcaggagagagatccagcatgtgaagtcaccagtggctacaaggccaaggagttagaagacactgcccaaggagagtacagattgaacagagagggatatcaacactggacttacatattttaaatgaagaaactccggaatattttgcctcaaaaactgtgacttctgtattccacggaccactacattaatttttctcttctattgcagctttttatagtcttcaacaacaaccagtccctacatttaagaaggttaataactgagacagccttcctggtggatccatcatttggcccagcttgtagaaagattcccaactagctctaattagttccatcttatttggaggcagaggtattcctcatcatacccatatcctcatataaattgtccaggtaagttgcccacctttatttcaagggcttagagatatgcagggccactggacccaggactgcacagggtatggggtggtgatggtggtaaggtggagcttacctttaaagacagcccagccctgactgagtcccttctactctattccttattcctcatggcagatttaaggaccccactccctctacccagtcctctctggtcctacttgcccctctcctggctgtcttccttaccctagggctaaattatacagtcattggatatggaaagattgtactttgagtctttatttctgttcccatctgaagtgccctaggtaccagggagaaagaagacgaagaaggacatataccagaagcacattaataggctgctgaaaaactctgccacactttcagatgacaggtcacctacagataaatgattcaaggatcaaccaagttctgaagtttttttttgttttttttttttgggatagagtctcactgtgtcacccaggctggagtgcagtggcgtgatctcagctcactgcaacctctgcctcccgagttcaagtgattctcctgcctcagcctcccaagtagctgggattataggtgcctgccaccaggcctggctaattattttttgtatttttagtagaaacatagtttcactatgttggccaggctggtcttgaactcctgaccttgtgatccacccgcctcagcctcccaaagtgctgggatacaggtgtgagccaccatgcccggccagttcttaatactgccaggagtgctttagaaggctgggaatatggggcgaaagattagacacccaagctgttgaaaaccacacagagtttcagtaaatatatgcacaatttgaaaaatatatttgcaaaaatctaggtgtctccggtctagtccttcctattaatcaaataaattaccgagcttcatggcccagtctatgatcctagttctgaccgctgctgcccgtaaaggcctcaatgaattcctctctgagcttccagacttccttggctggtgacttgttcctcttgggacagcttttgcttgagctgagcagcctggcccccagctgtgcagggccctctctccggtgagaggaaacgctttcagcttagtctgttaacacaaacattcaaaagcaaacattcaaaagccacagatcatgttcgcataaataaaataggattgagaaaagctttgccccaagaaaccaaaggggtgtttaaaaaacagctcttgctttccaagtaggcaggcagcaaagccacagcaattccaaaggtttgtgtgcttggtagagctgggtggctgcagccgcaggcctttgaagaggaaatgccatccctggtacaggcaggcggccaacccatgagtcctgaaagtaccagagagaagcagaaagcaggggagcacagttaggaagtgaaaagggagaggaaggcaccaaggagataaatgaggagactcttcttatctagagttcccaccccagacctaagagctacaggacagaggaactcactgtgcctgacagagctggggcctggtgagtcctaggtggcgggcacagcccagagtgactaaggctgtgaggaggggtgtgcgccgtcactgaggggtggagaggggtggtggtgtctgggctgggagatgcctttgctttgaaagctttggaggaaattaactttacaaggtgcctccctgtctcccagagttattaaaagaaaggagggagcaaagaagaaatggaaaaatggtaatacctcaggaagggctgtgtgatcccaactggaggaaatgggaggcagatgaagtgacgaatgtgcaacctctcctaagggaggaagagctctgaatgtgaccttgtgcaaatggaaaaaaaaaaaaacaaacaaacaaaaacacacacaaatccaacaagagccagtgtgactaacgagaaaacacacacacatgcaaacacacacacatacagccctttgaagatctagaaatgagtgactaattaaatagcctaaaaacctccaagtgcataaagtttctgtcagtactcctgtttcaataaagcagcagtgaaagcccatagaatggcaggagtggatgagttactataaatcatggggtcaccagaaggtataaatctgggagtctttgagagtcattatagtttgggctcatagatagatatctaggcattgattgctctttcaccgataaagaaaacaaagtactggatctaaaaattcttctaaaaaaagagaattcaactgaagctacatatttcatggagcatgaagccagctgttttcctgcatgttaaaaaataagtatttaattaaaaaaaaaaagacctcttgcctgaccataaccagatcaggcaaggccaccttgcctatgaaggctagagtgtccgttatgaccttgcatgtgttggtttgcgcagtttctgttctgaggtatgtcagtgaggatactcagtggtgttgtcaggacaaggttaggacactgtatttaaaagttgaataatttcctaaatatcttttaatctctccttgatccatattaagctcactaatattttcagtctatatcaatctcttgagtactaggttccataaggttactgcttcattcactttctacatttttgtgtatcctgaagttactttagctacatttctagagaagccctcatgctctaccattctcagatttaataaattggctgatagaaacaagatccccccaaaaatctcaacagactggaatgataaaaaggattaagaataaattaggaattttgaactgaggttcagtaatcagccagttaactatggaatgatggtaaaaaaaagatggatgctgccacttaatggtcaaccatgggatgtggtgatctcaggctgctttaatggaaacataaggtccaggacaaatggtggatagcgccagcttaattctacctttcaaatatattaagttatgttccagacacaaagctttaaacggtacaaggacatttgaatattacatcaaaaaagaatgatgagaacatgaagtgattaaaaaccatagtccaggccggacgcagtggctcacgcctgtaatcccagtactttgggaggccgaggtaggcagatcacaagatcaggagttcgagaccagcctggccaacatagtgaaaccccatctctactaaaaatacaaaaattagccgggtgtggtggtgcacacctgtagttccagcttctcgggaggccgaggcaggggaatcgcttgaacctggggggcggaggttgcagtgagccaagatcgtgccactgctctccagcttgggcaacagagtgagacattgtctcaaaacaacaacaaacaacaacaaaaaccaatcaaacaaaaaaaaaaaaccgagtccatgaaaatagactgtatgtctgtgtgcgtgtgtgtgtgtttctgtagggagaggtggagagggtagagtaactgtcttgacacatttgaaggtgaggagtggcttcagtgggaagaactagaaacaaatgaaaagaaatttcaaggaactcagtataaggggaaacttttctaactatcagaactgccagaatggaatgtactgcctcaaatgataagtttcccatcactgcgggtattgaagtagaggctggataaccacttgagagagatgctttggagagaattgtgacactgaagtcgtggaagggtggggaggtgacttcatgatctctagggtcccttccagttacaagattccatatttaatatcctcacccttcattcaccaactgggcaatccctaaaaaagccatttatctctttaagctttaatattcttttcaataaaaacattacctgcgccttcacaggtttgatcctttcaatgaaagtcaaaacctgtgacttcacaggtttgatgtgaaatactagttatattcttctaggactcataataataatgtttattaaaataaaaaatgttaatgaaacacctaaaaatcaatttgcctgtctcctgacgcacattgcgaggccctgactaattgatctttatggttcttttggttctaaaagtctacagatcctgtggttctgcagatttcaattatagaagacaggactttggaaaacatgaaaagaccacttaaaagaggtgctcatttgaatttcctcacatcatctatatcacgtgggaaactttgttgttgttgcaaatgagagaagagcattccagaatgactacaaaatacgagcaaaatgttgttattaggatccatctctcagctctgcttctaggttgattttcaggctagctctccctgtggcaccaaaaatgattacagtagttctaaagctcacgtccctccatataagtaagcccaatgaagaagagaaggttgagttctagcatttctagcaaaaatctaaaagctctctttggtatggatttacatttccacccctgaatccattactgtggctaagaagacagaaatggaaaggggggtatcaatccaaccaaacaatatagttgagaatgagtggaagtggttctcaaaagaaattttgaataccagatagaaggagcaggcagtggtgaacaacagtctagcctttggctgcctaacatcaatctataacttccacacatacaacagtcatattccttccccaaagggaaataatatgaaatctcatctggttactgaagctagatccaagtccagtatttctatgttgatgtgtaaatcatgtcaagtgattctttgtcgttcagtgatatgtgggtaaataattttaaccacaccctatatataataagagagagaagacagaattgcaataaaaattcctaattgcaaagagaagaatgtgaaacatccaatggccatcagtccttgtacatactacagtctttgtggacataaatggccaagacttgcgttttgcagtgacatgaagaactggggctgtcttgctttcactctcctagaggatctcccttgtctactattatttctgtgtgagagcctcttcagagggctgcacggcttcagcagcccgctgcttgttggtgtaaatagaggtatatgtatgatgggggctaggactctgaggactgatttaggggttgggcaatcatggagtattgttttcagagttgggggtttctccgtgacagaaatccctcatgattttagttggctcccatctatatgtttctggttgtgatggttaattttatgtatcaacttgactaggccacaaggtgcccaaatatttggtcaagcattattctgcggtttctgtgagagtacttttggaagatattaggatttaaattggaagactgagtgaagcagactgccttccctaacataggtgggcctcattcaaacagttcaagatccatatagaacaaaaatgcagaccatctctcaagtgagaggattcttccttcctgacagtctttgaacagaaacatcagctctcaagggtctccagcttgccaataaaccctcatcttgggacgtggtagcctccataattgtatgagccaattccttataatcaatctctttctctccatatatataaatcttattggttctgtttttctggagaaccccaaccaacactggtcaatttgacgggttggtaataaaagttagagatctacttgattttattttaaaattattatctacaatacaggtttcagatggctattaattaatggctccatagtggcctctgtttcaggtcaatacaaaacaaaaagctggagaggggaggaacagctgctttccctttgctggaaggctacaggccagctgcatcttttcaaggggcatggatgtcccatttgacagggtagaagggtataacaagaggattacagaagagacctgggggaaatcacacttatcccaggcgcccatcttgccttactgcacttctcccttctccctcttttactcaaattaacttaactttaggaaggaatatggcttttccatccagtcaaagattcagatcactgctctcagtcaacttggattgtaggatacaggaggaaagtgcttctcatagcaaacttgatttcattcttttttggattttacaggcttcagtttcaaagtaaaccagtctcttgcaagatttacaaaggcttcatactgtaaccaatatgttcctatggtttgaatgttttgtccaagtcccttagtgctgcagcctaggaggcatatgggttgaaggcactaattatacattagacagtagaataaccaaccattatactgctacaaaataacaactgccaatggccaactgtggtaaagactattacttgtcctacaataagcatttaatactcccccttagtaagaagatccacattttttagttaggcacattgctatgcagaatagagttctttccattcccttgcaagtaagtgtggccacaaggccaagttctacaaatgggatgtaaagagaatattataaagtacagaatattataaagtatttttgggtgagctaagttacaggattttaaataaagtactttttgatgggctaaagtagctaagaattaacttgttttccatcacattcctcaggaacatatatattggtcaggggaaaggagaatttgatagcttaaaaaataagacatcaaaccaatccttacagatgctctccttgccacttagaaaagtgagaaaagaacatctggatcgttctctccctttggtccacacacaggtcagctgcaaacagtagcttccttcttacagagtccatcatctgaaagactggatgcccactctcacttggctttcctcatcacctcaagctttccatttcccgtgcttggaagttttgtttgtgagggtccaaaagtggcagaaactatttacaggcttccaaactgcattagctacagaggccaaggatgttggctgaacaactgaccaacctttccagggaaagatctgaagcagagaatttgaaaaacaccttccaatctgtcaggaacatggaaaaagttgctgtctcttttttgttggcaaaagccctaaaagcacagcatcacagcatctggttaaccaaccaccaatacttcaagcctctactgtttttctttaggaacacagaacggcacagtcaagtgtaggaccacagggctctaggaaaaattggaagttattgggctttagggactgtctttgcaccagagattcataccatatggactttaactagaatcaactgttgaagaagccaaaagaaattgtgataccaagaggtggtgtgtgacaatctcttctcacagtaaaaataacccagagtgcttagcagaaacttgggatgagtaaaattttctgaaataaaaaatgaaaccattacttgatagtctccgtactacctgagggagacaggcaacttcctttttaaacaattacatggcccagtttacttctcctttgttgtatagttcagagcatgaacacttgcttctatcccatgaacttaaggctcacatttttcaaggcctttaatttgtctgctttggtgttttcatggatgttctccaaccactccatttccatttatgagggtatgcccaagatttccaacaggtcttatttccagtaagaaattatacttctcatgtggttatcgtaactcaccccccgagctagactccctaaatttgtcctgcccaacaactacaggtgaattcaccagcatgccaaacacatgttcttactgcagctcaatataatgtcaacgtgatagtcattaacagtggtctttgcatcctcatatcctttccatgtgggcccccttcaccaggtaatcctggatagctatgttacctgaagtctgctgcaacagctttgaggagtactcaattcagcagtgcataactcacaatggacaatgaaacaaacttgatactaatatcctggaacccactgaaagacactcgtgttagcattatcagttggtttcaaactaattgaagtaagtgattgaagctgttatgcccaaaccaccaaagtatgtaaaatgcataaaagattcaagacaggagctaaacatgctaggagaaacagcctgctgtccaccactgaagagaaaagcctctaagaaaagcaacttcacaaattatgaagaaaccacccttttacaaaaagttagaatattaaaataattatttcaattttaaatggcagtaaactatggcatccactcaaattatcacaaaaacaatatgaattcaggatggcctaatgactgggatagagcccacccaggaggccatgcagcctaacgattaaggtcttgatatggtttggatctgtctccctaccaaatctcatgtcgagatgtaatccccaatgatggaggtggggcttagtggtaggtgattggatcatgggagtggtctttcatgaacggtttagtaccatctcttggggctgttctcatgacagtgaatctcataagatctggttgtttaaaagtgtgtagcacctccacccccagcgccccttgctcctgctctggccacgcatgatgagcctgcttctccttcgccttctgccatgattgaaagtttcctgaggcctacccagaggccaagcagatgtcagcatcatgcttcctgtacagcctgcggaactgtgagccaattacacctcttttctttttaaattacccagtctcaggtacctccttattaggtatttctttacgacccctgaagcccaatttacctaggtttaaatcctggcttactgattactttccatgtgaccttgaacacatactttaatcattttggacctgtttctttacccatataaaatgggtatgatggtattgtacctagttgactctagagctcccaatttaacatctttaaaatctttggagtcttaaaattgctgttggccagtccacagtcatgacgtagttgacattgcttgggcctatgtgaagaactggtggctatttctggtggcacaactggacaactccaactcttcaaaatttcagtccacaaaccttgtcctgatggctgacctaaacccttctattaataccatctgactaaggaaacaccagcatcaggacttgctaaatggatggcaataacttagaataaaatctcaagagacagtggtggaacacttcattgagaactgaagcaccagataacatcagcaagatggcagaatggaggtccctggctctagtctcccatgccaaaatcctgattagtaactattcagacaagattgcctttgtgaaaatcccagaacctgagggtgaagatgaagcaccttcctggagcataaaaatcaagaaaacagagcattagaagaataagaggagtaattttactttgacaacactgcccctctcccaggctggcacatcaccacagagagggaacccgtatgcctacagtttctctggtgtgaaaaaaatccaaaggctgacattcagctttcccagcattccagggtgcttcccatgaggtgagaaagaagtgggccctgcttaaccagggagcctagccagcaaccttgccccaccaggaacacatccaatcatcgtgcctaggtaggtggggaacccagctggtgaccatgcccaactgcaaggcacagcatgtggccccacctaattatggaacccagcctgtgttcctacccaactgtgaagcatagcccacagccccactcaatcataagagcccagctagcagcaccacctgtccagggagcacagcctgtaatcccacacaagaacaggcaattgtggaacccagtcagcagccctacctggcctcaaagcatgggcagtggccttggctgactagacactgcagcagtaagtgccattttacctgcagatgctaccagctggcccatccaaaaccccaagctggggtgactggtgtaggtctttctctgaagaagcaaacctatgaaggctggatgaggtgaccactacatctgacacacagacttcaataaaaagatacaaggatcatgaaggatgaaggaaacatgatactaccaaaggaaactaataaagctctaacaactgactctaaaaaaatggagatctacaaactgacaaagaactaagaataatcctcttaaagttcagtgaactataagaaaacacagataaactactaaataaaagtaggaaagcaacacaagaacaaaattcaataaagaaatataaataataattttaaaaaacctaacagaaatcctagaggtgaagaatacaatgactgaactgagaaattcaatagagagcttcactagtagaccagatcaagtagaagaatcagttaacctgaaaacaggttatttgaaactatccagtcacaggagaaaaaagaaaaaaagaatgaaaaagagagaagaaaggataagggacttaatcaaacaccatcaagcaaaacaatgtatgcattacagaggttccagaagaagaagagagaatggaacagaaagtctatttaaagaaataatgactgaaaactccccaaattttgggagagaattgaacttccagattcatgaatctcaaaagtccccaaataggttgaacctcaaaaggcctacttagagacacataattgccaaaagccaaacacaaagcattttcaaaactgcaaagtaactcatcacatacaagaaagccctcataagactataaacagatttctcagcacaaacgtggcaggtcaaaagagagtgggatacattcaaaataataaaaaaaacaaccaccaaccaagaatacttagcaaagctgtacctcagaaatgaagaagaaagattttcccacacaaacaaaagctgagggagttggttagcactagacctgccttacatgaaatgccaaagaaagttcttcaagctgaaatgaaaggatggacactaattagcaatgtaaaaacatgaatctataaaactcaccagtaaaggtaatatatagtcaaatttagaattctctaatattggtaaatttgatgtgacatgtaaatcactttcatctcagtataaagttaaaagataaacatattaaaacaactgtaactataataatttgttaacagatatacaatatttttaaaatgtaaattgtaacaccagtaacctaaaatgtggaaggggggatggtgagtataagtacagattcttttggtatgcaattgaagttattataggcttataatagtttgttataaccataagatgttttatgtaaacttcatggtaatcacaaagaaaaaattgtgtagtagatgccaaaaagactaaaagaaaggaatcaaagcataccaccacaaaaatcatcaagtcacaaagacagcaagagagaaagcaatgaacaaaggagttacacaacagtaagaaaacaattaaaatggcaatattaagtccttacctatcaataattactttaaacatacatgggttaaattctccaatcaaaagacagaatggttgaatgataagaaaacaagatgcaaccacatgctgcttacaagagactcactttagctttaaagaaacacataggccaaaagtgaagggatggaaagacatttcttggaaatggtaaccaaagagagtagggatggttattacttgtatcagacaaaataggctttagctcaaaaattatcaagagaaaaatgaaggtcattatatagtgattaaaggggttgacaggaagaaaatagaacaattttattttattttttatattttatatttttgagacagagtcttgctctgttgcctaggctggaattcactggtgcaatcttggctcattgcaacctctgcttcctgggttcaagagattctcatgcttcagcctcccaagtagctgggattacaagcatgtgccaccacgcttggctaatttttgtatttttttttttttgagatggagtttagctcttgttgcctaggctggagtgcagtggcgcaatcttggctcattgcaacctctgcctcctgagttcaagcgattctcctgtctcagcctccaagtagctgggattacaggcacccaccaccatgcccagctaattttttgtatttttagtagagacagggtttcacaatgttggccaggctgatctcaggtgatctacctgcttcggcctgccaaagtgctgggattacaggcgtgagccactgaacccggcctaatttttgtatttttgctagagacaggatttcaccatgttgacctggctggtcatgaactcctgacctcaagtgaactgcccacccaggtattccaaagtgctgagattataggcatgagccaccgcgcccggccagaaaatataacaattttaaacacaggacatcagaaaacctaaatatataaagcaaatattaacagaatgaagagaaataaagagcaatagaataatagggtactttagcagcccaccctgcctcaataacagagagatcatccagataatcaataagaaaacagcagacttggacaacattatagaccaaaaggacctgtataacagacatacagaacattccatctaacggcagtaaaatacacattcttcttaagtgcatatgaaacattctccagaacagatatgttaggccacaaaagaagtcttaacaaattcaaaaagactagaatcacatcgaatatctttttcaaccataacaatataaaagtagaaatcagtaacaggaggaaaaattggaaaattcacaaatatgtgaaaatcaaacaacacactcctgaggcaaacaatggatcaaagaaaaaaatcaaaaggaaaatataaaaacttcacaaaaacaaaaatggaaatactacataccaaaatgtatgggatgtggcaaaataagttctaagcagaaagtttataatgataaatacctacattaagaatgagatgagaacacctcatggttaacagcataaaaaaacaaacaaaccaaaaaaacaaaaacaaaaacaaaaaacttccaacaacctaactttaaatctcgaggaactagaaaaagaacaaaataagcccaaagttagcagatggaaggaaataataaagattacagcagtttagcaaaagagaaaaaaaacctacagtttttttaataagataaatgaaattgacaaactctttagcaagactaaccaaggaaaaaagaggactcaaataaataaaatcataaatgaaagaagagatactacaactaatactaaagaaatacaaagaatcataagaaaatactatgatcaattatacagcaacaaattgcataacttagaagaaatggataaatttctagaaacatataacctaacaagactgaatcatgaaatggaaaacagaaacagaccaatgcaggtaaggagactgacccagtaataaaactttccaacaaagaaaagccaaggaccagatgacttcactgaattctaccaaataattaaagaagaattcataccaattcttctcaaactcatccaaaaaattgaagaggaaacacttccaaacttattttatgagaaaagtattaccctgacagcaaagctagataaaagcactaaaagaaaaaattaaaggccaatatccctgttgaacctagacacaaaaattcttatttttgtatcttattttatgagaagagtattaccctgatagcaaagctaggtaagaacactaaaacaaaaaattcaaaggccaatatccctgtcgaacttagatacaaaaattctcaacaaaatactagcaaactgaatttagcagcacattgaaaggatcatataccatgactaagtgcaacttatccctgggatacaaagatggtgccacatgcaaatcaatacatgtgatacaccacattaacagaatgaaggataaaaatcatatgatcatctcaacagatgcagaaaaagcatgtgacaggctggagccaagatggccgaataggaacagctccggtctacagctcccagcgtgagcgacgcagaagacgggtgatttctgcatttccatctgaggtactgggttcatctcactagggagtgccagacagtgagtgcaggacagtgggtgcagcgcactgtgcgtgagcggaagcagggcgaggcattgcctcacttgggaagcgcaaggggtcagggagttccctttcctagtcaatgaaaggggtgacagacggcacctggaaaatcgggtcactcccaccctaatactgcacttttcctacgggcttaaaaaacggcacaccaggagattacatcccacacctggctcggagagtcctatgcccacggagtctcactgattgctagcacagcagtctgagatcaaactgcagggcggcagtgaggttggggaggggcgccattgcccaggctcacttaggtaaacaaagcagccgggaagctcgaactgggtggagcccaccacagctcaaggaggcatgacggcctctgtaggctccacctctgggggcagggcacagacaaacaaacagacagcagtaacctctgcagacttaaatgtccctgtctgacagctttgaagagagcagtggttctcccagcacgcagctggagatctgagaacaggcagactgcctcctcaagtgggtccctgacccctgaccactgagcagcctaactgggaggcaccccccagtaaaggcagactgacacctcacacggctgggtactcctctgagacaaaacttccagaggaacgatcagacagcagcattgatggttcacgaaaatccactgttctgcagccaccgctgctagtacccaggcaaacagggtctggagtggacctctagcaaactccagcagacctgcagctgagggtcctgtctgttagaaggaaaactaacaaacagaaaggacatccacaccaaaaacccatctgtacatcaccatcatcaaagaccaaaagtagataaaaccacaaagatggggaaaaaacagaacagaaaaactggaaactctaaaaagcagagtgcctctcctcctccaaaggaacgcagctccttaccagcaacggaacaaagctggacggagaatgactgatgagttgagagaagaaggcttcagacgataaaactactccaagctacaggaggaaattcaaaccaaaggcaaagaagttgaaaactttgaaaaaaatttagacgaatgtataactagaataaccaatacagagaggtgcttaaaggagctgatggagctgaaagccaaggctcgagaactacgtgaagaacgcagaagcctcaggagcccatgcgatcaactggaagaaagggtatcagtgatggaagatgaaatgaatgaaatgaagcgagaagggaagtttagagaaaaaagaataaaaagaaactaataaagcctccaagaaatataggactatgcgaaaagaccaaatctacatctgattggtgtacttgaaagtgacgtggagaatggaaccacgttggaaaacactctgcaggatattatccaggagaacttccccaatctagcaaggcaggccaacattcagattcaggaaatacagagaacgccacaaagatactccttgagaagagcaactccaagacacataattggcagattcaccaaagttgaaataaaggaaaaaatgttaagggcagccagagagaaaggtcgggttaaccacaaagggaagccaatcagactaacagcggatctctcggcagaaactctacaagccagaagagagtgggggccaatattcaacattcttaaagaaaagaattttcaacccagaatttcatatccagccaaactaagcttcataagtgaaggagaaataaaatactttacagacaagcaaatgctgagagattttgtcaccaccaggcctgccctaaaagagctcctgaaggacgcactaaacatggaaaggaacaactggtaccagccgctgcaaaatcatgccaaattgtaaagaccattgaggctaggaagaaactgcatcaactaacgagcaaaataaccagctaacatcataatgacaggatcaaattcacacataacaatattaactttaaatgtaaatggactaaatgctccaattaaaagacacagactggcaaattggataaagagtcaagacccatcagtgtgctgtattcaggaaacccatctcacgtgcagagacacacataggctcaaaataaaaggatggaggaaggtctaccaagcaaatggaaaacaaaaaaaggcaggggttgcattcctagtctctgataaaacagactttaaactaacaaagatcaaaagagacaaagaaggccattacataatggtaaagggatcaattcaacaagaagagctaactatcctaaatatatacgcacccaatacaggagcacccagattcataaagcaagtcctgagtgacctacaaagagacttagactcccacacaataataatgggagactttaacaacccactgtcaacattagacagatcaacgagacagaaagttaacaaggatacccagtaattgaactcagctctgcaccaaggggacctaatagacatctacagaactctccaccccaaatcaacagaatatacatttttttcagcaccacaccacacctattccaaaattgaccacatagttggaagtaaagctctcctcagcaaatgtaaaagaacagaaattataacaaactgtctctcagaccacagtgcaatcaaactagaactcaggtttaagaaactcactcaaaaccgatcaactacatggaaactgaaaaaccttctcctgaatgactactgggtacatgacgaaatgaaggcagaaataaagatgttccttgaaaccaacgagaacaaagacacaacataccagaatctctgggatgcattcaaagcagtgtgtagagggaaatttatagcactaaatgcccagaagagaaagcaggaaagatccaaaattgacaccctaacatcacaattaaaagaactagaaaagcaagagcaaacacattcaaaagctagcagaaggcaagaaataactaaaatcacagcagaactgaaggaaatagagacacaaaaaacccttcaaaaaattaatgaatccaggagctggttttttgaaaggatcaacaaaattgatagaccgctagcaagactaataaagaagaaaagagagaagaatcaaatagacgcaataaaaaatgataaaggggatatcaccaccgatcccacagaaatacaaacaaccatcagagaatactacaaacacctctacgcaaataaactagaaaatctagaagaaatgggtaaattcctcgacacatacaccctcccaagactaaaccaggaagaagttgaatctctgaatagaccaataacaggctctaaaattgtggcaatgatcaatagcttaccaaccaaaaagaggccaggaccagatggactcacagccgaattctaccagaggtacaaggaggaactggtaccattccttctgaaactattccaaccaatagaaaaagacggaatcctccctaactcatttaatgaggccagcatcatcctgataccaaagctgggcagagacacaaccaaaaaagagaattttagaccaatatccttgatgaacattgatgcaaaaatcctcaataaaatactggcaaaccgaatccagcagtacatcaaaaagcttatccaccatgatcaagtgggcttcatccctgggatgcaaggctggttcaatatatgcaaatcaataaatgtaatccagcatataaacagaatcaaagacaaaaaccacatgattatctcaatagatgcagaaaaggcctttgacaaaattcaacaacccttcatgctaaaaactctcaataaattaggtattgatgggatgtatctcaaaataataagagctatctatgacaaacccacagcaaatatcatactgaatgggcaaaaactggaagcattccctttgaaaactggcaaaagacagggatgccctctctcaccactcctattcaacatagtgttggaagttctggccagggcaattaggcaggagggtattcaattaggaaaagagggtattcaattaggaaaagaggaagtcaaattgtccctgtttgcagatgacatgattgtatatctagaaaaccccactgtctcagccccaaatctccttaagctgataagcaacttcagcaaagtctcaggatacaaaatcaatgtgcaaaaatcacaagcattcttatacaccaataacagacaaacagggagccaaacaatgagtgaactcccattcacaattgcttcaaagagaataaaatacctaggaatccaacttacaagggatgtgaaggacttcttcaaggagaactacaaaccactgctcaatgaaataaaagaggatacaaacaaatggaagaacattccatgctcataggtaggaagaatcaatatcgtgaaaatggccataatgcccaaggtaatttacagattcaatgccatccccatcaagctaccaatgactttcttcacagaattggaaaaaactaccttaaagttcatatggaaccaaaaaagagcctgcatcaccaagtcaatcctaagccaaaagaacaaagctggaggcatcacgctacctgacttcaaactatactacaaggctacagtaaccaaaacagcatggtactggtaccaaaacagagatatagatcaatggaacagaacagagccctcagaaataatgccgcatatctacaactatccgatctttgacaaacctgagaaaaacaagcaatggggaaaggattccctatttaataaatggtgctgggaaaactggctagccatatgtagaaagctgaaactggatcccttccttacaccttatacaaaaattaattcaagaggcattaaagacttaaacgttagacctaaaaccataaaaaccctagatgaaaacctaggcattaccattcaggacataggcatgggcaaggacttcatgtctaaaacaccaaaagcaatggcaacaaaagccaaaattgacaaatgggatctaattaaactaaagagcttctgcacagcaaaagaaactaccatcagagtgaacaggcaacctacaaaatgggagaaaattttcgcaacctactcatctgacaaagggctaatatccagaatctacagtgaactcaaacaaatttacaagaaaaaaacaaacaaccccatcaaaaagtggacgaaggacacgaacagatacttctcaaaagaagacatttatgcagccaaaaaacacatgacaaaatgctcatcatcactggtcatcagaggaatgcaaatcaaaaccacaatgagataccatctcacaccagttagaatggtgatcattaaaaagtcaggaaacaacaggtgctggagaggatgtggagaaataggaacacttttacactgttggtgggactgtaaactagttcaacccttgtggaagtcagtgtggtgattcctcagggatctagaactagaaataccatttgacccagccatcccattactgggtatatacccaaagggctataaatcatgctgctataaagacacatgcacacgtatgtttattgcggcgttattcacaatagcaaagacttggaaccaacccaaatgtccaacaatgatagactggattaagaaaatgtggcacatatacaccatggaatactatgcagccataaaaaattatgagttcatgtcctttgtagggacatggatgaaattggaaatcatcattctcagtaaactaccgcaagaacaaaaaaccaaacaccccatattctcactcataggtgggaactgaacaatgagaatacatggacacaggaaggggaacatcacactctggggactgttgtggggtggggggaggggggagggatagctttaggagatatacctaatgctaaatgacaagttaatgggtgcagcacaccagcatggcacatgtatacatatgtaactaacctgcatattgtgcatatgtaccctataactgtaagtataataataataaaataaaaaaaaagaaaaagcatgtgacgaaattcaacatcctttcatgataaagactctcaacaaattaggtatgaaaggaatgtatcttaacataataaaggccatatgtgttaaggctatagctaacaccatactcaacagtgaaaagctgaaatctttttttgctaggatcaggaacaagacaagggtccccactctcaccagttctattcaacatagtactggaaggcctagccttagcaatcagtcaagaaaaataaaaggaattcaaatcagtaaggaagaagcaaaatagtatgtttgcaggtgacatgatatggaaaacccaaaagactccaccaaaaactgttagaactaatacattcaatacagttgtaagatacaaaatcaatatacaaaaatcagttgtttcttttttttttttttttgagacggagtctcactctgtcacccaggctggagtgcagtggcatgatctcggctcactgcaagctccgcctcccaggttcatgccattctcctgcctcaacctcccgagtacctgggactacaggcacctgctaccacgcctggcaaattttttgtatttttagtagagacggggtttcaccatgttagccaggatggtctcgatctcctgaacttgtgatccacctgcctcggcctcccaacgtgctgggattacaggtgtaagcctctgcgcctggcaaaaaaaatcagttgtgtttctacatgctaacaataaactgtttgaaaaagaaatatcaaaaacaatagaatacttagaaataaatttaatcaaggaagtgaaaaatctgtttactgaaacctacaagccatcgatgcaagaagctgaagatacagataaatggaaagatgtaccatgttcatgaattgaaaggattttgttaaaatttccatactacccaaagtaatctacagatccaatgtaatcctaataaaaattccaatgccttttttttttttcacagaaatagaaaaagatgattctaaaatctgatggaaccaccaaggagcttgagtggccaaagcaaaaagaacaagctgaaggcatcacaccacccaacttcaaaatatattacaaagctatagtaatcaaaacagcattgttctccataaaaagacacatagaccaaaggaacagattagatcccagaaataaacccatgcaactatctttgacaaggctaccaagacataatgaggaaaaaataatctcttcaataaatgatgctgggaaaactgtatacccacatgcagaatgaaattggtccttgatgttttatgtgactgaagcagtttgaaaaggagagtgaatgagagagtaagcaagctgtaaaattaggttgggaccaagtcaggggttaccaaatatcaggctgagctttggtactttatttggcaagaaaataaaactggaaatagaattatatagcagctcatcaaatgctaaaggatgcatttggttctaaagttcaaaatgagtacagtacatcacactccagtatggaaaatgttcatgttataggtcattttaatgaacacatgcacacacactttagttttcaaagaccaaagtttaaagaaaatactttttagtcaagtacagatccccaaaggtttatttaaagccaatttttatttaagtagtcttcatttttgaagcattttcccctagtactctaatttcaaaatcagtatctctcaaatgctgatgccactgggaaaaatttccaaattggtaatggaaacatatgctatgtgcatctgctcaaactagcaacaacatgatgtcaaataaaaatggatggcattaaaaaaaaaatccaaaaacctataatggcaactcaaagcagcaataataagaagaagagattaaaatctctagttaaaaacaatcaagacttgcagattaaatctgaactttactccttctgttagtacaaatcagaaacttcttgctactcaaattcaaacagggtgcaatgaatgtgttactttcgtattcccagtaactacctttcctcacctgctccctacattctggctttcttctaaaaatttccccctcctttgggtgaattcctctcttgattagctcaggaacggaatgtgatccaatctgggcaaaataaaagtacttctccaaaattttacatagcttgctttataaaagctttcagccttgttatgctaaggtaagctgaaaatgtcaattgctgttatccaccatcctctcacctcactgttcctcatcccatacagaatatccccaaagggaaaatctgaaaagaaaaccaatccataaagaagaaaataatcagagccaagtgtgtaggatggcaagatgactgcttttgacgtttggacccaggacccagtcattgcctggacttccctgtatataagccaatgaactgcccttcatgctgacactattttgagtttttgtcacttgcatataaacaacacattttaatgcaacagagtacagcttagtccattttgtgtcgctataatagaatatctaagactgggtaacttatttttaaaaagagttttatttggctcatgattctggtggctggaaggctcaagattgggcagctgtatctggtgagggtctcatgttgcttccactcttggtacaaagtgaaaggggagtaggtatgtgcaaagagatcacatgggaaggcaggaggcaaaaaggagaaaatcaagaaagccagactctttagtaacccttgcttgtgagaactaatccattcccacgacagcaagaatgagaactcactcaccccagtaggagggcattagtttattcatgtgggatctatctgcccccatgacccaaacaccttccattaggctctgcctcccaacactagcacatggggaatctaatttcaacatgagttttggtaggaacaaactatattcaaaccataacagtatatgattaaataaaaatagaccagcatctttatgtaaaatttagtaacatgaaataaggtacaacacaaagtatatgtcaacataattaaacaaaaatgtataaagaaaattgttggcattatagttatgtgattaacattttaattatatgtcatgaaacccaaatcccactacttgctacagggaaacaaactggatcaactacattttggaatcttaaatatctatttttaataactttttttttttttgaggcagagtctcattctgtcacccaggcagtgcccaggaatgcagtggaacaatctcagctcactgcaaactctgccaccagggttcaagtgattctcgtgccccagcttcctgagtagctggaattacaggtgcctgccaccacgcctggctaatttttgtatttttagtagacacagggttttgccatgttggccaggctagtctcaaacacctgaccttgtgatctgcccgcctcagcctcccaaagtgctgggattacagctgtgagccactgtgcctagccaattcatatttataaaaggaataggtacaagttttatttactataatttatgactattaatcctatatgtataattagcaattatgaaaggcctatcttctctttgaaatcactgtttaaaaaaataaagaaaaccaggtggagcttttctccttttaaaatgtgattcatgaacaaaatgcaggatgctgaacttaacatgggtcaaggagtttgtttacacaccagaatttgacaataagctaacatggagagggcctccaaaaagatattgggtctcaatgctacaaacatctagggttttcagttagttattccaatttcattctctccaagccattggtaattcactaaaacacacgtgtattgtaaatcttacgggaaaaaatatgcatattaatcaaatgagttgataattatatttaggggaattctaagagttatattctttcctaatagcctataattgaaaagtctaatagaattctagaaaataaagatggcaaagatgcattagataatatagatttctttttttcctcctgagcagtggaaactacaggatagtttgttttctgtccaggtttcaatttaaattcagaaggggggatggaactcaagacttttcttggaaatgagactacatcataacagatttcactgtcaaaaaattcctatccaccctcatattcagatcatattcagatcgcaagttctttttgtatacgttatcccacttctcctaataacaacacgtttcactcaattcatctatttcttgctggtttcaagaagacacatttcacttttgattataaatgaattccttgaaatcttatttgtctctccaataatactgtgaacaacgtaattctacacaaattctttatcatatattagaagattcctgatgttgctttagagattataaatatatatgtatgtatgtttctcaagttgcaaggactcactttctatgaactttctatgaatcacattccattagtactttcataccaagggtccttctggcattattgtttttcgattctcttctccagtttctaccccaagttatacttgtgtcccacaaatttatcttctgctcatcttctcattctcttttcatatttcagatctttttaagtctccttaactaacgtctctggtttctttttggtaaaaaacttattccaactgtaactaaaaatcaatttcattaatgtccagttttatcattgctttttaaccattaagtacacacatacaatatagatgtaacaatctttttactctcttacagtcatattgcagtttcacagtggtataaactccaataaaattaagaattttttttcagtacatgagatcaaactgtatacagagctgccataacgtataagttaagccatgtatatacattaatacatacatatatgttccaataacatgttgaagatttcccaggtttttttttctttaagttattgctagacatatcaaaacacagtataaaactggtcatcacaacacccttctgcagtaatgatgagagtgggctaggaatgtgatgaaaggcacagaattcataagacttgagtaagtagatccaaatttgttatcactaatggctcaaacaatgtggagccactgattttctgaagtgaatataagaaacagtagttaatagtatttatccaggcttctagtataagacattgtactaggagtttctcaagtagaaaacttgtctcacaagggtaagttacataaaaactccaaagaagaaagggcaactgatagaagattagttctcctgtggctagacggtgcgttgtacagcctttccgtttagtgaggttctactaaagggaatgccaactttgtggttgacatgggtgatccttgggtttcgtcacgcatgaaattaacaaataaaaaatgttcaaggccaggtgtggtggctgatgcctgtaatcccaatgctttggagtctgaggtggaaggattgcttgaggccacaaatttgagaccagcctgggcgaaagagcgcaaccctgtctctaccaaaaaaaaacaacaacaaaaaacttagctgagtgtggtggtaccagcctgttgggaggctgcagtgagaggaccattcgagcccaggaatttgaggaagctatgctcataccacttgcactccaagaccccatctcaaaaaaagaaagaaaaaagaaaaaaaaagttttcagtttatggaattaagcaattaagcatattaaaaagccagggcctaataagtactatgctgatcaagtgcaaaggagagttcttaatatgaataaatgggtcttacaagtcaattaattcaagaggttataaaatacattttttaaaagagttaagcttatttttcatacaaagaaaaaattccaatcacccattgacaataccccaatcagccaacagcccatcaatgcagagtctgctgcagttgtctggaagttttcactttcttcttccagaaaaaatgctcaattttcattgccaacgttcttggtagattcactcttcactagaaaaaaataagtaaacatacagtcaagtgtttatatttttctgtttaggttgctctgtccctcttctctccctccttctgatgtacagcaaaagcactgctcacagggacacacaaaccgcgtcatgtcccaggcagctaggatatacaattctggccacaataaatagagaaatgatgtctgaaagtggcaattatattttgtgaggtaacatccttcctgactctgtggaagacttaggaatggtcacttcacaatgtggttatgatccatattcatgccactgaatagatcactattatcctggccagccacttgtggttagaataaattttttccatgatttttttttaaacttaattgagggtcagtatatgttgagtgaatgtggagtgacagaagactagctaatcgccatctccttcctttcacaggaaagaagaatagaaatggagctcctctgacacccctgtcttgcttagagcaagcaagactaactatgactcactcactaaactgagagttcctggaggacagaaactcgacctttcttctctgtatctatcctcacaatttagagtatgtttgctgaatcaatgtaactgcaaatcattctgccttttagtgttttttccctaaatctgcaaaatgggaaccggagtaagtgttctatttcatggtcttgtgaagctaaaaggaaataataggtagtaactctttaaaaattgtcatgctaaaatataggttattttgaggcttatagctgttatctccactgagtagataagaaaaataaagctcagagaggcagagcaaatgctcaagggaccacagcttataaaagctgatgctagaagcacacacctggaactgcctcatattccaactgacaagttccctggggtttgctgttgtacctagacttcagattgtaccagcaaccacaatggtgtttactgagccctttctaagagtaaggcactgaaataagttccatccaagatatcatcccaatctttgtgaaattttatgaactttagcagtccatccagtgcctccatgatattaaaagtttttttccttctctggctgtctctgtacttcaggtaaactctattttagcatctattgtataataagttttacatgcgtgttccagtgccaaaaatcctcctctctctccctgcaaaaggaaaagaaagaaaagagaagtaaggaagaatgaggaaaggtgagcgagggagaatggatgaaagatttactggcccaataagagactgatatatgagtagctgctatgccaggtattttcactaattccagtaatcaattttgggttggattccttctctaaaggctgaggcattttctaatcttgagttacactagaacatcaaaaagtttattttgctgacatttctaaattaataaagatttttagcagtatgggacattttcccctttctttgcctattgaaggtgcccagttttcttctttgaatagggttccattcttttttccttagattgaaatgcagcatgcttttctccctcatctaaatctgctagtctaataacagcctgtgaagcaagttacaccattctgagcacttcccactggactgatataaggtaggtaatcagcacttagcatctccaatctagtggagtatctaaatagctctatcttttccagttaaccttttccattactgaaaagcaacaaacaaacaaaatcttggctactgctgattaatataggcagactcaaataattatggcaatctacaatcataacaaatattagaacaaccatcaggtgtgggaactactgaatcccagaccagaaacacatgtacccccaaattaggaaagagacaacttgtactataaactcaggatcaaaatccaacttttttacctccagagagggaaggaatttcaaggctttccaaagaaaatgccctcttcttacataatccccttccctcatcaaggtatcaccctgcaaaatatctgatgctgtgagaatgtataaagaaacagacaccttgaagtacttacagaaagaaatgcatgtacaggaagacctgggcattacttttaaggtgtgtgtacttacgatgtgacaaaactggtatggttttaaaatcctgtcagatacttttagttctttgctaacacagttctaaataatcctctgtactaaaagcatgagtcatttgtgttcctgtaaataagtcaaacatcatatatccaccagaaaaatagcaaattttactcaataaggctcccagtacgctagtaaagtagtcttttcttattgcttcattacaggaagccttacttgaatgtacattcctaaacaaggtgaaaggagagctgtgtgtgctgtttatttatacagaagatgtttgccctagctactaacctacattactaaacaacttttcccaaaaccaacatttgagagagcactgtgaatttattaagaaaaaagcaacataatacaaagcttaaacaaagtgaaactggccatttaaaactaaaattcctaatttattctgagaaaaaaattctcaaattgtgaaaaatattaatgtcaagaataaaaataagatttagaggcccataatttattattagaaacatcatgtttgctaactaaaatctggtttcaagttgtagcactgatacaattttggccactttggaaaacaatttttttctattaatttttgcaaagaaaaaacactacgcacaacagagaataccttacaatataggttactgcatcttacagcctgtaatgctggtataacaataaaacttaaactacccatttcaaatactacttaaaaaatagtatcaatccaagacaaagattctatgctcctctggagtttgttacaacaaaacctggcctgtatctgtaattcttttcgttgaaagtgctatgtaatagttttggattaaggtgggtaatcttcctcacttcttaaaggtagtgactaaattttactcatcctctaaaatcttgcattcagaagcacagttagtttactttaatcagtagttacaaatatagatgagtcattttatgtactaaacttttatgtacattttttccagttctagtacttccctatatcacaaaatcagagaaacaaaatcagagaaaataaaaccagtgggtttagaaaaggagataaagggtaaaggcaatggcattaacttattctaaatgctgccaaatttttaaatataatgttccttgcaacattttctccttctataaggtaggatactaggctttttttttttttttttaaccattcaacattttcattgtcaactaaaaatgttttgtaatccctcattttagaaatgtctaaagtcttaactatggagtaaatgtacgtgatcatggacagttacttaaagactattagcttaaaaaaagacaaaaaaatacatagaaccccatgctaaaaaaaagtccttttatagccattcaatttgatttattcacttaaaattggttttataagattatacgctcttagaaacagaagagtagcagcattgcatttacctggttcttcacattaactagctatacagtagatcctgtaagtgtgtaaatatagtgggaaaacacatataaagaaataagggtggacatattttgctttggtttctctaaagctattctaagcattacagaaacaaatttacacttaccttggtgaagaactttcatgtcattattggatcctttcaataccacatgtaatgttggatactcaatgatcactttgttcctcaaattgtctaggagacttttataaggatctagttcataatatcttattaataaaaaaaaacaaaaaaccaggaaacactcttaatattcaaaattactaatagataaatatatgagagtattttacattaaaaattttttaaaggtgatgacaattcagtagttacttccttatagcatagtaagtttaataccttctaagaaaggcaggtacaagagctattattatagaggttctaaaactaaataaaaaaaaatcaaatattctgacattaggaaagctctaaaacaagttactaattttctttttctttttttgatatggagtctcgctttgttgcccaggctggagtgcagtggcacaatctcggctcactgcaacctccatctcccaggctcaagcgattctcctgcctcagcctcccaagtagctgggactataggtgcgtgccaccatgcctggctaattttttttgtatttttagtagagacggggtttcacagtgttagctaggatggtctcgatctcctgacctcgtaatctgcctgccttggcctcccaaagtgctgggattacaggcgtgagccaccatgaccagcctacaagttatcaattttcataccaagaaatagttaaagactcttatataatatttatgttggccgggcacggtggctcacacctgtaatcccagcactttgggaggtcaaggtgggtggatcacctgaggttgggagtttgagaccagcgtgaccaacatggagaatccccatctctactaaaaatacaaaattagctcggcatggtggcacatgcctgtaatcacagctactcgggaggctgaggtgggagaatcgcttgaatccaggaggcggaggctgcagtaagccaagatcgtgccactgcactccagcctgggcaagaagagtgaaactctgcctcaaaaaaataaaaaaataaaataataataatatttatgttgttatttttcttgaataaaagaatgatgagctaactatttgaattcctcaaatatatttattttgagccttaaagacaaccaatcaccttatgacaatttctagtaacatggcaataaaataactggttacaaaattggcttttggaaaaaagtcaattattctaattataactggtttccagaaatttatattgccatgtaaaatttaagaaatacagagtttatcgtgacatagctgccaaatgtgtcacaggtaattagatgctaatggtcattaaagcatgaaattctcaaatcattactttaaaaaaataagtctgaggtggctgaaaatgcatccccagaacattcattcttgcttgctttctggggtgggagtgaaaggggtggaattctagctagctcactagcgggtacatatgagaatatgttggcatgttaatgtcatttcatgtcaaagaagaaaaagctgagaacatgtcaaccagtctagtgcagaagttctccagcatttttattcatctctaccaatgacaggtgatattcacatgcaaaacacatatctcatgagatccagcctaatggctgtaactccatccttttatctcctgctcaaaaaagcacactggaacacaagtgatcaagagtgaggttatcattgggatacatttaaatttgctgtaattttaagagtaaatcattcacaaactttggtatttcttaattagtaaaaaattatctgcaccataatcatagctgagtaagacatgcaggacactcattaagaaatgtgatgtagtgatttctccatgttctgagtttgtctcacgcaatcgttttcaaatcaggaaaaatataaaagtgcttaacaaaatgcagagccaagcttactaaagttagagaacaactgtaaaaccaaaactttacttatgcttccctgaccacacaccccagcctggaattattctttttaaaattgcagaatattctttatgttgaaaagaaacttgaaatgcaaaatactgtttttctaaaccagccaccttagtgcccacagatcatagaattcatacattcttttccctgtgtgtaatgtaatacagatgtacttacaatactttaaaagtgtttccagcattcaaggattaaatgcttcacatcttttaaacattatttctctttgaaataagcagtgtttttttcaaagttagtagcaattatataaaaaagaaaaatgagattatatcagatacccaagtaaaagattaacttacaaagtaaaatataaaatggtgataactaaatttttcttgggaggaaataagacctggactctcaaacaggaacttttcaagtggcatcctacaagcacttggcaataacttatcttctgtgcattttagctaaatcataaggcttctaatgaaaggcatttttcaaataagggaatgttttttacttgtttcagtttttggtaaataattttcagtgcatatttaatgttttaggtatctgatttctttttgtaatattaaatcttaattgggtttctctagatttccaaagctgaaaccaagaagcaacaaaaagagttcttcaaaggccacatgagaatcagagcctaaaattattgctgatataaaatatgttcctagcagaggaatgttcagaggtacataaaaattactatgcaacaagttaaacatgctttggatcctaaaactgtaatgattacacttatttggatcctgaaactgtaatgattacacttatttggatcctgaaactgtaatgattacacttacttggatcctgaaactgtaatgattatacttaaaaaaacttggttcctgttttacatgctaagcaggcacttaaaaagcactaaggatgcaaagatttataagaggcttgtcaactgataaattattttaaaaatattttatgcaatgaaaatctggtatgttgtgtggttttgattagaatcagtggattttatttagtgtttagcctaaaatgttgcaaacttctaatcagcaatacgctattgagtgtcagtaagcttctgggccacagctttccaacctgttaaatgaagcgttcagatttcactaaataatcttttagctgaaattctgaatttcttagatttttctactacaagtggttactcttaatctaccattaatatttatcagtaatttaaaagtaaattttgtaaactgttcataaagaaagcctatcagacacatatggggttaatattttatggacttggaatttagttaaatgaagcaataacttttactggttgtttgggtttggagtttaacgctgagttaaagttccggctccatcattcactggtctgtgatcctggacaagttacttaagttatttaatcctcagtttccatgcttgaaaatggggataatgacagtatcacttcagagagttactgtgagggctaaatgataaaacacagaaactgctcactcatttatttaagccctaagcacatgtgtttgttttatatttttatttaccaaaaataacaacactttcctatagaaactctagttcaggacaaagtcactggatttcattagcagtgaacatactgcctttatgtgcattttgcattttaaatgtagccttacaactttctgtatgaccttcaaatcattattttattgtcacatttacttccaagaagataaaggtactttgaatgtttctgtttccactatcttgaagcaagttttaagagcccagctttgcactgcctaaaacacttaggtttagctcctttgcaagccattaagctactgaatcctaagggacagctttatctttttgaaattttcacaaactctggtatttccattaatataatgtctctgctaccataagacaaactacttaggtttggaggaattaagatactaacatttgtcttttctcttgccctctgggacccttcttagacatttcctcttgttatttcacttgctcaccctcacaggttcactggctgaccctgctctgggcagcctcatgggcgcattatgagggcagaacggctcagtgggccaaacaggtgttacagtgacatatataaataaaagttgtcatgataatcaagggtgtgcttttaatcttgactctgtcactaactttcaaagaaacaggccaagctcttgaacttctttctctgtactttattagcaaattagtgtgctttaaaaaaaaaaaaaaaacctcctcataaccacaaaagacaagtttttaaagaaacgaaatcacaaaccactttatgtcccatctgatcactgacactccatggatcatcgccccttccacctgctaaaaaataccaaaactaagtttgaatttctccaaatttagcaatctagtagcaggccctaggccacagtatttttccactaaaataagatcattgaattaggtgatcactaagatcccttcagctctaaatttctacaatttttgatacttaactatattttttcacagttgtatttatttctcaatctaggtttctagattaaaagttcaactaaattattccaaaaaagttttaattcttcttttatttaaactttaaaaggtattatttaaaatttctccaaataatacttctgtgtaacaatttttgcaactcctaatgttcaagtcatatagaaaaggattttgccatagttaatctttttctcacccaatctctcttagttttcatattttaaaaatcacagtagttaagttagtggtttgatgcactttgttttgggatttttatatatccacataaatgaggacgatacctgcttgacatggagagtagatcatgaattgtgtagtacagacatatgtcttaattcagaaagctcaccagttcagaactgcatttggtaaattatcctattctaaccatgatatttaaactatggatgtggttaaataaaatggccaactatatattttaaaacctgttttaaagaggggcttacaaggctctgacttgttctagatattatttctttgaaatcttttctgattttcgctggtaaattcaattacttttaaatccacaaggcttgagttccagtcttatcactggtccttatgagctataactccacaaggagactcagttttgcccatcaatataatggtaggaaagatacctactcatgggttagtttgtaaggactataacaggtgaaaatgtttccaaagtgtaacttgctaagctagcatcagtaataagattttatactccaaaagtaatttggcactcctagcaaggaaatgacatacttatcaggaattatatttatgatttatgacagagacagagactagttagtagaaaaagcatgaactgaactcttgacaaacaggtctgagtccaaatcttagccttataaactgtacaaacttagtttctttgggtaagtcaatttttcagagcctacgattcctaatcaggtaaagtagagaagacatagtacatactttattagaattaatgcatgtgaaaatgttataagcattagcctggcatttattcttcaattgattgctcaaatatttacttagtgtctactatgcacaggtagtctgctaggtaatggaagttcatagaaataaaccttgcactttatggggggaggcagacaaacagctattgcattcattggcacaagtatcatgatagaaatgtaaagtgacactggctagtaatggtttttcctttctatagttagtactcttttcaagatctcttgtaaggcaggtctggtggtaaaaaactccctcaacattcgcttatctgaaaagaatcttatttctcctttgcttaagaaacttagtttagctggaaatgaaattcctggttgaagatttttttctttaacaatgttgaatataggcccccaaactctctggcttgtaaagagtttctgctgttagcccggtgtaggtgatccgtctctgtagccactctgtaggtgacctgccccttctctctagctgcttttcatttcattctttctttcatttcgaccttggaaaatctgacgattatgtatcttagggatgatcttcttgtggagaatattgcaggggtctctgtatttcctgaatttgactgttaacctatctagcaaggatggggaagttttcatggacgatatcttaaaatgtgttttccaagttgtttgctttctccccatccccttcagggatgccaatgattcgtagatttggcctctttacataatcccatatttctcagaggttttgttcattcctttcattcatttttctttatttttgtctgctttatttcagagaacccatcttcaatttctgagattctttcctcagcttggtctagtctgctgttaatacagtgattgcactgtgaaattcttgaagtgtatttttcagctttgtcagatctgttaggttcatttttacattggctattttgtctgtcagctcctgtactgttttattgtgattcttagtttccttggattggggcttgccattctcctgaatcttcatgcattatccttagcaaactaatgcaggacagaaaaccaaatgccacatgttctcacttataagtgggagctaaatgatgagaactcatggacacaaagaactaggaactaggtgaaggtggagggtgggaggagggaaaggagcagaaagaataactactgggtactaggtttagtacctgcgtgacgaaataatctgtacaacaaacccttgtgacatgattttacccatattacaaatctgtacacgtacccctgaacctaaaagttaaaaaaaaaaagtaaagctaagtagatcctcagtaaatattctctctcgttctgttgttgttttgttttgttttgagacacagtctcgctctgtcacccaggctagagtccagaggcacgatctcagctcactgcaatctctgcttctcgggttcaagcgattctcctgcctcagcctcccgagtagctgggactataggtgtatgctgccacactcggctaatgtttgtatgtttagtagagacaggtttcactatgttggccaggctggtctcaaactcctgacctcaggtgatctgcctgcctcagcctcccaaacctctcttgttcagtaccaacatccaaatgtcctttgttcttgcaggctgcacagggtcttcactatctaggtaattcagttcctaaccctagctaacacctctccttaattggttcatattctttttttgctcaattttattgaggtataattgacaaataggaattatatatattatttaaggtatacaatttgatttttatttttttttgtagagacagggtctccctatgttgcccaggctggtctcaaactcctgggctcaaatgatcctcctgcctcagcctcccaaagtgttgggattacaacaggtgtgagccactgtgccggcctcaagttgatattctgatgtatgtatatgttgtgaaataatatcataatcaagctaattaacatatccatcaccttacatagcatttttttcttttttcttgtgataagaacacttaaaatgtaccctcttagcaaatttcaagtatacaatacagtattgttaattatttgtttcttaaaattctttctcctccatgcacttttttcccctctaattaatgtagggattttaaatcttaatctttagtcttaatcttgctaacaaaacatacatttcctttgaagctaaaactgaatgcaagtgtctcatcagtacagactcttacatcttcagtctttattaggatgtatattaccttgcaaaatatgattaggttcctcagagaaacttttgcttagaggttcaacagtccatgaattaactacattatagaatggtattattttagagttggcaggaacttacaacccagtcttttttgtcttccagttaagtatactgaagccctgagaagttaagtatcttactcagggtctctcaagaaaatggagagttgggactataaagccaattttgtgatttctttcactcaactgtgtgcttgttcattcattcctcattcaacaaatatttactgagagtctaccatgttccagacactgttcttggcactgggaatacaatggtgtactataaggaatttactagaggtgaaaggacagactttccaggaagaaagtatatgtgtaaggtaaagataggaggagagagctaggtctatggaactgggtagagagcggatatgtttaaagtactgagcagagaatgggtattggaatacacatagaattcacagttttggtgcctaacatttaaattggtcacaaaatattctataacataacaaggataggtaagtttagtagattaacattacgctaaaatatcacttgtttttagagaaaactcacattttatatttcacataatttccttaaccaagaatcagaatagaatatatttgaagtaagattatcactatagaaattgtaggcttacaatctgccaagaatttgaccatcacatcactttggatcacttcaaatacaggctctcaaactaaccttctcaggttgaaagctaccgagacctcaatagttgagcttatatctgtccggtaaacactcaccgaactgtgccaactagctgagcttcagctttcttaaagctaagttaacaattcttatcataaaactgctttaacaagaataccacatatgaagcccattccatcactggaagagtatcatctttgagatgataaaaaaagtttagcaaaccacttgacatattccctttctgtgtgtggacattcttcaggttaactctaacattttctaatccttaaatgatgattcctttgttctgtaatagaatacagaattgctataatccttaaatgatgcttcctttgttctttgttttattctcgctttcttttagaatctatatccaaaacgtggtcaaaagttaatgccattctgaacacatactcatcttgaccatgattactttgaaaaataaacaacaatcccaaaaaggtataacaaagaactgtggttgggtttcacataatctgagaacatgcattatgattatttatggtgctgagaggcatatactatattgcaaagaacatactaaggctttgagtgcaggcagacctaggtttggatctaggttctaccgtttagtggtcatacagctgtagacgggctatccatttaataataatacaattacaatatgtacgaagtgcttaccagagtacctaaataatagtaaggcactcaataaaagtatgtcattcatacttactatattccataaagatacatattagcccccagatttaaccttgattttaaataactcttgcaggaaacaattcttgtgtgtgtttgggaaaacttattcagggccttcacattgttttgcttaaacataacctaaaataattgtgaaaaacaatgatacttttgtacattcttaaattgacatcctacaagtttaagtagatgcaaagaacataatttatggtgtattgtgaatattgatgttttaagatgaaatatatcacccttaaggaaattcactagactgtaaatatcatggtaatttaacatcaatatcatccattaaaaaaaaaaaaaaagaataatggccatgtgtggtggctcacacctgtaatcccagcactttgggaggctgaggcaggcagatcacttgaggccagcagtttgagaccagcctggccactatggcaaaaccctgtctctctacaaaaatacaaaaattagccaggtgtggtagtgtgtgcctgtgatcccagctacttgggaggctgaggcacgagaattgcttgaatccaaaagccagaggttgcaatgagctgaaattgcgcgactgcactctagcctgggcaacagagtgagactcattcactcactctctctttcaaaaaaaaaaaaaaatatatatatatatatatatatatgctctgctttctaagttagaaatcttacttgttctgtttttccattccgattctcttgcagaattttataccaagtagtatgtttatacctgaccttctctgcaacaaaaatgtaatgtaaagtaaaatttaatttcattacctatgacctttacgttttaaataataaaatttcttctgaactgaataattttaactattattaacatcaaattgatcaaaacatcacaaatatattacaaacaaattaagttatttttgaaaaacatctcaacatgatggacgagcactgatgatggcatcttctattaaaggcatggttgttcactattgattcttagattaaatgattttcccccatttatcaacttggtatccattaacagaatcaaatttcaaaaggaaaacaagaggaagtttacgtaatcccatctagagagcaagctcttattcttcactaattcttcaacagttattttcaggggatcttaggcagaaatgtctctggctgtttacataagaaaagacatctgaaaatagttaatactgttcttagaaattctggaatttcttcagtgttctccagtatatacttaattctgcactattctcaaaataatttttaagttctaacttttaacacacatcttataaatttcctatttagagtatcttcaaagtatatttttcaattattcactgtaagtctaaaacaaagtcatctaattttccatttctagttcaattaggcaaagagcacagactaatctttaaggaggtaaaatgtgattttaaaaaaatccattctaatatcaattgacatgtttctttatacaacttcaacaactcaactgaatatatctaccaaaaacttgtcacatgttagacattgtgtgggaaccaaaaatgtcctcaaagagtttaccaacctggccagtgtttctcaaagtgtggtcccaggaaaaacttatatcatggtcacccttgggagacagagattgtaaaaaaaaaaaatgtaggtttctgggtcctatgtaagatttactaaaccagaaccctaagagagtggtttggaaatcaacattttcaacaactgccctagactattattatggatactgaaatctgagaagcattgttctgaaaagaaatacaggttacatgttccactggggagaggtttacaggaaggaagaataactggccagtagtgaaagggggtcttttcttgctagtgagtgggtgcaagccaaaagaggtcaggtggggctcacctgaggcctttacacaggtaaaatcaatttctcaaaaaggagataggaaaaagcattttacctcttcacttcactgaaaacgattttaaaatattttagattaaagatccataaagttccaaggaaggtaaaatagccttagtttttaaaatttaaaaacatcctctcagcatggaaataaaatcatccaagagaaatagctcatacttttgctggttgcttttcaaacaaaaagcattccaaaattattaactaaaaccagcacaggaggaaacaactaataggctctgtgcaagtacaacaggataatatgcgcatgaacagtaaaaatttttgtgatatccatgaaatcaaagcttaggtaatactttaacctgggcttgggtttaaatctaaattcttggctttacaagaaaaattctggaagcaaagtgaaggcaatggtttatctttccatcaagaaatgattaagtctggagtgtccatgcaaagatgcccatgccctccactgggcaccttttatgccttgtattttaagtatctatcttttgcggtatttatcacatatcattcttcccacctagctctttgagggctagtcttgtagatgtctatatatccctaggtattagcactgggctagcacatggaaggggctcaatgaaaattaactgaataaatgaaaaatacagacctgatcaatcttaactgatactttaggtcaggttcatgtatcaaaaagcctgaccctgagcaggtactacactttctgaagtaacttttaaattatactaggcccttgttacaatcttctctctctctcttcattgagaattgaagcccccaactgtttacatgatatacagatatcatgtaaaccaataaaaaaaaccctttagagcaggaatcggcaaactacagccaggaggccaaatccagcccactatctgtttttgtaaataaagttttactggaccatattctagtcatgtccattcgtttaagtggtctatagttgcttacgtgctacaatggtagaattgactaattatgactaaatggcccacaaagctggaaaatatttactatctggccatttaaaggaaaagttgcccaagccctgcttaagggtattaacgtggcatcaatacctagcatacagcaggcatatatacatatatatacacacatatatatattttaatgaattagcacactgattaaaaaattaagactgaacacttactgtggaaaagtcactaacacaactctgcaggaaatataaaaatgaagatgcctacggcaaccactgtcttcaaaagagagttaatcatcatgtgatttaagttttattgggataaaataagtcaaatttatagaaacctatgagaaatgcaaaacacttttaaggttctaaagatacagaaattatatccagtttgggggaaggaaatgaactctgttgcagacactggtaactaatagtctacataaaaggaatggagaagaaaggacaaatggaagactcattgtggatgtcaattacacaaggtaaggtggcaaggtagaagtcaagaagtagttgaagatgctgagctgcaaggtcttacgcctggcttactagaacaacagtgccagtaatagaaaatgcgtaccaacatttgttgactgcttactcgatgccaggaacagtcagtccattaaattcgaaacacacacatcaggaagaaatagatgcagtgtaatgaaatctagacatgttgagcttaagatttaatgagatgtgtaaatgaagatagctggaaaccaagatttggaggttgggagaaaggttaaaactatatctagatttgggagtaatttctacagaaataagttgacaatatcttaagttcctgaaatctctcatattcttccaatatccaattatgtcaaaagaaatgttaacaaacacaactggttatctgctcccttgtgtttagtggtgagtggcctgttgggaatgtatagctaatattacatttgaagtatatcccagaagtataagaaattatatggctgatgcatgcctagggcctcagctatgcaggaggctgaagcaggaagatttcttgacctcaggcgttcaaggctgcagtgaggctatgcttgtgctactgcattccagcctgggcaacacagtaagaccctgtctcttaaaaaaaaaatttttttttttcaaaatgaatttggtcaaaagaagctgttaaacaaataaacaaaaaaagtaatacacgatacagttaactactaccagacatgtggaacttaaacacctcttacgttcattgaatcatttcagcatgatgttctagttgaaactcaaaatacttgaataatacacaggagtgattttctgggtgccaggcactgtattcagtagctgacaaatattaactcaaattaatctttacaacgatgcagtatcatttctgttctgattcccacttttagatgggaaaacaggcttagtaactttccaaggtatgtatcaaattaaaaacacaattttgactttacagcaaatctctgatgtacatttttgcataagagcaaaaaggttattctggaagttctcatgatttggtttaggcttaggaagcagttacaataaacttttatttattataataaatgtactatttgtaatggtgaaacttttggtctaaaaagtctagtctagagcctcataaagtaaagtaaggtatactacacagattatgtattctggaaggataatattactattttttactagtatacagtttcactctgaagatatcctaataattagtagagtaaggtcattcttttcaaaagtagtgttcctgaaaatgatgccacccctacatgaaactcaacatgctcttagcctctccagaccttacttttatctctctgtaaacagcaatcatgccagaaactgtagtcacctttgattcctatttattgctccctatagccaacttgatcaccaagtcttactgctttttttttgctagatttttacagttttctactgccaaggagaccagatccagacagcgttagtattgggtcttgaactaactcttcaaccttaacttttaaaaaaaagtttaaaaaatactgctctgcatacatctatacactccaacctcctcaaatcacttacttgccttgtttatgacataccatgcccttgcacttcttaaggccctctgtaccctctcctagtcataggccattcacctttaataaaaatcaaacatcacttccacaacaaagccttctgatgacatgaggatacctgctaccttccacatcacttttaagacttagacataggtttcttatgatatatacagtgtgtctgttttccttactacaacagaactgtattttattcattcttgtataaactccaatttttatttatatgcctagaagattaaatgtacttaatggttttttttgaataaatttggaaaggatcatcctataactgcttaaatcacaaaaaaaaaaaaaaccacgaagatttacaagtatcaaagcagcaaagtaaacataaaaaacaaaatgtatctaaatttctttctggtaaataattccataaaagtaaaatccaggcttaaaatttaatagatttggaaaactgtacttgaatagacaaagttggttgttttataaattcttcagtcagtagtaacttaagtgggcagtaatacaacagctgccctctgatagtgcctgacatttagcaacataggcttttctagtccaaaaccactcatttactttctgagaatagaaagttggtaagaaataaggcggcaaagggcaagaatggctttactaacacaagcatcttacatgaatgatcttctccacaggggcaggaacactcttctttactgccatagcctcaatgtctagaacagcatctagactttggcatactcactgtttgctgaatgaataagtgaatttatttaaaaagctataatagcttttctaagagataaattcagaccctatgtattctggaaagaaaactcccaaacagatcagtagcgaattccttagattagacatacattctaggatcgcaatttaaaaaataagtcatgtatggcaaagctaaaacctggaaaaaacttaagcatgctctagctgaccaggtatatctatatcatgagacaattgctatataccttccaagaatggaaagtaaaaccaatggaaactggcaacatcaagtatttggtaaaaagactttactctgaagttactgtaatgctgtaaatgtagaattaaacagccacaaagaaactacatgtttctgatttctaagcacttttcaggaaattaataaaatggttctatttagaatgcttatcttaaattagagcttaacatttataacctataataattttccttagatgttctctgaatgtactttcctttaaggatgtaactgtaatgtactttcctttaaggatgtaccaatcaaatgtaaatgctcatcttagtccattcatgagtatgttacagagaacattatgttttaaaaatctgataaaaaataaaaatctacgcctaaatatatctctatactatctaacttcattacttatgactacaaaatacttataaaattgaggttctttagaaattagcataactatgctttgtggctgacctaataatcagaaatataaagatgccctatgccaatttaggtccaacttcaagaagaaagctacctcaacaggaatttctgacattattattgctgtcaaatgatgccatcactactcaaggctaaacagaatggcaatttttaaattggacctgggacataaccttttcccccttcctttgctttgatagtattttcatatattacttagttcgagtcaatagcaaaaatgggggaatttggaagataagctttctccacagataaggtagagtgaaagtactttcatgttcctcagactggctcaggtttatctttttcttttttttttcggagacgaggtcctgctatgtttctcaggcttgtctcaaactcctgagctcaagcaatctgcctgcctcatcctcccaaagtgctgggattacaggcatgagccacaggcacccagctaggctcaggtttagtatcaaatcagtctattctaggtattccttatagtcaacaccacttactttttactttattaatctactattcccttcactttggcgattaaaaaggtcagttttgtttagtaaaatcctaaaatcaattccacgtaattcatgtttaaacaaaataatttacattgtttccttggaatttacctctagtcaatcattacataattcttttattatctgtttcatcttctaaattcagttcctttcttgccatgtgccatattttatctaattagttcatttaaatgttactcatgttttaagccatgagaccatggctttagtctcacaagcctactaagagaatatctctgagggctaatgtgtccactcacctaagccagtcaaacttgactctgacaaaatagcctcttcttccaaaattcaaggaaatcagaattc

SEQ ID NO: 71 - DNA, 164527 bp, Homo sapiens
gaattcagcagagaagtgacagaaaacacctgagatactgaaggagagggaggcaaggtagacagcctggctggaatcagctgggagcccagagagggtccctagtgagaggaaagggtaagtgagagattcccagtggtacatgttcccatgttgactgctgaaatcctagtcataagagtctctcaaaccccaaggaccctgaaactggtattcccggggtccgtgtggcagcattgctccagagatggagcccactcgggtcccatgtacccacttagttctggacagatagagagccagttagaaagcccatttcccaccagactgcattgtgccctgggacccagcaacccctgtatcttcacatccctggagccccactaacagagggctgcagggtgcaatgcaggttggacacagtagagtggcagggtctccagaactctagcccacacattgtactgcacactggggagggtgatcctgggacaaagggagctgaagcatgtgtttcccagagcatgaaacctgatttcctggggccactgtcaatgaaataaaaccctgttcccacagtagaagggctgcttcacactagcatgtgtcctgaggtcaggctgccaccattgtcatagccacctgagcaaaccgtctggggcttggaaattgctctgccttgttcaccacagcctgggcccatgggccccatggggggcctgagaataggcctgcctggcctggcaccacccctgtcctccatcagtgcccaagcacattgcctgggggcctagggattgcccctccccattggttgacccaggtgcatatgcatgccatcagggggcctaacaggaccagaaaacctactgctgaaacccaagcatgctgtctggaggctgggggattgcctcaccttgtctacaacagctggcatctgggcaatactcctggaacttgagaataggcctgcccagcctgccaccaccaccactgctggcaatcttctgcatgcactacctggaggattggggactgggctgcccagcccattgcagccaccgctaatatcagtgagtgcccatggggagcctgaggactcatccagtcatctggcacactgctgccataaccagcacccaagaaagctgcctggaggccccaaaatcagccctctggacttgctaacactggcgcccacatatgccaccccgggacccaagaacaggcatgcttggtctgccgctgccaacagcagggcctgaggactggcccacctggcgtcctatccccaggaaaacctcagcataatctctactaacaacggcagcctacgccactgaggaaatcacagacaccactgatggtgtatagccaaagaaatcctatggagactgcaccaccatatatgcccagaataaaagaaaagtaccctaaccaaccaacaccatagatctatctacaggaaaatgtcttcccctatgaaaaccaatctaaaaaattggaggaagtgactgttacaccagatgcacagatatcaatgaaaggacacagaaatacaaaaaagcaaggaaatatgacacttccaaaggaacataataattctccagagacagattccaataaaaactaaatttatgaagtgcctgaaaaagaattcaaaataacaacattaaggaagttccatgatatagaagagaacacagataaacaataaaaagaaattaaaaaaacaactcagggtatgaatgagaaattcaccaaggagatagacatataaaaaagaaccaaagagaaatcctgaaactgaagaattcaatgaatgaaataaaaaatgcaatgagaacttcaacaggatactaaatcaagaagaatttcagaactttaaaaagaagaaaaaaaaacaagaaagaagaaagccaatgtgacctatgggccaccataaagcaacaaaatatttgaattttgggtgttccaaagggtgagagaagtttaatggcatagaaaaacaatttaacaaaataataccttaaaactccctaagtctagcaagagatttagaaacaggaagctcaaagattccaaaatagatacaaccccaaaaaaatcttttccccagcatattataatcaaacagtctaatatagtctttatgtccccacccaattctcatcgtgaattataatccccataacccccaggtgtctagggagagaccagagggaagtaattggatcacggggacggttccgcacatgctgttctcatgatagtgagtgagttctcatgagatctgatggtttgataagtgtttggtagttcctcctgcattcattctccttcctgctgccttgtgaagaaggtgctttgcttcccctttgccttccaccatgattctaagtttcctgaggcctccccagcctttcaggactgtaagtcaattaaacctctttcctttataaattacccagtcttagacagttctttaaagcagtatgaaaacggactaatacagtgtaaaaagtcaaagacaaataattctaaaaacagcaagagaaaaacatctgatatggtttggctctgtgtccccacccaaatctcatgttgaattgtaattcccaatgttgggggagggacccggagggagatgattggtcatgggggcagatttcccccttactgttctcatgatagtgatttctcacaagatctgatggtttaaaagtgtgtggcatttcccccttcactctcttttcctcttgctccttgtgaagcaaggtgcttccttacccttccaccatgattaggtttcctgaggcctcccagccatgcctcttgtacaacctgcagaattgtgagtcaattaaacctcttttctttataaactacctactctcaggtagttctttatagcaaagtgagaatggattactatagcatctagacacaaagaagtctccatcagactaacagcacatttctaatctgaaactttacagtccagaagaaaatgggatgatatattcaaagtgctgaaagaaaaaaactgccaattaagggtactatatccatccagtaaaattatccttcataaatgaaggacaaattcagagtttcccaaacaaccaaaaactgagggaattcatcaccaagagaccagccctccaagaaatgcttgaggaagtcctacgcctggaagtgaaagaacaataccttccatcatgaaaacacacaaaagtataaaacttactggaagagcaaacacacgaatgaggaagagaaagcattcagatgttaccactacagaaaaccaccaaaccacaatgataaacagtaagagagaaagaaaagaacaaaggatatataaaacatccagaaaaccactaaataacaggaataagtcctcacatatcaataataaccttgaatgtaaatggcttaaatttttaacttaaagatatagagtggctgagtggattaaaaaacctgtgacctatccaaagtaatgaaggttattaaaaaatatttttttaaaacccatgacctaactatatgctgcctagtgaaactcacttcacctataaaaagacaaatatgggctgaaagtaaagggacagaaaaaatattccacacaaaccaaaagcaagcaggagtagatatatttatatcagataaaacagatttttaatgaaaaacagtaaaaagaaacaaagaaggttattatgtaatgataaatggatcaattaagcaagagaatataacagttctaaatacatatgcacccaacactgaagcacccagatataaaaagcaaatgttggctgggcatggtggctcacatctgtaatcccagccagcactttgggaggttgaggtgggtggatcacttgagctcagtagttcaagaccagcctaggcaacatggtgaaaccctgtctctataaaaaatacaaaaattagctgggcatggtggtgcatgcttgtagtttcagctgcttggaaggctgaggtgggaggatggcttaagcctgggaggcagaggttgcagtgcaccaagattgtatcactgtactccagcctgggtgacaaagtgagaccctgtctctaaaatgaaataaaataaaataaaataaaataaaataaaataaaataaaataaaaaacaaatgtcattagatctaaagggagagacagactccaatacaataatagctagggacttcaacactccactctcagcaaaagacagaaagtgaacaaagacacgttagatttaaactgcactttagaccaaatgtaccaaaaatatatggaacatttcatccaatagctgcagaatacacattcttcttattagcacatcaagaacattcttcaggatagatattaggccccaaacaagtatcaacaaatgttaaaaaatcaaaattaggccccaaacaagtatcaacaaatattaaaaaatcaaaatcatgacaattctcttcatagaccataatggaataaaacaagaaatcagcaataagagaaatgttgaaaactacaaatacatggaaattaaacaacatgctcctgaatgactacaaggtcaatgaagaaattaagaaagaaagaaaaaaaaattccagaaacaagtgaaaatggaaacaacttaccaaaacctgtgggataaagaaaaagcattgttacaagggaaatttataccaacaaatgccaacattaaaaaagtagaaagatttcaaaaaaacaacctaatgttgcacctcaaggaactagaaaagcaagaaccaaacacaaaactagtagaaggaaagaaataataaagatcaaaacagaattaaatgaaatagagttaaaaaataatactaaggatcaatgaaactaaaagtttttttttgaaaaaataaagaaaattgataaactgctagactaaccaagaagaaaagagaatggatccaaataagaggagggaattcttcctaactcatttcatgaggccgggattaccctgataccaaaactagacaaggacacaacaaaaaaaactacaggtcaatatccctgatgaatatagacacaaaactcctcaacaaaatactagcaaacaaaatccaacagcaaatcaaaaagatattacaccatgatcaagtgggatttatcccaaaggtgcaaggatgcaagggatggttcaacatacataaattaataaacatgatatattgcatcaacagaatgaaggacaaaaaccatatgattaatagatggtgtgtattctctaactcagctccaattaaaatcctcattcttgtttcttgttttatatcatctttcccttctatttttagttatgttattttgctgtacttaggtgtctttgtaagctgcttttatgaggtgaggtgtgattatacaatgtcaaacagttcttctaaaaacatgtttttaaattatcacactattacaagtgcatctcgtaaaaaattcaaatatgaaaagttaaagttctgttggacttaactgcatacacttgtcaaaactcattgaattatccatttaaaactgtaattttattgtaaggaaattatgtcacaataaaactaatttttttttttttttgagatgtagtctcactctgtcacccaggctggagtgcagtggcactatcttggctcactgcaacttctgcctcctgggttcaagcaattctcctgcctcagcctcccgagtagctgggactacaggcacacaccaccatgaccagctaatttttgtatttttagtaaagatggggtttcaccatattggccaggctggtctcaaactcctgacctcgtgatccacccgccttggcctcccaaagtcctggcatgagccaccacacccggccaataaaattaattttttcaaaaagttaaagtcccctttcctccatagtctatccattttaataactctgaaaaccctcctaaagtctcctgatgcaatttcctttaaaagacacactcactcagagcctgccttcaatgaagagaaaagagctgccagtccacacttttgcattatccttctgtgcaatccacaccagtcaccgaacttccatctttcatcagctttggttgctctccagagatctttctcaaattctctctaacaagcttcagggatgggaccagacaaacttctcccccaaacagagatctgggtttccttcctcttgccactattccttcttgtagaatttagtatcatgtatttagtatcataccacaggacttcttagctgggaaggaaggcagacttttctctatgtctgagggactgtgtgcctaatgagaatgagcataataaaaactcactgcagatacattgtattttaatatacatatgttatcaacagagaaaggcactatatggaaaatgtgataaatgaaaatctttcattctgtaggcatttctttctaaaaagacagcattttagagaaaagttagcatttcataagcacttgtatttcagtaatctaggggagttatgcttgattttccttcatatgagagctatttctctaaagtgccaggtattttactcaatatgacattattctgaatgattttaggtgacattttctgttcaaggacataacaatttactttaggaatagattttctctccctgccttcatgtaggaactgacatctggtgaactccagacgcagccagtgttctcacagcgtatggattacctgcatcagaatcacgccatggttcccagtcttgctgaatcagaatttctagcggtgaaccccaggaatgggatgtacattttaagtgtgtactgtgtgtgattcttgggtacattaaagtttgaggaccactaacttacactattcaaattaatatgatctggctgggtgtgatggctcatgcctgtaattccagcactttgggaggcagagatgggggatcatttgaggtcaggagttcaagaacagcctggccaacatggtaaaccccatctctactaaaaaaaaaaaaatacaaaaattagctgggcgtggttgtatatgtctgtaatcccagctactcaggaggctgaagaaggagaattgcttgaacctgggaggcggaggttgccgtgagctaagatcgtgccattgtactccagcctgggagacagagcaagactccgtctcaaaaaaaaaaaaaaaaatatatatatatatgatcttcacacctaacaggtattgttactgctactgataatatgactggtagtagccgaactttatggagttcttatcgtttgccagggtgtgggtaaaaaagaaataagtgattagaaaacatacaaaaactctaatagattcagcgcttttcatttagctcctaattgtttttcattgttgttgtttttggaaccctataacgatgagtcacctctcagtatgtggtcacaggtttaaacttggtcccacttcgggaagagataaagggaatggctgttgtaatctatctccaaagctacctttaacatttgcaaacagatagtgtgatgagtaatatggggacccaacagcagcaacagaaccatagctgagaaaatgagatttagaaatattcttaaagattattggacaaatacaacattttgaaagatgaaaacaaggaaaaatagtaagtgattaagagcagggcaatggtagtgggatggttttgcaggagggtggtagaaaatttaatgtgtttcttttgcatgtcagtatttctaaggatgatccaaattctagtattgtgtcatgtagtggggaagttttccccggaggctgcagaataattcatggtcaaaatgtcacttctaatttagtgtctatgtttcaccctatgctttattaaccttcagccaagcaataggatacttatcaacacctacggcatttaatacatgtgatttccacagagaaacagtaacccaaaactcaaaaccctcctccttccagctcaactgacaacgtttcctaatcccttcaagaccgaaggtactggtgttggcatggctgagactatcacataggtcatgctgtgatgtacgatctcagcccatgagacagaaatcatcctttttttttaaatcttttgccaaatcaattcagccaataaacaatctaacactgctagagatggaaggcatgcaaatgtttttaagatgatttttttggtgggccttgagagagagtaacagatgaaaataaatggaaaagggtaaaggacagagactccagacttgagtgagcactgattccactgctgccaatggaaactgaaatggaagccaaccccgttagtgtcttgcaagcttaggcatcggatgcctaccagagctgctgtcatatctgagtactgctctattcctaaaatgtgaatctaggtcagtgaaatccagcaacatttgcccaccaatttttgatggtctgttcctttgtggatgaggaatgctgaattcatggtgacagggagagtttaaactcttttccaaaaattctaccaaaggcacgccattgtggtagttatttctgaagtcattttgttcatcattgtccccaggggcacagaacaggagttctgtaattatcttccaaagtgttgatctggtccctttttctccctttaaagtccatcagtcacgatgttctgttacttctctaagtgggcctcactttctgcactgccctttccactttcacagctactttcctagtccagatcctccactcatttattcatagactgtgctgtgcaatggcatcagctagttttattactcctaatccttatccctgttaaatcattatgggaaccgtgccagacagatctttctgaaaaaacaccttcagcttctactcctctgctaaaaaaaaaaatctgtgttgtcccccacagcccacagataaggaaaccccgatttcattggccaagataatttgaagcagccccaacttgtatctttcacctctctctctgtttccctgcatccagcccccattccagccattgtctcttgatggtactactgacacttccccaggctgtcctgtttgtaataaccaccactcttctgtgccagctatgcctgacgttcattcaggtgcactcagactttgagtcctgcttctggttgatcaatccctctccagaactcctaccacctttcctaggaccctgaaccatttattagccacttatgttgtgttgcacggtgacagtttttatcttttaatgttctctcttgtttctccagctaaatgggagcagccttgaaggcagagatcatgcagagatcatttctcatccgactcagtatccctgtgcttgggatagtatctttcatatattaatagttgctgctcagtaaatcttaccactgtgatgtcttttcaattgctgttttaaaagtctttttgcagaagagacagtaataagaggttttgaaaatcttagctgcttttcctatcagagttttatgtatgaattagaaaatcatgtttgttagatatccaactgaatagttatatatgtaattaaagcttcttctaagaaaatggaatgaagttggaatctttctgtggttttcctcaaacaggcataaaaacattgctaagcacaaacagatataaagatgttccggctgggcgaggtggctcacgcctgtaatcccagcactttgggaggccgaggcggtggatcacgaggtcaggagattgagaccatcctggctaacacggtaaaaccccgtctctactaaaaatacaaaaaatcagccggggaggtggcgggtgcctgtagtcccagctactcgggaggctgaggcagaagaatggcgtgaacccgggaggtggagcttgcagagagccgagatcacgccactgcactccagcctgggtgacagagcgagactctgtctcaaaaacaaaaacaaagagaaaaacaaaaacaaaaaaaaaccccagatgttccatcacttacaggcactgaaaggacaatatcacattaagattctacagtgagcccactctgaagtgatccttaccactagtgctttataattatatggttgctactttttgccaagtagttgtttgctccatcctaggtttaagacacagcatttcaccttgactggctgttataaaatttccaatgggaaggaacaacactctcgattcctactgaggctaattcaactttgttttttcaagaagagaacgagtataggagataggggtcacatagggagagctggaggcagagcaagaatgacaatccatgaaatggattctaagttctctgctttgtcctcatgggcattttggccctgtaggcaattatgcttctttagtagaatcaacatatgattattattttaaaaagtaaggtattctctaatatcagtaatagtgtgaagtttaacttttttccccctttttggcatatatcttcacacagtaagatcaggtcctgttgttaggtttttctatgagtgtgtgtgtgtgtgtgtgtgtgtgttggaggaggaggtatgggaatatgagtcaaatgcaagcttcctgttctcagaaaatgataacattagtgattttggtaacttggaatattttaatgaggaattttagcatgtcaaatggattaaatcatggcatccaaattattacccagttaggtattatatttcaagtttatacaatgtttaattctgggcaggaaaaacctaagaagtttctagttttctatggctttaatttgaatactttctttacttttactgctaatgtaatcgggatatgttattttgcacctgtatgacaaaaacgttggcttcttcaggtgcacattattcgggattgtaagctgggcacttttggaagttgcagatatccttgaaagcagtggctctcaaccttggcctgtgcattagaatcacctgcagagcttttaaaaaatgcagatgcctgggttccattccagacccagaatatcagaattttctgagataaacccagggtagtatgttttcagaaagctactcagatgcctttaaaccactctcactaggaaccactaatttaaggtcacttatagactttttctttcagaagttagagtcttgggttgaaaggccccttataaggctatgtggccaaccatccaacagatgattacccctacaatatcctatagagtcagtttaatactttttgatggtctagtatatactggacaggatgaacagcacttttaaatataatttattcctttttccctttgacattttcttgaaagcccaaaaggaaaaaaaagcacattattccctttctcctacttggccaattttgacttcttcctgccttgggactaatgctaaaattcagcatggctgttttggtgtcatagcttcaaattatttattggcttattatgccaaaacattttattttggccaccctagccttgttggcatacagctctgggaatattgtcagatgaggcaactgctgccaggaaaaggagcataaacagttgttacaaattcagaagctatttggttttgtgttttaatttcttaatacacgcatggcagatttaaaaaaatcattgttttgtggagctggtgaatacaacagccagatagtaagacaaaattaaacctacaatgggattgtcagtatgcctttcatagcagagactcaaagtggaaaatcttgtggctacacactataattccctgtgacaacaataactaaaaatgcaaagtctttattttttccatttcaatcaccctgttgatatgagctagttagttctcattctgtcttttgggttttgctagttgtcattaaaggaaattccaggcaataaaaagcatataaaatccaaacacattaagggtttttccatcttcattttttatatgaccatctataaaataacatggacatttttggacataaaagcaatgctgcagctgagtcaaaacaagaggaaatacagtctgagtgatctctattatatagttagtcattcaaaagaaaaacaggctgtgtgctatgcaatttaaatgaggtacaaagcagctcttgtgttcattcaaggaatgttagaaattcagttagttatttcaggaagtagataagaaacctaaaagacatttccattgagatgcattgtgagcattttaatttaaaattacaagtctattgaaaaaccacatactgtatttaagctccatttacatgacaaaggcacaaaaaatggagtggtgatctcataattcttttcttaccacgtccttgtagtatttttattaaaagtatttttaggtaataatttattgtgatacaaaagaacagaattactaattttaaaaaagtccaccaaagaaaactatagctgtatcccataaatatacacaaatgtaatatatgaaaaaaatgaaaacaaaaacaaaacaagacaaaacaacaaaaaattcctctcccacggggttaggaaggtgaggatgctcctcctgctgcccggccagcagatggcacagtcctgtagccggtcagtgctgcagtccctcccaggtggggtcagcagcttcctcctctgaatagtttcaggaaagttttagctaaaggtaccacctcccctgacctccctccctctctcccttccctcccttcatccttccctcccttccctccctcccttcatctttccttccttaagaaaatttttttttctccaattgactggaagagtgaatgctaccaatgaggtcaagttaaaaatcattactgagaattactgtgagtccctcctgaggcagatattactatctgtcctcctgtgacgatagcatgtaattaatccaggtttttggaaaagaaggcaatttcagggatggatctagaaaaagaacaaggtgagatgtggtatagatttactctttcttatgtctttttcccccttaattaaaaaaattaaaaacagggtagtctgtggaaaagacagtcatcatgtagaatggtaaagcagggggttaggagttaggcacacttagttattggagaattatttctgtaagtcaatcatagcctacttccaacaatgtaacatatatatttttcctaaactttaaaaaattaaagtatacaaagtgtaatatataaagtataacacacaaagtggccctctggaccatgactgcctcccttcatcttaaaataactattattctgacaggtaacagtagagagtagctttgcctcttgtttaactatgtgcatgaaagaatagaatatttattctttgggggggttggcttcttttgttcaaactttggagtaactggagtactcatctttttagagaaggcaaacattccttctggaagagtacaaacaggtctaatgcctgtgtgctaattaatttgtcttacattatttttttttttttttacaggtagaggggtatgaaggtgagatgcaaagttgggagaaaaactataggaaatgcaggttgctctaaaaactaatttggcctaaataatagtatttctaggatcagacttgctgttaaatatctagcatttgttcaaaccaacctaacttctagtacctttgccatatggatggtaaaatgcagtaataatgtcttcctttcttctttccctagattggtaccctgtattaaatgtgttgtggtggccaggcctgtaatcccagcactttgggaggccgaggcaggcagatcacttgaggtcaggagttcgagaccagcctggccaacacggtgaaaccccatctctactaaaaattcaaaaattagctgggcgtggtggcgggtgcctataatcccagttactcaggaggctgaggcaggagaatctcttgaaagtgggaggcagagattgcagtgagccaagatcaagccactgctctccagcctgggcaacagagtgagactccatcttaaatgaatcaatgaatgagtggatgaatgaatttatgtgttctgggctttttagctgagaattgctaaactcttcctagatggatgatttcatttaaatatacaatgcacacactattaactctactataatctcaaatggcaagatgatgatctccataagaatccacttcattaaccaagagtagattgcaacccattacaaagtatttcaaatgcaataaaactacccagaaacccttggggctctcagctttacctaaacatgtaagaagtagattctgaaggaaccaagtactcagagagcagtgacagaggtgagaagtaatcaagctttcggtgtgtagcacaggaaggcacaattcacctctgtttaagtaatatgccctttaaagagatgcccaagtgaccagggacttctctacagaggaaagaactgagacatcaaggtttacaagggaaaaaataaatatctggtaccaaactcacacctatcctgagactgctcagatcctggataccagtaaaaaatggaaagtcaggagataggtggaaagacacggaaggagcagacaagctcggctagaaccaatctatggcaaaataattagaaaaggttttctaattaaaaaagaagattcagtatggagtaggttgggcaactggggccaggggaatcagggcccaggaaacttgtttctggaactgtaagatcccactcaaaatgattatttcatcaggtctcagtattttgaactgtaaaatgggaaaaacaaagccaataccacttttatcacttataagtgatatatttgtctctattcatctgtcttcctgcctgtctataataacatggagtatttatatttctatgttagttagcaattaataattgccccattagatctaattaaatgaaggagcttctgcacagcaaaagaaactatcatcggagtgaacaggcaacctacagaatgggagaaaatttttgcaatctactcatctgacaaagggttaatatccagaatctacaaagaactcaaacaaacttacaagaaaaaaacaaacaaccccatcaaaaagtgggcaaaggatatgaacagacacttctcaaaagaagacatttatgcagccaacagacacatgaaaaaatgctcatcatcactggccatcagagaaatgcaaatcaaaaccacaatgagataccatctcacaccagttagaatggcaatcattaaaaagtcaggaaacaacaggtgctggagaggatgtggagaaataggaacacttttacactgttggtgggactgtcaactagttcaaccattgtggaagacagtgtggcgattcctcaaggatctagaactagaaataccatttgacccagccatcccgttactgagtatatacccaaaggattataaatcatgctgctataaagacacatgcacacgtatgtttactgtggcactattcacaatagcaaagacttggaaccaacccaaatgtccatcaatgatagactggattaagaaaatgtggcacatatacaccatggaatactatgcagccataaaaaaggatgagttcatgtcctttgtagggacatggatgaagctggaaaccatcattctcaacaaactatcacaagagcaaaaaaccaaacactgcatgttctcactcacaggtgggaattgaacaatgagaacacttggacacaggatggggaacatcacacaccggggcctgtcgtgggatgggggagggtggagggatagcattgggagatatacctaatgtaaataacgagttaataggtgcagcataccaacatggcacatgtatacatatataacaaacctgcatactgtgcacatgtaccctagaacttaaagtataataaaaaaagaaaaaataattgccccattattaattttattgatggttgtaacatagaaaccaaactgctctcaaataaataaagcagctgagttcatgcaaacctgagtttcaccaacccatttcgaacctgtgactatttccttaggagagctcattattccccagatcagtttgtcctcttattttcactacaaggtaacatgacatttttgatgctagaaacatggcaggtgggcattcaccaaatccacaggcctgtggtttaggcagtacatttgctgatggaaaatgcaatctccaacgaatgcctttctagctagtgaggattatttataggttctgacaagtagaaaaggaacatcattattaacactaactcgaatgaactctacagggaggaggactataaagtcttcataggatgcccttaacagatgtggtctgagagaatttgaccatgggaagggaaagatgaagagagaaataggggtgagttgccaagccatgcaataggacttagggcttggggtttttttcctaggtcatcagtggtcctcttttctgactgcagggtcttccttttccaatgttggtccaacatctctgaaacaatgcagggctttctcctcaaagacccagattgctccctcacggtgataatcttgtcttcctcactgttaagttcctacttcttcagatctcacctgccccttccacctgtacccctggaaacccactagaaactctacgagttgagctggtttgctcacatctcatcaatgtactttgctcagtctttgcttatgccatgtccccacctgtaattttctctcattgaattctaccctgtcaaatgccatccatccttcaagactcacatctagtctcatttttctctacaaagctttctctgaatatctaggcctcagggaacgcccccttttcctctgaactttgaagagcagttagggcctatatcatataacgtagtgctaattagtcatatttgattaccttttattttgttatgtgttagtctctctagactatttgagttacagacctattgaggtagggaccaaatgatttgagttagggacctgatctacccagaatggcagaaggggccactttttctagttggtccacccagaagaagttctttctgctaatacacacaaatgcatggtatagaccagcttaaaccctctcatcttataatcgatctcagacatatgcagaccagcctaggtaccacggatagataccacagtccctaaggagaaaaataatcttcctagacctcctgagtgacaccatttatcaaatgttttctttcaagacaccagctttttttatatgcaagaagttgacatgaacttccagatggagcagaacaaaagacattctctaaagtaaacgaacaaaagccaccatgatacaaatcaaattctgagacagattgttcagcaacaattaataaaagccttagaaacagaatcaaagataccgtttgggaagaggtggaagaaaggccaggtgagctagctcaaagagtggcagataatacagagaggaaatttagctcaaggaaacgattgcttcccagccaaaccaccacacttggcactgaggtagaagagaagagacctgaaagagcctcagggcccacagatttgctgtctatgactaagaggaacttctggctttggccctttaataagtcatgcatgctcgtgtgcaggaccagctaagaggaaggggctgcagtcctgacccaccatttattattagcactatgacctggggtgagtcacttgatctagttttctcatctgcaaaatggagataataccacctctctcattcatttatccatcccttcatcagacatttatgaagggcccactgtgggccaagtgcaaaggagcataatgatgagcaaaacagacacagtctttatccttattgggtgtccagatcatctcacggggttgaagttacagagaaggaaagggaaagcactgcattgtaacaacagaaggtcatcttctttatcaatgacttccactcttgatttagccgtgtgacctgggcaagtctaattttcttctggcaagtctactatctataaaatgaggaaatttccggtcttaaaatgttattattccaaatgcaaatgaagaagttaagctttttaggtacttctgaaccatggctttctaaaagattattatgaaatagtccagacgcaacaaaaggataagaataatataacaaaccctgtgtaccaactctccaacttaagtgagaaaacattacaaggagctcaatctggtggcatgccctcctttcccctgagggataatgttgatgagtttggtgtttattattttgaatcatggccttttttttaggaaatctggtgtgtaactaaaaacagttcaccagtgaagagttcttcctacacttaggtgttcctggcttctaatgaatgtgaggtcacaacagtgcacatcacagaagctcaaatacctgcctgttctctccctgccaaccctgcttgttactcccccagcagagagaatgtgaaaaaccctgtggcaggcacccccactacatttagaaggagcacagttttgtatttaccttaagggccttctgtgcagattcactagacccaattgcgatcaggttaggcccagccatgctgcagaaactcttcaaatgcaacccatctgccactggcactgtggagactgcatagtcctacgtggacaatagaaaaacaagcagtttagtattgcagaataattctaaaactgattaaaaacctccctgaaatacacctacttcttgaaggctgacagggaccttgaatatttggaagaaaaactgggacccacagatttggatattgctagttaaacgaagactgcttctaagaagacagtagagtcaccagatgtgtgactgctgcaacatctttgctggctgtttgatctatggagtgggctactctgggagggtgtatttgaatatcctgtgtaaacagtggctcagctggagactcacatcctcatggggaacggagcatcttgagagttatatcccttcctatgcagtgtagagagccaatctattaataatcaatagagtaaagggaccttaagaggatgtacgtgcaacacctagcacagtttacagcacacagaaggcactcaagcacaggtgacccctgattccaatctaaaaaaaatctgtatttcataacagagtcaattgggtttccaagttttttttttttttttttagaaacagggtctcaccatgttgcccaggctcatttggaactcctgggctcatgcaatcctcctgccttggcctcccaaagtgctgggattataggtgtgagccatcacgcccggccttccagatttttttttaagttgttgattgttccaggaacatctgccaggtggttgtataattatacactgggagaagacagaagatgcccatgctaacttagttgttcttgtggtagcccagtgaagctgaattattgaggaatttgaattttatagcttctaaaacttctagtaaatgtacaaacattacgaattattgtacaaagccagtgaagcgtaaacaccattactcatgacattgattcaatggttctatgattatttattaagtaattgctttgtgccaggcataaactaccttttacctaccttaaaagtatcagccaagatttcagcacctcgttgatttgtccttttggaaaggcccacaaaaaattctctgcctgtaatagatgtcatggaacatagtgagcaggtggcaccagtgactgtacatcatttcttttatctataaataatgaccttaaagcatcacacagttctctcttaccacagagaacagcttcactaaagagactacaaaaaatgatttcaaactactgcccttaagaataaactttttcaaattcaaaagggcagaaagcaggatggtggtttccaggagccatggggaagggtaaatggggagttattgtttaatggataggaagtttcagtttgggaagatgaaaaagttctggagatgcctggtggtgatggttgcctaacactgtgaatgttcatgcctctgaactgtacacttaaaaatggttaaaatggtaaattttatgttatgtatattttactacaataggaatgaaatttttatttaggcaataataaacacattgataatctctgatcagaaattaagtaatagcaatgacaatttaacagtaaaacagttcctcaaataacatcattttgctcaactttgatgaggaaaaagaaaaaattgattctgagctggggccatggtctgtagggagtttgtacattctctctaggcctgcgtgggtttcctcccacatcccagagctgtgcacagcaggtgaattttcatgtttacagggtcccagtctgagcaagtgtgggtgtgtgtgggtgagtgtgctgtgatgggacggtgtcctgtccagggtgggttgccgccttgcaccccgagcttccaggatagcctccagccacccttgatgaccctgaactggaagaagtgccttagaaaatgaatggatacaaatgattgtaataaagcatccaataatcatacaaatgtacaacaataaatgatgtcgtaggaaagtgctcaatgagcccaccatatttgtgattgttttgagctgtatggtgggaggaggggctccttacagttttatctttgcaaatatttattccctgatttaacccaccaccacaactgctgttactcagtaattggccaaaaattgggcaattatcttgtttttattaatttaaaaaaatgtgcatatggctgacatttatttcaatgcttaatattataagtgttttgggttttgatttagaagctgggtgatatttttgtgactagaaatatgccagaggaacttaactcttgtttatattagcctatggtaaaaatggttttgttatatgtcacttcgcttaaaagtcacagtttccatgaacctatcaacattgttaagtgagaatttattatactacctttttttttttcactaaaagaacagtactagacattgttgataaattcggattcttttcttataaaatgatcacgtgaggcctgaggaaacaatctggggaaagtgagttaagtgctgactggtcttcaggtctgacctctaaaagccgtgtctttgaaactacacattccatatatttgaaatcaaaacatcaaaagatacctatgtacaaagtacaaaatttctgcaggatgaaacttcattcttatttgacttttctgaaattcagcagtttttctactcagaaggcaaaacactagataaaaatggtctcttagttataggcaaataattatagtatggagttaggcaatacataaatgtgggaactctcatcttccctttatttattgaaattccacataatatgtggaaaagatattcaaagagaaattagtatctttttgcctcagagtattatggtgaagtataagaagagtagccatgcagaagtgcttgatagattttataaatattataactttaatcttcataatgtccttattaaacgggcaaatgacataggtcaggtgatgttacgacaatatccaagggcttatgttgttggcagacacaggaatcttttgtggcacactgacagttttttgggtaatggcatgattgtgttgtcctttaagaaaactcattatataaagatcaaaatttaactcaaggagaggtattttacttgaaaaaagtattatgcactttattaaatagtcagctacaatgaaaaaataccaagtttctttaattctttcaagataaaaataggtttataaattaatttatttataacttttaagaaaatcttttaagaaaaacataatactctgaggcaaaaaaaatactgatttctctctgaatatgttttctcacatttcatgtggaattcttttccaagaaacaaagggaggaagaaaatttccacatttatgtatataacaaatttatagggtggcatgcataccatttccattttaaaagactaaggtgttcggagcgtgatgtgggctgattgaaaaaaagtaaaaaaaggctaagatgtgatgggaaagtacaaagagaaggatgctgcttatctcttcaaagtaggttggacttctgtctctggcagtacgttggatgagatctcctaaataatcttcctgatggaaacaactaaaatactgaaatggacatctaaatttttttgatgtcttttgtgtcattttcttctatgccaattcacaatttttgtttttccccttcctgtctcagtcatttataggagaaaccaggccatttttcctactgactgtcctacattcttgctttgactggttgcttcctcttataacttaacatttaaattttttcctttatcctttgtattttcagtaagcaggcagtttcatgtagatggttaattagatgctcattcatatatttttttaataggactactgtgtgttcaagtggcatcagcctgattccctcattataaagtttcctgtcaagctttcatatagcagttttaatatcatttgttgatcattgcacagatccattatttttttattaggaatctgcatttactcgctgcaaccctaaaaagaaaatctctcctcaagtatttggtctacttgaaatgaaattcataaaggaaagaaaagctaaatacttgagtctttcttttacatataaattattacagttatgagttagtgttccaccaacttgcaataataaccaataagtttttttaaaaaaaacctcattacctttgaatgaatcaaagattaaatcacagtggaaattacaaaacatttaaaaaaactaaatgataacaaaaatatccacataaaaataagaaggagtctgctaaagtagtacttggaggccaagttacatagcattaaaagcttacattagagaagatgaaaggctaaaattaatgagataaaattccaacttgagatgtagaaaaaaagagaacagagtaaaaagaaagaaatgtgaaggaaggaaatacagaaacagaaaagaaacattcaagagaaagagttcaaccaagccaatagttggtccttaggaaagattaataaaattaacaaacctctggcaaacaaagaaagaaggcataaattaacattaccaatgaaaagataatatagctatagttgctgtgaagcttaaacagatattaggaaatataagtaactttatacccaacatattgaaaacttaaaacagataaaatcttagaaaatggaacgcatcaaaactgactcaggaaaatctaaattgtcacataatcattaatcaactaaatcagttttaaatttctccataaagaaggcacaagagcctgtttccaaagtttaaggaatatataattcaaatagtattgattctagagaatagaaaaagaggaaatattccctaatacattctacgaggctaatgtaactcttttatcaaaaccagacaaggataacaagaaatataaattataggccacaaaaataatagtcataacaaaatgttatcgaactaaattcaacactgtgttaaaaagagaatacatcatgatcaaatttgatttcatgctggggttgcaagactggtcaaatatcagaaaatgaattaatgaaattaactacatcaacagattaaagaaaatcatataatcatttcagtgacaagaaaaagagtttactctatcacctgaaattcatttccaggtgtttactttagagaaactcttgtatatgttcccaggagacacacacaagaatgtacatagaaacacagaagataatccacaaaaactggaaaacatccaaaaacacatcagtagtaaaattaatacatacattatggtgtattcttatcacagagaactacacaacattgaaaatgaactacagctacacacatcaacttagatcaaaagtagaaaaatcacctaagagttcatataatgtgactctaataaaggtatcttgtagctttataaaactacaagacaaacaaaactaaaacaacatacactttaggaatacatgcatggaggcaaaactcaaagaacaacaaagcaataattaacacaaaattcaagacagtggttacttgaggtcaggggagaggctggttttgactggggaccccacaggggtgtctatggtcctggcaatgttctacttcttaagtcaggaggtggacacccaggtgttcattttattattgatctttaaactgtacataaacattttataactcttttttaatgtactctatatttcacaaaaataaataaaagtagaggtaagttgctgtctatttaagagaaatggtattgaaacaatttttgccagtagctgcttgcctgactgacagatttcccagcaggaactggatttggaaagcagctttccttctgtccatttcctgataaattattaatgaggctttgaattacagagaaaagaggacatagagcacatagaaaatgttacagaccttatttcttatctaactcttcctaatccaaaaattgagtggtaatagttgtataacattatgaatgtaattaatgtcacttgaattgtacacttaataatggttaaaattgcaaatgttatgtgtgtttaaccgcaataaaataaaagagatgaagaaaagtgacaagtagaaaatagaaggcaggaacacacattaggtgtgaatggagtgccaaggaggtaaagatatcccaacatcatctcagttttgaacaaagtaactattaacacattaacttaagtattgaatataacaaataaaaaaagtctacaggtagtatcaaaggcaagcctaaatgcttagtacctactttgaagataggtcaaaactactgggcttgagatgctagggaaagacctttgaccaaaagaagagactcctagtgtaagttgcactttcacactgaggagattttagggggtctttctggctcagctgctaaaataaatggttgtgaacatagcttggttaagccatatttcaaatgttaacagtacctgcttacaataagttattcattgcatggctatgttctgataaaaaagagttatattgtaaggaagtgtgatttacacatctaacttttcacaaaagcctattttgttagataaacagactgttgttctgtactgtcaaaaagaatgaaagtgccatcaacgggagacacaaagaatattctaaggggaacttactaggcagattcaaagaatgcctgagtctgcttgggcacacccagagataagaatgcagcgtaggccttcttgactccttgttctgtgttcttagggttcaatgggcatgcaaaccaaaccccagagatggaccactgcatgagacagtggcagcacaggtgcagtacacaactccagggcatactattcacacaatccctaagaagaatggcgcccccagagctggcaacgtggtggccccacccatagcgacagtatgtgacacttagcaaagaactgcttaaatgtcacagaataaacactattccttcttcaggaacattaattatgtccaaagtaagtaatgcaaaacattattttgatattaaaacaaaaatggctatatcttgactatacatatatatgagattcaatataaaattcacatcagccaaaatattagacttccaagaagcttcacgctttcagtgggccacttggggccacattcccaagtccctgaggaccagcctttgctgtcagggctacattggtgaaatgtattctctgacatgtctgggaaaataaattctcactataaattaaaattactattgattatcttgctcatcagtataaccagaatgaatttggggacccagattttacacatgattttatacaacactaattatacgataaatgagttgaaaaggttaaatgctaaaattactgtttctttagtagccacattacacactgtaaaaactgactccagtaagatcaataataatattagctgttcatattttgttgagttctgctattatccatctggcattaagccaagtcaatttgcatagaaattatttaaatccaccttgccatctggaaagaaagttatttgtaaatgacactaatcttgaattatgaatcctttaaatacaaaccagatatacagtaacaatggaaaacgatgcaacttataaattcatgctgtagaagaataaagtagaagcaagatacaaagtggtgatgtacataccaataatgttcttgtaaaaatatgcaaatgtatatatacgaagtactaaaaggacatatatactaaatactaaagtgattatatttgaatagaaggtcattttttttccttcttgtgttttcctgtattttccaatttccctccatttagcatctgttactttggtaattaaaactactacaataggctgggcatggtggcttatgatagtaatcccagtattttgggaggccgaggtgtgcagatcacctgaggtcaggagtttgagaccagcctggccaacatagtgaaatcccatctctactgaaatacaaaaattagctgggcatggtggcacacacctgtaatcccaactactcaggaggctgaggcaggagaatcgcttgaacccaggaggcggaggttgcagcaagccaagatggcgccactgcactccggcctaggtgacagcgagactctgtctcaaaaacaaaaacaaaaaaacacaaaaaactataataaaacaagtaaatacaagccaagtattaaaaatattcttggatagaaaaaataaatacaactatacctgtgaataaaacatctccgccatctaaagttgcattttcatctttcatctctactatattgagctgaagtttttctaatgcttctttcatcatgtcaacctgttgaaaataaaatgattcagattactatgctacaatttcctaacaagaaaaaaacatccaaaacatctaaacactaaatcaagctctcgtgcacacacccacacacatccacactcatatacacacccatccttgtgaatatataatgtatgaccagtcatgatcatttgtaagagaagaaatgatctgttaaaaattgtttattttgttcccttctagtgtaagattgagtcaatacagtgtcatttttttctgtagaaagctgagtagttacaatactgttggaggccgactagttaagacactgttggagtacgaccagttaatgcaccattggaagctgaccagttcggccactgttggaggctgacaagttagggcatttgttagaggttgactagttaggatattgctggagtctgaccagttagcacactattggaggctaaccagttagggcattgttggaggctgactagttagggcacatgagtaaaggaaggtgggaggcaaggcacccaattctgaccagttagcacactattggaggctgactagttagggcacatgagtaaaggaaggtgggaggcaaagcacccaattatcctacccttgccaggaaatacaagattccattttaaatcttatgtcagtcatttagtcagaattgcacacacacacacagtataatacatggaaggaatatcaataactcgtaatttgaaatctcaacccataggacaatcactgttttctattcaaatattttgtaaaatgtcaaaacatcctttgcttctctgtaaatgtaaactgtgttagttatattcaaacagttaatatgattacccatcttttaaaacctagttccttagaggtgattaacaagttcaacaattacaatcaaaccaatgaatatttgaaaataaatttcaggaatttgtatgattccagggcatgtctaaagcacagagatattctgggttgaattaaggaacacttctattgaggcttactttaatataagaaatgaatgtgaagcataacaaattgaagctcacaatttaattcaagtccttccagtagctcaacaaaacaatttaaatattttcaaaggtctgcaaaacctttaggatagtaaagacatacaatgagatgactcgaataggggacaagggaacaagagatcacatcacactgggcaaagcaggtagttcttccaaaaatacaacatgctgagtacacagtgtgaattgtcagtgaagagtttaagagacacaaatagagcagagttacttctaaagtaataaaaatatggaaatactttgacaacaagcctgacattcatgcattcaaaaaacatttaaagaggatacaaagtaaaataaatatatcatctcatccttgtcctggaactcatgtaaaaattccacaaaccagagtgactcagaacaataaaaaatatttccatggacaaaatggtcttaatgttgtagtaaatacattcagtgacctcttttaacagcagaataggttttcctatgtaataggaagtggaattgttgctacagcataaaataaggagcaaacacaatatttaccatgacttgttgggctactatgaacccaggaaaacacaactgtttccttttgacatctctgcttctttgtccatggaaaattcactgagcttagggagagatcatgagaacagatatacagttactttttgtttctattactaatgctactgcttctattataacttaacatttcaaagattaggaggagttgagcaataacataaattttggtttgaaaagtttgtatgtaactatgcaacatttcaactcaggaactgtattcaattcttaaaagttagaggagaatagaagtagggagtctactatataccagtttcagaaacattacatctctttaaatgtcctatgtctttgaaaattaaaaagttttagaggataaaatgtttgtgcttttcttttcttttcaagttaaaacagctgcactgacattaaaaaaactagctcttgtgcaggggcagtacttaaaaaaattcaatcacatctatacaaacagtcatcaggataggtccataccacacatgttgatgatactacattactttcagagttaagcacatggacaagatttttaaaaaattgtaaatatcaagtaaacagttttgagaactgcagggccatatggcatcaaatcggcaatgctaaactgagggagatttctggagaagaaatgagaggctgaactcggcaggctgtccattgggaaccacacactcttggcattgaggttccgttgaagcagacaaactcagctgcaaacaggcctgacacatgggtccatagcaagccagctattcaggcagttagaacactaaatataactatagaagtgggagtttttgcaggaaaagatccaaaccatgagcctttaagaaactgcccattctgtggttacatggccatggttaatgttgactttattaacttccaagaggaaaaaaaatgaccaaataacacacccacctttcattgagacagtaaccctgcagtgtggaacttagcattactcagagaaaccatcaggacaaacagtattaattccaacggctgagctgaatgggtcattttagcccacaaaattagaaataaaaagggaaaattagaaaaacaacctacttaatttaagccttagagtataaagtatatacagtaattttcattctttactcaaaagatttacaagacctttcttccctcccttttcatgctacatgcactttgcatttcattttaaaacaatgttatacttgcattttttgccccatttttctcctcatactatttatcacagcatagatttcttctctggtcacagctgctgcagatcacctctgctgcttccagttctgctacttattagccagtgtcctcaggttatttagtattctgagcctcagttttctcacctttaaagtgggtatttattcattatagtatcaactttttaggctccttctggtcattaaatacatacaagtcacacagtatttgctgaataaatattgtattttttatgaataacagcttgtgtatacacagtgacagatacttgtactataaaattagtgcacaagaaaacaactgttgttttttcttatatttggacatgtttcttgtgttttatccctccatgacagatcccatctgctttcctgtgaattaaaattatagattttttttttgcaaagccagtatacagttagagaacatacattgaggatacatttaaatttaaatttagataatccaaatctgatttccttccagctcctggaagctgtcaagacatgtggcaaatttcttgtgtaacctctgctttgaaatagcccttggaaagtactacataaggtgggaagtgggcctgtctggtaagatgttccacaggactcaaaagagcatcagctaagatgatatggaatgatcatggtcactgagaatattaccactctaagggacccaatcagtctaaagaattctttctctttctcaatgcctggtctccttccttacccttcccttttctactctcttctttccttcttttacggctctcatttccatcctatcatgttttcatgattatcctgtcttctcttttcactccctttagaccttcatggtgagtggcaagaaccagggattagaataaagtctttatcacttattagcaatgtgacttggataaattcacctctctgagtctcagtttcttgacctgcaaatgggaatagtgctttctctctaacagggattatgtgagtaacaaataagataatacatgtaaaacacctagctcagtgcctggcatattgtgctcaaaactagtagttgatgatattattattttgccctaaattaactcagtcctttgtttggattttggctacctttcaaaaacaagtaaaagataaaaaatacaattttctgtattaaataaaacatcttttaagttcagttttccttttgttcttgcaaaatctccctcaaacctaaaatactaaaagaactcccaaaaaacccaaaactctccctaatataaaacaaaacaaaaataaagccttatatagttttactaggaagctatattcataataacttgttatagcactgttagtttaatactctttatttcagggcaatattttccagttgaccctttccaaaattgacttttgctgtttattttcagtaatgccccttttgaatgtttcacatcttcgttctaaatgttgtgaatgtgcttgtggggcctggtgaacagttctgagctatggctccttaaagaatatgcaccaatctgttagccaagctgctttccttcagctgtttctgctgctagatactatgaaataaatgtggccctcaaagttggcctgtctgtggctgacatgtctcagtcaaccacagttctgccatgtgctagaagctgtgctatcaccaatgtcaccactatgttttcaatgcctgcttaagttgtcctggtttctttgtaactcatcacattacaggagctttaaaattatagaatcattctacccctacacttgtctagctccagagagttgaacagtagcaacatagctttgttggtagtgagatggtttcatctcccaactttttgctgattttgttttgccttttaatgttgagtgtgacatgtagataatgctgaggaagctgttcaagaagctgtcttggcacatcaaggcacagatggcttggaacttgctgatgcatcaaaatcactatattgtctgaggtcatattcaaaagaccacattttatttctttatgctactttaaacttctttgttaatcagcacatctttggtcactgtggccacttgctagtacacttggctgattttatgacattgcttaatgttgtatcacattttcacacatattttgtcatgtgaataacatctcagttcaacaaatatttggtggatgtcaacttttttttttttttttttcaaatcaggctacaattcttttttttaagccacagcccttgcttgcctctgtgaaattaatctagtggaacagatacaccttctgaatatatagtgacaataaaatggaatatttgttgtgatgctcacaataactccaaaaagaagaaagggtagatattagtatacccattttatatatgagtaaactgaggctaagggaggttgactgacttgccgagtcaagcctccggagcccatcctcattttcacttcactgtatgattaagattctcctgaggtctcatcatagagtgcagcccacatcagaattggagcccatgccttctgccttccaattctgtacatttaagtccactggatattgtaagatcctgtgccaaggtgactttgtattccatgatctcttcatatcagagataaatgaaatttctgtatattagggccttaggatgttaagttatagagtgattaagaacactaagtaatatgaacagaatatataaaccacaccaacctgtttcaccaagaaaaacctgcatattcattactaccctttgatttggagatgccttaggtttgttcagtggttcattcctaaatttgtccatatgtgctgattactttcttttttttttttgagacagagtttcactctttttgcccaggctggagtgcaatggcatgattttggctcactgcaaccttcgcctcccaggttcaagcaattctgcctcagcctcccgaatagcttggattacaggcttgtgccaccacacccggctaattttgtatttttagtagagacggggtttcaccctgttggccaggctggtctcgaactcctgaccttaggtgttccgcctgtctcagcctcccaaagtgctgggattacaggcatgagccaccatgcctggctgtatgtgttgactactaaaactagccaaaactaccaacaaaaagggatcgaacagacattttgtgtactcaatgatccggtcttaaaaatttctaaataaaaacatattgggatcctcttctatattctaattttaggacaaagctctcagaaggaatttagttagcaatggtaacagcaaacatttatatagtcttcctatgtgccaggcactctactatgaactcatattaaccttatttaacttttacaacctgatgaagcaagtacaagaatgatttgttttacagatgagaaaactggggcagagtaagtaaatttgatcaaagtctcatagcaagtaagcagagagctgagatttcaacttagctttgctcttaagtttgtgttattctttcctacacaatattgttactaaccaacaaatttaggtatctacaatgaaatcgagtgactgtgaggagctacagtactctccaaaacagattatgttcactattatttatttattgaacaaaaatgtggactcagacattctggagaaatggaaggatagaggctacaaattgcagcagtctgaacttgcatttggtttctaaacagtctaaattttgcttttctaagcatacacaaactaaggctaataaattttgggagccactactttctcatcagagtatgaggaggagttagttatttgtgtaaaaatctttaggtagtcaacagtgtattttaaatagtgaggttaccaaagcatatggatatgcagacacactccaaaccaagacattatatacactccaaacaaaagtgatgaatttagagagatgagaagggtttctaccacactaggaagtatagtaggtagaattctaaaatggtgcccatgattgctgcccccttgatgtacatgtcctgtataaatctctccccctttgagtgtgagtaggacctgtaaatatgatgaagatatcatatctgtgattggttactttacatagcacaagtaaagaaattttgcaggtgtaaagtatctacttagatgacttgagttaatcaaagggagattaccctgggtgggcttgacctaaggagaacccttaaacgtgggtttaaaggttagagacaaagaagtcagagagatgttctgatcttctgttttgaagaatgtaaacatccatgttgtgaattgcctgaagagggcctacagggtggcctctgggaactgagagcaattctcggctgatagctggtaaaaaaaaaaaaaacaaaacaaccaacaaatcaaatgggagccttagtcctacaaaaatggtcaacagaactggaaattatttaatcacgataatctttaaaagttatcaaagtcaaataaatattaaccctgtgattattcagagaactcatgattttatcaaatggtcaatacgtgttaaagttttataaccatttagctcattttccctcttattgaacttttgttataacttttacatgaataagatctcttgaaacatttcccacagactgttacatacccatttcattttttcccattgatttcttggatttccaaacatatgggtttatttctagtggaaactgctaaaaattaaccaagatatttagcattttggtttccatattagtaaacggagggcacaaagcttaaaaatgaggtcatttccggctctagacttctaaaagttgcagtctcagaaaaaattttggcattcataaatatgactctaactgtaatcctattttcctcccatagaatttactgaaaataccccagatggttactcatgagtaaagtattctggtgtttaaccaaatccaatcagaggcaagaggctggatatatgaatgcagacaagatagggcaaacctaaaagtggattaaaaaaactccagaaagatgggaatcctcagaggcaaacagaagattccaatgcagtgggaaacaaagagtgtgtcaactcaacactaacttatgatacttatattttatttttttggaagaacccatcacacagtttctccaaggatgctaattacttgccagtagtgagataagtatatgacacagagaatctacaatgcttttcctataagagagacgtcaggctctgcttatttgccaacctttgtgtgttttcttatttatattcacatgcagtatagtagatttcatcaactttgggttcattccctaagttggactgagctgttaaatccaaccctagagccctggagttcttgatatatgagatttttcatttcccaaaccaatctgagttgagttttctgttagctgcacctaaaaataactcatttattcccatgatcgatcttaacctgaaaaagaaggatctaacaagctccaggccgatgctctgagacacagggtcaagtcattctttctgctttgtcctactcctgaccatatacctgggtgctgctttggttcttttccctgaagtcctgttctagttacctatcccattcccttcctatgagtagggtcctgctatgcgctctgaggatttgagtagatgggcttccccaggtgatccctgttatctttatctcctcaacacacaatcagtatcaacaaggtttgaggaacctcttaaccactcataacactatcattaataataaatacaatttattaagctctttctaagtgccaagcattgtgctaagtgattttgcatggattatgtcatttaattatcaccatattccttaaggtacctcccagtctaaatcaggcatggcagttctgtctcttatgccagggtctggtgcaagtgacccaatattggccactgagggggtgtctgttgagaggttcctggagccatagaaagaaacataattcctcttcttcccttggacattgttctgtatagatgttgtacctggaactggtgagaacacatccatcatcaaatatggcagggcagagagagggaagcaatttgagcctttgatgacattttgagctgccaaatccaaccctagagccctggagttcttaatatataagatttttcattttattaaccaatttgagttttctgttagctgcagctaaaagtaactcatttaggtatacaacaaaattgacaagtagtatccaaagagtcagtaataacaggccactttatcaaactgattaaattctgatacagaaacaactattaatggaggatttttttctgtttataggaatgcaccatgctatttataaccacttacaacactaagaccatcctgcctatagaagacagtagattgtcaaactaaaagcatcccaggattatgttagtttataaagcacaattgttgcagctctgtatatcagagctggaattaatatttcaacactcttcatctctgaaccagtgctcagatccaaagggcatatagcatctaggaagattagacagaaatgtggaaggcaaacccacggagccaggagaaataaaaagcactctggacaaaactaggaaagacccttttcattatctggagaatacactgagaaagttccagaggttcaaaggtccctccataacgatgtcactacaagacagtttcccggaagaaggctggaagtgacatttagctttctaaatgaaaaacaaggcaggagctctgctggtcttgtcagctctcttgatatataatgtactaattcaagcggttcaattccttgttgacgataatgatacaatacatgtattgagtacttaaaagccactgacgttctgtctgcagggggcaaataaaaatatgatttatcaccaaataccaaattaaaataagtgtcagctgccaaaagacctgcaaaatttagtaggctaaaaaccagggaactgacaagtttataaaattctaaactaattttcctgaatgttgagaagcataaaaatttgctgtgcacatgatccaaaataagcaccagaaatagtactcgaagtgttcataattttctgtgaattcagaggaatcgcatgctgccagacacaaacagattaatgtatgggaaatattttgtatgttcagtatacaatttatacattgcaggcattaagctgccctaaaagccatccagcatatccctgctcccagcccaaatgtaggtcctggctgggtcagagattccttctgtgtgctcccatggctcccaggggattctttttttttttttttttttttttgagacagggtctcactctgtcctccaggctggagtgcagtggtgccatcatggctcactgcagcctcaacctccctggctcaaacaatcctcccacctcagcctcctgagtagctgggactacaggtgtgtgcccaatggccaattttttttttttttttttgtagagatggggtctacttatgctgcccaggctcggggcattctattaacaagttctggcccctagttgactctctgtatatgtttactgaatgaacagctgaacaactttgtaagtcagacagaatttctggaaatgttataaacaagtatacggcaaaaatatccaccttgtttagacagggcatagccacggcaagagccatacaacctctgtgacctcttttaaacaactcttacgacatttcaagggtgggaagattcatctttatttctaaaaacccgcaggtgagaaaactaccgttggcctatttgtcccaataatcactaaccgccactcatctccagtaattctgttcatttgcttagtcattcaacaaacatttattcagcattttcaatatacctggcactattctaggttccaagaatacatcagcgaagagagaagagccctgtgtatattctggtgaggatatggagagataggcaataaataataaacattaaaaatattagtggtaagtgctatgcagttatttaattcaggagatgtgatataaaatggctagggtagttactgtagtttggaaggtcaggaacagcctttctgaaagtgtgacatttgtgctgatatctgagtgaccaaaaggaccaactctgttgcccataggaagaatgttccaacaagagccagtgcaaaggccctaaggtgggaacaagcttaacttgttcaaggaacaggaagacagctagcacagtgctaaaatgaagagggcaagtgttatgggctatgtgtctcctcaagattcatatgttgaaaactcccagggcttaagaatgtgactgcctttagagatggggtctttagagagataatcaggttaaaatgaggtcattaggatgggccctaatccattatgactggtgtccttataagaagagcagactaggataaagagacatagatgaaaggccatgtgaagacacagatggccatctgcaagccaggcagaggcctcagaagaaaccaacccttccaataccttgatatcagactgctagcctccagcattgtgagaaaatatatctctgttatttaagatgtccagtcagtggtactagcaaactaatatggcattttaccagataaagctggggttgccagatggggttagctgaacttggtaaactcacataaagaattggaattttaagtattattggaagtcactggagagtctgcaggaagggagtgatataatttaatttacaaattctggatagctgctttgtggaaaatggattggaaggcacaaatggaaacagggaacttagttaaaaagcaactgcagtagtccaggtgaaagaaatggtggtgagcacaagtgtggtgacagtggagacaaagaaagtgctgaatttggaatgtgttctggagggtggacggaagttggtggattggatgtgggggtgaaggaaaggaagggcccagggtgacttttagatttttgtcttgagcaattgagtggataggtgtactgatttctaatatgaaaaattccagggagaggagcaaggctggagagaaaaaattgaagaactgtgtggccatgctgagtttgaaatgacttctagatattcagatggagagatcaaggggagtagtcagaaccagaaataaaaattgggagtcaatgatacaaaaagttacttaaatctaagagatatcagaagagctaactcaaaccatgatctgcaggaagtgatgtgaggaaacttgccttgtccattaatattaacaatactattctaacaaaaagactccaggagacattgctcattcattactgttgcgaagtttggtagctgtttgcagcaatggatgcaaaaatccccctttggcaggaagagctacttaacgtacattcattatgattgcaccaatgccatctagatcaaaggtctggaaacaaataaatggattgtaatgaactttccagaggtaacaggtagtgaagtcatcaagtgctacttcttgccacttgcttgtacattttcttgttaaattcagttttgtagatgctataaaacatagcagtaaagctgggcacagcagcacatgtctgaagcctcactacttgggaggctgaggtagggagatcctttgaggccaggagtttgaggctgcagtgcactatgttcacacctgtgaatagccactgcactccagcctgggcaacacagtaatactctacctcaaacaacaacaaaaaacaaccataccagtagcataagattttattatttcagaaatcaattttgaaattatgatcacttgaattggagacaagctgaagtgcattaagcaaatcaatagtgtaggcaaggctatatagcaagaacaactttcaaacacatttcagatcagtcagtccaaaatacattcacactgtatagcaccataggactaaatgaaagtttgctgtgctaattaaaacacattcatattcacttattcaagtaggtcccctaaatatctgaactgagaaacacttcattagtatatcctcaatgattgctgcataagtaaggctgcatttcttttaaaaatattgtatttgctaatttttcaccaattgtggagctttctcaacagctggtacaagttggtgcttttttgactgttctacattgccctgggtttgagcatgatatgcaagatggtttttggaacactgggatgatttctgggggggaattttgctgctttttttttccttcctagtccttagcttttttgtgtgttattaaagccttcattagagatggttgtgaaaggccctagtcaggataagcagagtgcatagtaattaattctgagaagctgccttctgattccaggctgaagcatggcaaatgattttgtaaatattcaccctttgtcatatgttcatacatttgcttctctgggaacttgtttaaaatatgttagtgaaaaaacaccagctgagtatttggatgcttataaatattaagtaaaggctcatttccaaccatagttgtacaaaatggctagtttcaagaaattgtcctaggttttgataactgtccgtgttctaacattgtgttaaaaaatagtgaatttttcttcactattatcaaatctgggcatcctcagctggaaaagactggaacagttcaatagtattttcctaatagaaacattccggtcaatattctaccaaggaaaactaattatcatctagctaatgagttttgcctttcctaaattactttaaaaaatatggtaagccatatttttcttgccattatagtttttttctccttttaaaaaagttattttttacttctaatttatcactaaatattaactaatttttaagtaaaacactcattggaggaataaccattaggaatataacacagaaggtacttcatatctggttttgagtaatactcaaagtacgataacctcaacaccatctagattctcttcctatgaggcagagtataatgaaattagattctcataaatgtcattgccccctatttactgtctttttccttgaaccaaggcagagctggctaggatccattgtctctcaagcagatttattatagatcgggtgcattccatttcagaacaggaatgtgcgtgttatgaaatgtacaaagcctacagttgaacaaagcacacaatctgtcggcaaaaaaccactattagtttaatagtgggtatagttagtaaaatttttctgatgtatcttaactaaatttaatattacataagttgatattcaaatcttgaaataagtccctagtgaacacagttctgtttatgctgtcaaaactaaatgcatttcagtattatgcaaatatataagtgaagtatttcttattgacgttatatagttagctagatttttcttgttgcttcacttcctcctggatagtaccacaggaactttgaaaagtaaattaactctttcaggtcttcagggcacaatgtaacatactttagtgctcaatgtcatttagaatctgtgcagtgaactaaagagtatctgatatggtttggctctgtgttcccaaccaaatctcatctcaaattgtaatctccatgtcccacatatcaaaggagggacctgttatctccaagcattgagggagggagatgattggatcatgggggtggtttcccccatgcttttctcgtgacaatgagtgagttctcacgagatctgatggttttataagtgtttaacagttcctccttcacacactctctctctttcctgttaccttgtgaagaagatacttgcttctccttagccttctgccatgatttcaaattgcctgagacctccccagtcatgcggaactgtgaatcaaataaatctctttcctgtataaattacccagtcttgggtagtatctttatagcagtgtgaaaatagactaatacagtatccttataaatacccagggagaaactaagagacagctctaagaacaaaaagaatgtgggtaaatttagcagttaaaagacacaaaaaactaggattgcaactatttttttttaagtatgcctgttaagtatacctcttaagacttaaaggaaatatgcaaaaatgcaaagagctgtggttggttggtggaaaatggttgatgtgacactggtggaagaagttaagagatacttgggaccccaaagcctgaatatttaaaacttcatctactacctacaattccagtaaccattgctcattctggttcacaaggcagggggcacagcttgtcagtgcgtactttccattactctaaacatccaaatactaacgtgactctagataggggagactggaccactggaagctgtattaccagagtcttttttgcttgggttatccacccctggttcacctgtggtctactccatccaggctctcactgttggagtccccatacttccctgggctattattttagactgaactcaaaacagccccagaccaactttttctcctacatgacccatttctagtccatgcaaacacttgcacatcctttgtttacaaactctggcagtgcagctatgaccaacacagtagcactttcttggcttcctacctaacctgttagtcaccagctgctaatcctctgtatctcccagacacctatccttggtgtttccaaactgcaaaaatatatttaatctctctgagaggtttatttaaagcccactctccctggacttgaagtgaaaaaggtaacatatcccatcccacaaatttaatgtagagaaattagaaagtatagataagtcaaatagaaccattaaaaatctttgtaatcccaacacccatgcatagataacacttactgttaataatctatcacacaaacttcaacacattcctattaagtatttttatgagaattttttttttgctcatactgttataaaattatactataagcacaaacatagttaaatagaacacagggtactattataaaccaatttaaaaataaattcatactatttaaattgagattgctttaaattagattttctgaaaaaaattatcttctgaaaacagtcttttgttgttaggtaactgcaaataaaataagtaaagctccttgtattgaattttagagtacttcaagacctaacccaaagcagagatacagacttttatggtggtaatataatttgagaactttataaaacatttaaatatttaaagaaatactcaaggatcaattaggataggtgttaaaatttgaggataaaaagctacatcacaattcacagtgtttcttctctaaatatgcatgaatcaaccagagatagaacaaaataaaaatatttagctgccaaaaagaagttgttctgagacatcagtacaggttttcttctgtgatgatatcaagttggtcttgcagcaaatgttgagaaagtaactttacaactgcaaaataatcattggatgttgcacagagagaggtccctctgttctctgtggatatacagagcaaacccagaatgcacctggtcaactcgagccctcattatcttgaagacacctgatattccataagactagatgaggctgccagctccttgtccacactgactacatgccatgtaccccattttataactaaaaaggatttaaaattcatgaagcttgttgaaagctcaactgtcacattctactcattccaaagtgtatgggaaaaagagcagaacagacatttcaactgaagccattattgtgcttgaatagccatattccattaaattgctaataaacctactagacggtgttgatcacatcagccatacagttgcattcctttcctttataccaacttgcccagtttcattctatgcagtattactctttctgtgccctttattccaaggttgcccagaattcaaagcacttattcagtaagtttgtaatccagtttagtatgctattaacagaattctttagaggagatcatggaaaaagaaactcaaactcatttttgggtcaatgaccaaccttaagggaaacacgtattaaaccagtttaaagaaaaaggtcaggatccatgaggtattaaggaaaaaagggaagaaaaaacattcatttccacaattttccaacattccttaaaaataaaaacaagcccaagcatggaatggcaaggccctggtgcccctgtactaatggtggtggacaatactgctattcataggaagtgagaaagcaaaggtttttcctcaacaccagggaagttttggcttcccttaccttcatttattctggggttcaaattggaaccttataaatcttaagtttgcctctcaaagcaaacaataatgtacaatggattaaatgctttaaagtttgctttttaatagcataactaattaactgcctctattgtaaatggcttattaagccactcctattagggtgttaactactgaaaatatgtaaagctgaatagataccgtatggaattaggcatttaaaaataactagtgcactatttacactacctgcctgatgagtagtttatcccccatttagatattaactgaaaatatgtaatggaaaacaaataaaggaaacagatgtcttaactttaaaattctttcatcaaacagcagttattttcttataatttttaaattctatatccatcttagagctttagaagaaagtctaggtctctccaaattcagggtactaaacgcttgcctccatccaggcagttttccagtgagcagagttggagaagcttttcttttcacagggtaacttgtttggaataagctgtctgtgtatccagaatggtctttttttttttagcaaaatcaagctggagaaaagtgaaattcactccctggattaccttatgattatgaaaatatttgtgtctattttttgagttcccaagattaggcaaaataaagtgtttttttttttttcctgcagcttccctgctgaaataccttagtgagaatgcataaaaaccaactctaaatgatgcacaaagccaccgagagtaagtgttaaagcaacaataatgtgattcaacacaaataagtaatagccccaatacaaaaagctgcaaaattacagtaattttacaatccatctgaagtagcaaaacacattgttactttaccaaatattaagtgatcacctaatgtatgtcaaagctacatgcagatatatgtgtggtaaatttctggactggagaattaaatgaaaagaaactagcacaggatatttagttcacagaatcatgaaatgtaaaactcacaagagacatttgtggtcatacagctcaggtgaccaactcccagtaggttggcatgactctcccctgccacagaggcagaagcaggattagaacccaagtccccttgtttacggtttaacaagattcctgataaactaaaaatggttttgatatgaaaagccaatgttaagactatgaatagaaagctgtttctacttttaaagttttagaatcattaatacattattaattatatatacatatatatttaaattgtcttctagactccaagcataaattaacagatttcatttaaagttttcatattggctgggatttcatcatttcatggcatcaaatgaggagccatctgccatctaaccaaacccaaaggccacagaataaatgtggcctggcactgaaaaacaagagtgaagaccatggtactctgatattaggcaggcaggtacatttttagacgtttccatacaattcaaagttaatggtctaggtgtttttcaattggtattgatgaggaaaatgtaaaaatcaaagtgatttacaatgtctgccagattttccttcacagattcttttaggaagcaaaacatctttctctttccttctccccctcatccccccacccccatacaagtagacacacacacacattcagtaaaatttttgagtaatccatttgatgactgaagatttggcttcccaactaaattgataacctctcttcttcttcattaatatttgaaggctgcccacctaaagaattggaaaatatatagtacaaactgtaacaaaatttttgtatttgatctctaatttctgacagctgaacacttggcaaatgtatatataacgtgagcataaaacatgtcatatgaataaagttttcagcatgaatattttataagtgacttattggacttcattccttatttcaatcatattttgcatattgccattttatgaaggacataagtaaaagactattctgttcaacacaaatggtatcaaatttggaaaaccaaaaagggctaaaagaagttaatgagggtgaatggaatcacccctattaaaggtaaagtgatagagcaggtgtaagctattatgaggaggccattttgtatctcctcctcctcatagtttctccctaaatatgccaaaacgaaaatcttagctttggttatgtgcttagcatgtcttcattaataaaaatctctagtaatgtaatggaaagaggattgtgctctgctgtagaaggcagaaaaagtaatagtaaaggagtaccctctctatggaacctgggatttttaatttttatttttattgtttttttgagacagggtcttgctttgccacccaggctggagtgcaatggcacaatcacagcacactgcagccttgacctctgggattcaagagatcttcccacctcagcctccctagtagctgggaccataagcatgtgccaccacatccagctaatttttgtattttttgtagagacaggttttcaccatgttgcccaggctggtctagaattcctgagctcaagtgatctatccacctcggcctcccaatgtgctgggattatagggatgagccaccatggctggccctctgggattctttttaacaagtggaaatcctagcaaacgaaatgccctattctattcttgcaaatgaagtaagcatccagacagctgttttgtgacatcactaagcaagtataacaggaaaaggcagagaagacactgtacatttatctgaaactctacagaaaacttatagtgacaggtagagataatgaggcacagctaaaattctaaattaaaaatatttcaaaaggcaaatttcaaaaagctttttacctttaccatttctaaatttcctaatgtgctttaaatgcaaaaatatgtcttaggccaggcccacagatactaaaatagcacttaatctattgctccattacaagtgaatacattatttccattatggtttatctgtagcaaattttgtttttaacctcaagggaaccgtataatattaagggatgtaagtggccttatagagaattatccagtcccttgttttcacagatgaacaaactgaggcccaactgaacctcttgttaaaagccaccagctagttatatttcagagctgtgtcttctgtctcccagggcagggagcagtgctctttccatcacatccacagcatcggcctcccactaaatggttgcaatagctatagtcaataatggtgcccaactatgctctcttcctggatgacctaatatttaagcttcataacaagtccatgaattacgtaatatttgaaccactattctacagaaaatttatagtgacaggtagagataatgaggcacagctaaaattctaaattaaaaatatttccaaaggcaaatttcaaaaagctttttacctttaccatttctacagaaaggaaactgaggcacggaacacttacataacttgtgaaagagtcagcctgcagagccacaccacacaccactcttcaccattatactactgttcactgttctcttcttttccaaggcatttgttgaccttatattcactgtactctgaactgaacttatctatttcccaaacctgctggcatccttactttccaactcagttaatgtcatcactgtcctctttaatcaccaaccttggaatcttaggtcatctttgactccttctgagttcctcactcttttccacgtttctaccactggaaaggatcttgaacccatgtacactgcaatttcctaacaaaaggcctcattccctgttgcctgaatgattgcaaagcctcctaactggtctccttctaacagctgtcccttctcaaattcatctcacacactggagccagagtaattctgccaaaacaacagagagctcattggtttaaaaacccaagcttacctaacattgtctgttacatttttcttttaagtgtatgaagttttctttttctttctcaatcttctccttgaagccttatacaattttgtgaagttggtattattcttcctatttaacagatgatgaaccaggccgtatgacattaagtaatgtttagtagataatttaaaaacttataaattctgttatgtaaaaatgtaacttcattttcttataagtagataatccgggtaaacacagtcaagtccagtaatttctcaattatttgaaattccaactcagttaaattcaggtccatcccctcctttccactgctttcttcctaggtgacattcacaatgagcatttacccagcattttgtgctggcatcttccaggatgtacaagcatcccaacatagtctcagattcttggtccctggcactggcagagctgaaatggtcatattcccactggcctctggttacatgatccatgctgccttctgtagtcacatattatttgtgataacaaacaaggtaaggatttgtaaggatcagaggtaaggcaggcataacgtagaaaactgactagcacaaggtctcttatttacaattctgaaagcccaaagttctgaaaaccaagggtattcttttttaatttagtgcctgaacttatttggtagtaaaacctgatttgatatgaaagttttagactttatatcatctagaatgaacattcctaggttttgctgcacatatattaatgtggttgattaaagggtgctatcttagacttatgtgtgtgtgttatgaaatatggttgacatactccgtttactttcaaaatatgaaaaattataaattttaaaacacatctggcactctgggtttcagagaagaaactatagacctgaaagatatattctagccgggcgtggtggctcacacctgtaatcccagcactttgggaggccaagacaggtggattacctgaggtcaggagttcaggaccagcctggccaatatggtgaaacctcatctctactaaaaaatacaaaaattagccgggcgtggtggtgggcgcctgtaatcccagctactcgggtgagacaggagaactgcttgaacctgggaggtggaggttgcagtgagccgagatcactgcactccagcctgtgtgacaagagcaaaactccatccaaaaaaaaaaaaaaagatatattctttggatacagaattctaggttggcaagtgtttttttgttttttgtttttttgcacttacaaagattgtcattacaatgttttcagcctgcattgtttcttttatttcaatagttttgggggagcaggtgatttttggttatatggataagttcttcagtggttatttctgagattttggtgcacctgtcaccgagaagtatacacgttacccaatgtgtagtcttttatccttcacccccctcccaaccttcccccagagtccccaagtccattatatcattcttatgcctttacgcctgcattgtttctaatgggaattccgctgtcatcctagtctttgttcctttatatacaatgagtatttttcctctgactgcttttcagattatctcttcactactggttttcagttacaagcataccttgttttattgcactttgctttattgtgatttgcagatactgtttttttttttacaaattgaaggtttgtagcaaacccgcatcaagcaagtctattgatgccattcttccaacagcatgtgcttgcttatatctctgtgtcacatttttgttaattcctgcagtatttcaaacttactacgtccacataagacagcaaacttaatcaataaatgtgtgtgtgttctgactactccattgactggtttgtttccgtcactccctctcctgggggtctacctattcctggagacatagcaatattgaaattaggccaattaatatcctaccatggcctccaagtgttcaagtgaaaggaggaattgtacatttctcactttaaatcagaagctagaaattatgaagcttagtgaggaaggtatgttaaaagctgagacaggccaaaagctaggcctctcatgccagttagccaagttgtgattgtaaaggaagttgagttgttgaaggaaattaaaagtgccactctagtgaacacacgactaataagaaagtaaaacagccttattgatgatatggagaaagttttagtggtctggatggaagatcaaaccagccccaatattctcttaagccaaagcctaatccagagcaaggccccaactctcttaaattctacgagatctgagaagaggtgaggtgaggaagctgcagaagtttaaaggtagcagaggctggaagtttaaaggtagcagaggctggcttatgaggaaagaagccatctttataacataaaagtacaaggtgaagcgataagtgctgatgtagaagctgcaagaagttattcagaagatctattacagctaacacacagcattgtatgttatgaatatggttgatgaagatggttatactaaacaaaagttttcaaattaaatccagtagccttatattggaagaaaatgtcatctaggacttctctagctgttaaggagaagttaatcctggcttcaaagcttcaaaacacaggctgactctcttgttagaggttaatggagctggttaccttaaattaaagccaatgctcatttaccattctgaaaatccttgggctcttaagaataatgctaaattgactctgactgtgctctacaaatggaacaacaaaacttgcataacagcacatctgtttacagcatggtttgctgaatattttaagcccactgttgagacctactgctcagaaaaaaagattgctttcaaaatattactgctcattgacaatgcacctggtcacccaagagttctgatagaaatgctcaaggggattaatgctttttttacacctgctgacacaagattcattctgccacccataaatcaaggagtaatttcaactttcaagtcttattattgaagaaatacatttcatagggctattgctgccaaaactgtgattcctctgatgaatctgggcaaaataagtgggaaaccttttggaaaggattaatcattctagatgtcattaagaacatttgtgattcatgggaggaggtcaaagtatctacattaacagaagtttggaagaacctgattccaactttgaatggtttaagacttcagtagacaaagtaactgcagatgtggtagaaatagcaagagaactagaattagaagtgcagcctgaagatatgactgaattgctgcaatctcatgataaaacttgaatggatgaggagttgcttcttatggatgggcaaagaaagtggtttctcaagatggaaactgctcctggtgaagatgctgtgaaacattgttgaaatgataataaaatatttagaatagtccaaaaacttggttgattgacagagcaatggtagtttgagaggactacaatcttgaaagaagatctactgtgagtaaaatgctatcaaacagcattgcttcttacagagaaatgtttcatgaaaggaagagtcaatcaacacagcaaacttcactgttgtcttattttttaaaattgccacagtcacctcaaccttcaacaaccacaaccctgataggtcggcagccatcgacattgagacgagaccctccccaagaaaaagattatgacttgctaaaggctcaggtgattgtcagcattttttagccataaaatattctttaactgagatacatatatatttttaagacatgatgccattccacaattaatagactacattaaaatgtaaacataacttttatatggactgggaagcaaaaaaaattgtgactccctttattgtggtatttgcttttattgtaataatctgaatggaacctgtactatctctgaggtattcctgtatttgatcatgatgtgtaaagtttctggtattaagtagtgatttcccctcactgctaaggcaaggctcttctgaggctctactcaaagccctgtgtattgtgaggtctctcctttctggcttttaggaatataatctcatttctgcgtgagttctgggaattgtctggtttattttctgctggttctttctctagctttgggtagttcctcttatgcgtgcacagacaaatacatacctacccaaagactcaagtaacaatcctgcatatctctggaatgctgtatttgagcagcccctcatctccagtactctgccctgcaaattctaccattttagttctcccaaactgattttttgtcccctcaatttgataagaccagtaggttctgttctgcatcccctcctccacctctgtggcctgaaaactgcctccagacaataagctgggaaaattgtaatctcaattcatttgtttcccttccctcagggatcagtcctacacttcctgtgtgcactgtctgaaaagctgtttcatatagttggtccagttttctaattacttacagcaaaagaaaaattcctgtagcagttaatctttcatgatggaagtcaaagcttcaagactatacacctaaacattgttacttttctttcctgaccacctctgtgacaacattatataatgtcccataactcaaatgaaaattttttctcatttaaacaatgaggaacaacatttctccccttaacaaatgaacagaagggaggtctagaaattgcttctttaagaacaaatttagtgattcttgatgatcttggtgacattggcatgaaagggagcagacagtgagtgtgataaaacttctttaggatttatttacatgttacttaaaatgctaagctctgatacaaccttaactctaatggaacttggaagctaattaaggagaccttttataactgtatagcagtctgtctctggactgtatttggaagatgagtctgaatcaaagtggttaataagcaaatttaaccatgacattacaattaacagagtctcagaagtacaagtaataatcactgctgattcttttcctcttctcctctgcaatatctatttaagcttttgagtaagacagacttggtctgccagagtacctttgctgaagaactcaaagccactggcacagagtaaagcagctggaaacacagaaccatagctatagccagggagcttttctaacttgaatcaaaaacagattcagaatggcttggagaaaaacaatccactgaaggctggtgaagaagaccaggatcatcttagaaataaataaagcattagtaaaatacatactaaattatagcttactgactgtattctttaacagtttgcttttaagaaagcaacctcattttaacacatatttcaaaagaagaaaagttggaaaatgtgaaatcttttcctcaaataattttgcccactggaaaacccataagtttggaccacaaggccttaatcaaggcataacctcttatctgatgcaagtttactctgcagttagagcggcctggcaggaagatggtataggagagcagctgagctcatggatattggaacaaatgaggcctcattttgaatataggatctaccacttacttactagttgtgtgaccttgggctattactccatgccttagtgcatttgcattgttataaaggaatacctgaagctgggtaatttataaagaaaagatgtgtatttggctcaaggttccacaggttgcacaagaagaatggtgccagcatatccatctgggaagggcttcaaatcacttctactcatggtggaagccaatgggagcaggtataagcagagatcacatggtgagagagatgaaggaggagagagagggaaggaagatgccaggctctttttaacaagcagctcttgcaggaactaatagagtgagaactcacccattaccaggaggatggcaccaagcatgagggatctacccccatgacacaaacacttcccactaggcccacctcttaacattgggaataaaatttcaacatgatatccaaagtatgtaatcctttccctggttccccaaatctcatgtccttttcatattgcaaaatgcaatcattctatcccaacagtcacctaaaattttagcttgttccagcatcaactcagaagtccaaagtccaaagtctcatctgatactcaagggaagttacttacagctgggagcctgtaccatcaaagacaaattatttatttccaagatacaatgtttgtacaggcactgggttaacagtccgattccaaaagggaggaattggacaaaagaatggggtaacaagccccatgcaagtccaaaactcagtagggcagacgttaaaccttaaagctccaaacaatccttgactctatgtcccacatccagagcacaccggtgcaaggggtgggctcctaaggccttaggcagtgctgtccccacagctttgctgggcagcacacatggttgatctcatgagttggagtccaatgcctgcagcttttccaagctgagggtacatgctgctggtgggtctataattctgggatcttgaggatggcagccccattcccacagcttcattaagcaataccccagtggggactctgtgtagggggcttttaccctacatttccctgccacactgccctagtagaggttctctgtgggggctccaccctgcagcaagcttctgcctgggcactcaagctttctgatatatcctctgaaatctaggtggaagctgccaagcctccatcacccttgcattctgcatgcctgaagacttaacaccatatggaaattaccaaggcttattaaggcttataccctccagacagacaattggagaaataactggccggagctaaaagcagcagggactggggggtagtgtcctgaggtggtatagggcagtggtgccctgggccattcccctgaaaccactctgacctcctaggtctctgggtctgtgatgggaaaggtggtcttgaaggtttctgaaacaccttcaggacctttttcccattgtcttgactattagcacctggctcccttttatccatgttaatctctctagcaagcaatagatcagccacatccttggatttcatctaaaagtgctttttccttcctactacataggcaggctgagaactttccaaaattttctgctctgtttcccttttaaatataaattccaacttaagctcattcctttgctcccatatctgattataggctgttagaagcagctacaccacttcttgagtgctttgctgcttagaaatttcttctaccagataaccttcatcatcatcactattaaattcagccttccacaaatccctaggacatggacacaatgctgccgagatatttgttaaggcataacaaaagtgatctttgctccagttcccactaagttcctcactttcatttgagaccttgtcagctgggcttcactatccttatttctatcaggagtctggtcacaaccaattagccagtctctaagaagttccaaactttcccttgtctttttgtcttttgagccctccaaactcttccaaactctgtccattatccagttctaaggctgcttccccattttcaggtatttttattgcaatgctccactcctcagtaccaattttctgtctatgatgctataaaggatactggaggctgggtaatttataaagaaaaaaggtttatttggctcacagttctgcaggctgtacaagaagcgttgcaccagcatctacttctgacaagggcctcaggctgcttccactcatggcagaagggaaagaggagtcattgtgtgcagacatcacatggtgagagagaggaagcaacggaacttggggaggtgccaagttctttttaacaatcagttccaggggaactaatagagtgagcactcactcattactctgaggatggcaccaagcctttcatgaaagatctgcccccatgacccaaacacctcccactaggcttcacctccaacactgggggtcaaatttcaacatgagatctggagagacaaacatccaaactatatcactcaacttctacaacttctggttccttgtctgtaaattggagatcacaattgtgactatctcatagggttgatatgatgattaaatgaaataatacatataaacagccttaatgaaaagcctgacacaaagtgatccctcaatcttagttatgtgccattactactattgttaagaaaaaataaactttctcttgaacaccagtcttataaatacaagtcatataaatagacagtaattgtcattaaactatgagattacagaaataatgtgaatgaaaaagtcattatataaaaataattgtaagccttgttcacagtgacccatgaaaaaatgcaattggaatcataaaaggaaacaacacactaaatttgcctcatttttctgagtaccatttcaaaatctgttgtccagaatcattagaatacttaataaagtgtaaaatgacatgttacatgaaaaaatcatgaaaatgtcattataacaacccagagccatctcctctttggcttatctggatgtagcacccagtaaatcctagtagatagtaatactctaggaccaccaatggctctctgaaaaatgtcacaaaggagaaagtgtcaccttcactgtgctcctgatgaagctatttctatctactttcagtgtggagtatttggcatcctgactgacagtctgtttaaagttcaccggcccaggattcacttaaaggaattcaaatagacgacccctaagaggctatgtagcaaaatgattacattcacaggttttgaaattaaacaacttggttcaaatcctttttctgatagttgctagttgattgggaaagatattacactctgagcctcagtttcctcacccataaaatgatcattaacagttgtttttaggccaggtgtggtggctcacacctgtaatcccagcactttgggaggctgaggcaggaggataccttgagcccaggagttcgagatcagcctggacaataaagtgagaccctgtctctactaaaaatgaaaattaaatgcactccagcctgggcaacagagtgagatcctgtctcaaaacaaacaaacaaacaaacaaaaacaaactggaaaaaataaaaataaaagttgtttttatctcaaagcgttgtgatgaataaaatgatgtttataaagctcttagcatggtgacctactcagtaaatgttcaataaatattatttactaactattaaattttagtctgggagtctagactatcccatacagaagtctcagaataccaactctgtgctacttccagcactgctgagttatccattcactgaacagatgtgtgttgagtggctgatgctgtctcagaccctgtgctcaatgctttactcacttagttgaaatcctctcatcatgatgggctttataagagattgtgagctctgtgaggctagagtctctactctgatgttgatggctatataaccatgtaatgtacggggactggcacagtgcctaccaaacaggagatgctaacaagttttatggaatgaataaatgagcaaaggatgaatgaatacgacacaaggaagattaactccttgacctaggggaactcatgttctagttgggagttggaattagctccctaaaagacaatggaagcaaaaagtgttagagagggaattttagagcccaccatgctagtgggctcaccattagtaaaatatcaacaatttctgttacagttatgctaatgtaattcagtgataagagcaaaagaatgcataatccaagttgacgattctagaagacctcaacttctaacgaaaaacagaagcatcttttttactacttatcataggaaaataaattctagtcgtttttatatctgaagtcaaaagatagaaagaaatatgtggtcgcatatctttctatgttaagtcaagcccagtcctgcctcagtgtcctcaccctatttgctggtggttaggggtgtcaatcaccacctcccacctcttctctaccttatggctaattaggaagagacaaatgacaaatagggatcatatatcagctttatccggggtcccttggtaatggccaaattggagaactggcaagatctcctaccttctagttagaactgaacacagcctgatctgcaattagagtgaatctgatttaaaacccaactgcaccatcctctactccacacacctgtcccaagacattctacagcgtatgtggggattataggaactacaagatgagatttgggtagggacacagccaaaccatgtcacctactgacctccaggaaagggaagggggaaggactggagattagactccataaaaacttctgaataacaagatttgataagctttggggttggggaacacatggatatgctgggatgtaaggtacccaaagagggcatggggttgccacacccacccccataccacagtgccagcttcttagacggtagtcacagtaagtggttattactgcaggggcctctttatttgttctcttcttgagcactgagatcttagagccaaagccatcctagctctgagagacccaaaatccaacataaaaatgggatccttaatttctaaacatctgacaactctgccttccagtatgcctgcctttttcacgtacagaattatggctcaggaagctgcaaatatcaaatcttactacagataatatagaattataatggctactatgcagaatgttccagatgaacaagaccattcatataactgtacttgaatcccaagtttctataattaggcagagagaatggaattgttattctaattggcattcagaagcctcaagcagacaacaggattctaaaattgctttttaaaaaaattcattgcaaagagctaataaaaagttacaaatgtgagatatcatccatacgaaggacagtaatattaacctgacttattctgctcccctctgtcttaaatgccttccttttctgaaaacacaattaaatgctttctttataagaaaaaccaccccaaattcaggaagtaatccctgagtgacttatactcttcggacaaaaacagagccaagggccatagtttaaaaagttcctaaacctacagaagacctccaaatattttctgaagagaagccaggtgtagtggcacatgcctataaccccagctacttgggaggctgaggtgggaggatcacttcagcccaggagtttgaggctgcagtgagttacgattatgtcactgcactccagcctgggcgacagagtgagaccccatctctaaataaataaataaatatagaaaaatgtaggaaaaatttagggtcttcactgaaacttataaccccaggatatctgagctcaaccaactaatacacatattggtgagaattagagaagccccaaaatgggtgaaagatgcagaatggtattacctgacaagccctgcctggtccattatggaaagcagggaaaaactgcaaataactttttgaaagccattaccaaagtgtttcagttggatggcaaacaacaacctaggctggccttttggcctgctctggggcatttctttaataaatggctgaaaaaacagtttccaaaaaactgttggtattggtgcaaacaagcaggacattggaaaagagactgccccaaatatttccagggaaaacattataaacaggctgtctaccctctgataaactccacattgaccaccaggattgacaggcctttgggggaagctccagttgttatcctgtaggtagacaccagaactgtgatttctactttatctatttattttttttaatttttttttcaataggttttggggaacaggtggtgtttggttacatgaataagttctttagtggtgatttctgagattctacattaaactccatttttgtttttgtttttggcttaagcaacaaaaatgtattgtctcagttctggagcctagcaacttgaaatcaaggtatctgcagggttggttccttgctaaggctatgaggaaagcatctgttctaggcctcgttccttggcttatagatagctgtcttcatattcacattgtattatcttggtatgcatgtctataggtccaaatttcctcttcttataaagccacagttatactgaattagggcctactctaattacctcattttaatttgattaccactgtgaagactctatctccagataagatcacattctgaggtactaggggttaggacttcaacatacgaattctgagagggtatcaattcaactcataacataagtgctgctgagctcttgttagaaaatgaacccgtgggctgggtgtgatggctcacacctgtaatcccagtgctttgggaggctgaggcgggcggatcacgaggtcaggagttcgagaccagtctggccaacatagtgaaaccctgtctgtactaaaaatacaaaaattagctgggcgtggtggcatgtgcctgtaatcccagctactcgggaggctgaggcaggagaacggcttgaaccagggagtcagaggttgcagtgagccgagatcgcgccactgcactccagcctggcaacagagcaagactctgtctaaaaaaaaaaaaaaaaaaaaaaaaaaagaaagaaaatgaacccctgatgactctcaggcctgacacttcccattttgaggtgggtcaactacgatgcaactacaaggaaaggaagtaaaatctcagacccttcacagatcctgacttcatggggactgatgtaagaataaaagtcctgcagtttccaaaggtctttgacatggacactctaagcatctgacatacatggctgattcctagtatttggtctctcctaggtcattttgctctataacaataattcagttgcccattcttttaattgttttattccctcaaacgaaatatttattttgcacaagacactccttaatagcaataacaacatcaacaactaatacttatagcattgttctgtacactatgtatcatctttacttcttaaaatacccctctgaaggagatattattacctctagtgtacagatcaggagactgaggcataagtcacacagtttaaactccacttgtggggacagtctctccctcaaaataaaaaacaaaatttcagttgtgaggaatatcaaatccagttctatccatgagtccaggcaaagaaaatgccttctttgtcctattcattagagggctctaccctgaagacagtgatccaattaataaacaatctaaaatgaccacctattgtactaaattggtctctaaaatacaactttctaacatttagctggctatttaaaaaccccttgtaaaagaaatttacatctatgaagaaaatctccatttctaagggcttctctttctttgcacctaaaaccattagaaatttttacagtgagaaagacattggcttaaaattcacataacaaaccttaactgtgtttatagtacttttcctgcccatcttgtcttatggggtcttaatctttgcccttgtctcagcaaataatggtgtttagatctcagttgtgtgctttgagatgtaaattttctacattgtctcacctaagagtcatgtctttggaatgacaaatttagggttgcctagctaacaataatttaaaacagcagaacaggtaatcaggagattgataatctaaagaagaaagagaaactattgaaaaactggcaaatagagaatcttataaaagctctaagatctgcttctggctgtgtgtctgtatgtctacatgtgttatatgtatgtgatattttgctaccaaaatatatgaaaaagctttaattaattggcttaaagaaaaagtaagtgacaaaatataatatttcatcagaaaaactgcactaaatgctatggtttgctgtgtgtctgcaccaaaattcgtgttgaaatttaactgccaatataacaatgtggggaggtaaagtctttaagagatgattaggtcaatcacatagattaatgtctttctcatgagactaggttaattccacaagactggattagttctcaaaggaaaacaggttgttataaggtgaggtcacgcctgtgttttatcccctttccatgcctgctttcccttctgtttctccaccatgttatgatgcaacatgagacactcaccagaagctgaccagatgggctgccccgtcttggactttccagcctctagaataatgagctaaataaaccacttttctttacaaattaccaagtctttggtattttgttatagcaaaagaaaacaggctaagagactaactcaaatacctttcagttcatgtgacaggtaaatctttggtaaataaggctagttcaataaaacagtgtgtcttctgaccaacaaaataacctcatatttaactttagggctcttgtttaggtagcaactaacattggcatactgtaaaaatggttaacaaggaaataacttgagatagtggccagctttgtttaacgaccaattgaagcataatttttaagaacaagtaaattaggtgaaagtaaatgagttaaaggttttaaataaactcttcatagtttcaaaaatctcaaagtaacataatcttaaagtcatatgattaagtaacattcctgaaatgtcagccatttccaagtaagttagaatactgacccattaattgctaaaaatgattaaagtatagatactttgtcatcttgtgttgttataaaacgttggcatatgatagttcaaaattgcttacttcctaggtttcactagaaattaaggttactaaaagttaaaaattctaattaatatatgtaattctatatgcaaagtataccaagagaaagtaaaatgtgttttgggtgaaaaaaattataaaaagtcatgagaatatatttttgtagaaaagagttatttcagctaattcaaaggttaaaggcttttcacaataaagatttatggagaaaatggaaacaaggcaggaaggaactattaagtaggaaaaagagatacaaaaaagttgtaagtctgagaatatatttttggtaaagaaagttgaaaacagactaatttttttgaatgacaattctgtgtggtcagaaagatgagggaaaaagaaaagtaaatttttgccctaaggtagaatgactggttgtttcaatatgaaaacgaggagattgggcgcagtggctcatgcctgtagtcccagcactttgggaggccaaggtgggtggatcacctgagggagggagttcaagaccagcctgaccaacatggagaaaccctgtctctactaaaaatacaaaatcagctgggcgtggtggtgcatgcctgtaatctcagctacttggaaggctgaaggaggagaatcgcttgaacctgggaggcagagattgcggtgagctgagatcgcaccattgcactccagcctaggcaacaagagtgagactccatctcaaaaaaaaaaaaagaaaaaagaaaaagaagtgaaggtttgagcaagctgcacgaggtctttgcaagttttagaagatttatggaagatgaatcttatgaaaggaattttgagtgtgatcaagttggctaaaattaaaaaagaattgtttttaggtttttctaaaaattaagctttatttttaaaattttaaaacaaggttttcttgacatgtactgatcttttcttattaaaaaaattgtgagactttttaggtatgtggcctagaaaagaaagattctgtattttgtcaaaataatttctgtgcttcatgttttctttcttaggtcattaattacttaggaaaactgagtctcctctttattataagagttaagattttctacagctatgtaacttcttttgaagtattttaattatcattgtggctaaatgagtattatattcaaacacttgatcaaaaatgtgatcctatttttgatcaagtgtttgaatctttttgacaaacttcccaaaatgaaattctaagtctccttgtcttagtccctttagagctgctataaaggaatacctaaggctggataatttatgaagaaaagaggtttacttgactcacagttttcctggctggaagactgggcatctgacaaaagcctcaggaagcttccacttatggcagaaagcaaaagggagtcacagtacagagatcacatggccacagagggagcaagagaggagtggggaggtgacaggctcttttaaacaaccagctctcacaggaactaatagaatggaaactcactcatcgcaaagaagacaccaagccattcacgagggatccatccccatgacccaaacacctcccattaagccccacctccagcattggggatcaaatttcaacatgagatttgggggacaaacatccaaaccacagccacctggaagtccaaaagagagatattaaaccaattaggtttatttgatatgttaaattatataggaaatattgtcaataagagataacgtttaaccgtcttttccttacatttgtatagatacgatattaaaatatttattcaggccaggtgtggtggctcacacctgcaattcctgcactttgggaggctgaagtgggcagattgcttgagtccgggagttcaagaccaccctgggcaacatggtaaaaccctattgctataagaaatacaaagaataaccaggcatggtggcacacaggtgtagtcctagctactcgggaggctgagaggtgggaggatcgcctgagcccaggaggcagaggctgcagtgagccatgatcacatcactgcactccaggctgggtgatagtgtgagaccctgtcttaaaaaaaaaaaaaaaggtttttcaaaattgcattaaatttctagaaatcaatcataattttggttattatgttaaaatgttgtatgccacagaaataacacaatttctttgtcagctgcatcattatagactctcatcaggttttcaatgatggctattttaagtcttattgtcctcagttaattgctttattctgatgctgttctgaaagctttttgcaagaaccataatcttcaaagaagttcatggaaagaatggaaaaaattctgacaagtacaggtttgtgacaactttgagatagcactggattgggtaagaatttgtagaactctaagaaagaaactggtagtttagtgaaactatcaactaagatcaaacagagcaagaattaattacattagactgaaaaactgataaggaaaaagtaagggtttttattgcttttttatttaaaacattgctggttctcttaatgttttattttccagatttaagaaaacgattttttaaagctatctctagctcacaatggtttggtagagtacacttttataaacaaaaattgaaacattccatctttctccttaatatgattattttcataagctcaataagaatttgctctctgtattacacaatacaattggaaacactggtttaattgccaaggctttgactgaaatgtaatatttgagaattaatagaatgcctcgcttcaaggattcccagtgtgatacagtttggatgtttatcccctctaaatctcatgctgaaatctgatccccagtgttgaaggtagggcctggtgggaggcctctctcgctatgtgactctactgactcccctagcctcctaccataagtaaaagctttctgagcccctcaccggaagttgaggagatgctggtgccatgcttcttatatagcctgcagagctgtaagccaaataaacctctttttttttttttttcataaattacccagtctcacatattcctttatagcaacacaaagtggacttacacacagcattacagtgagtgagtaaaaagttgtcacttcctggcaggcctaggaacctcaagacactagataaccatagacaaagtagacaaagtctgatgtcggccttggtttggcttcctagtgatgagaggtttttaaaagtataatctgagattgtttgtcaaaatttccagcaaatcaaatttaaaaagaactgtgtggttattcttgctgtacttatatacaaataatcaggtgaagtttaatgagacgaaacttattttgcaaacaaattagtcttactctgattatctttggtagaaatgggggtgattatagacagaaaaattatgttgcaaaagaaaaactatagtacaccttttagtagattgcagccttgttcactttttccctagactggactggatcctgaattcttttagtgcactacctccagtatctagcttcaactcttcaactaagagcaaaaatgctaagctggacaacttgatagaaatttcaagggacaagtctcatgtgtgatgtgcgtgccatacagagagttcaccagaatatctaacgccacaaccagggacattcaaactgcaaaccaggttgagaatttgctaactgcatgccgtggacagcttttcccaaggccatcagacgaagacttcttatgatattcttacccctcttaatttttccttgcttatgcctacttctttcgcttggcagaataaggctatggttaaagtttcacaatccttagtttttgtgagtaatctgacagcatgttgaatctgttatgtcaaatctgaatctttaaaaaacctgagatcctttagtccacctagtgggtaacttcagcaacatccctaatatccctaatgcaactgtttgttcaaattgtactagtgatctcttttatagagttagtactgtctgttttaatttaacccattcctggaatgctatatgatagaattgctaccgactaaatgaatagggagaaatctgtgcaattgctaatacttcttgttacccatagatataatgagtatccggcctggctcattctttgatctatttaatttcagttggtttagtttatggggatcctagataaaggagcatactccaaactcctggcattatccttttgatagtcataatagtagtttctctggtacactatatcctctcgaaaagttttaaaggttgcacacagccattcatcaaacaccaaagagtctcttttctgctggaatgacaaaaactcaaataaatgcatgatgatgagtacaccataacctatgaatgacttgtagagaccagaaacccagcatgataataagagtagcattaatgcccttagttttggtcatgcactcacccaggtgaaagcatgactgaaaggggaaaattgttaaatacaaaatataggaggccattgttttggactaagcttctgcactaggccccacagctcctgcattaggccccaacagatttgactaaaaatcaaaatggagttatccatgctgaagttccacatcaccaaactgaaactaagttgttatataacattccaagaaagcaggagagagagatagcagccaatttcccaaataggccaatttcaatcttcaatcagtaggataatagtttcctctgttttaatccttaaaagtaacctgatgctaaccaatctttctatttttctgcctccctgtccctgcctttcaaggaaagtaactttgaaataatcaatctgttttttgttcttcatttttgctttccttagccctttctgtctataaaaccaaccccttctgttcaactcactggcaaatttattgtattttatggcataaaatgttgcctgattctagaattgcaataaagccaaccgtgatctttaaaactaaatctattgtaattttgttcttgaaatgcccaagtggactcaaatatttttttctttggagaatcttggccttgttttgctgcatcccagccaattgtttagcaaaaaaaccttgagctcactggcattatttatcaaaaacaatcagggaggaatgcctgaaggacacatagtctactcttgcaggaattcctttcttttcttttctttttttttttttttttttttttttttttttgagacggagtctcaatctgttgcccaggctggaagtacagtggtgcaatctcgactcactgcaacctccacctcctgagttcaagcaattctcctgcctcaatctcctgagtagctgggattacaggtgtgtgccactatgcccagctttttttgttgttgttttttgtatttttagtagagagagggttttgccctgttggccaagctggtcttgacttcctgatctcgggtgatctgcctacctgggcttcccaaagtgctgggattacgacttgagccactgtgcctggcctactcttgcagaaattctaaaatgtacatctaattagagagtttactttctataatattgaattaactgaactgtacctactggtaaaaatgtggtagatgatgctatttatatcattacgcactgtccacatgggatccccaggaagaaatttttctctgagcttagtagtaatcacattttcacttctcagaatctgacctgcctgtatctttaggccctcatagactaaaatacccaccaggttcacttctttatgctggtggttagaaagctttcagtggaatttgtgacccatctgtaacagtgtgtagaccatacattgtgttcctggccacctaatggtaatcattttatcttattcctatatccatcttttgattggttctacctttattatatatatccttccaagctgccttctatcccttctgcagtacaatggtacataaatgaaaaccataaaaatgtaagcagagagatatgatccatgcccacaatgtgattgccttcttcaaagacattgtaggcaaatgtccagggtttctaaagctttatataatacgagaacattgggctaaagagtgaacacttttgagtacagcagactaacactatctctcatcattaaaaggcgatcttcgtgctgctcaaatgtagctttcataatacactgccttgacacagtctagcaatacaattacaggaatcgatccttttttccaacaggttacagtcctaaaatgaagagggcctactatgaaaacattcatgaaaagtgaaatctttcattattggtatcttctttttacctggatttattcacttccttggagcagtagagaatgactaaatacatcagataaagataggctaaatagcacataaagaagagcatggtttatatttacttttaggaaaaagagttgtaatgaggatgaaatataattttaccttggattttaagagacgcagcttttcttttttcttttttctttctttttttttttttttttgaggagggtttcactctattgcccatgctggagtacagtcgcatgaccaaggttcactgtcaccttgatctcctgggcccaagcaatcctcccatctcagcctcccaagtagctgggactacaggcgcacactaccatgcccagctaatttttaacgatttttttgtagagatggggtttcaccacgttgtccaggctggtctcaaactcctgcactcaagtgatccacccacctcggcctcccaaagtgctgggattatagacatgagccactgcacctgactaagaagcagcttttgagctcttaaaattcctattattgaactgtagaattagattttcagttatatgtaattttgttttaaaaagaagcacaattactatcttacttaaaagaaaacattttcaaaactattttgcatcttgttcctttttaatgtgttctgaaggcaatgtattttattttactttaattaatttttttagagacagggtcttgctatgtcacccaggctagagtgcagtgctgcaatcacagctcactacagcctcaaactcttgggctcaagcaatcctcctgcctcagcccctcaaatggctaagactacaggtacgcaaccaccactcccagctaatacttctattttttttttttttttttttggtacagacagggtctcactacgtagcccaggcttatcttgaacttttagcctcagtgatcctcctgccttggcctctgaaagtgctgggattacaggtgtgagccactgtgcccaggcctgaaagtacagtcttttaaaaaatctgcctccaatttctttcttctagccagggtctaagtgtgaatgcttttcttcaagcagagtctttcaactatagcaaataaggctacttgtcaaactattcttatagacaaaatattttcaaaaatattttcagtacaaattaatttaccatgctgtttttatctcagatttgatattttcttcagaaatgtataatttcagttacaaatactaagatataaaaatgctttgtatatttttctggtaaatatagctgaactaagattacatttctagaaaacacaattaataaaaatcttctggccggacgcggtggttcacgcctgtaatcccagcactttgggaggccgaggcggtggatcacgaggtcaggagatcgagatgatcctggccaacatggtgaaaccccgtctctactaaaaatacaaaaaattagccagacacggtggtgggcacctgtagttccagctacttgggaggctgagacaggagaatggcgtgaacccgggaggcagagcttgcagtgagccgagatagcgccactgcactccagcctgggtgacagagcgagactccatctcaaaaaaaaaaaaaaaaaacttctgacaattctcattttttgctccaaaaatattagtttaacctccacagatacctgttttcttaagcatgctgggtatgtacccatggaggagtgtctgttccaagtgataagaagggatctgtgtgtgttggctgtggactgggactgtcccttagggactgctaatgtttgatctggtgagtaacaatcacaagtttgagggaaattttcccttggatatgtaaactcctagatttaccacatatatacatatacctatatatatatgaatatatatatgaatatgtatgtgaatatatatgtgtgtatatatacacacacacatgcatgtacacatatatacatatacatatatgtgtatgtatatatatgtatgtaaagtaaaacagaatagttatatccaaagaaaaaaaaatctgaaaagaataattcaaaacgtgcgagacacactgtacttaaaatgtacttgaaggcttgtttctgtaagggttgcctaaacatccctaggctctactcttcaggaatcttatttccaggcacagtgtcctggagcatttgcaatttttcaattggaactctcagcactttactttaaaaatagtctaaagtcagaaactgaaatagtgatctatttttcaacccccaaattgctccttagtcaatataacgctgaacatttctgaacaaaggattcttaaggctggctgtggttcaggcaagtcctaaacttattaagggtaaaataagttattcacaaaagaaaaaatatatagtctattctcagttggagaaagatctattttcccccaaaactgaattatgtattaaatcagttcaaattttattttggaccattaatctgtaatttaacatagttgttaaaataaacggatgtttcagtctattttatgtcaagttgtttactagaaaaataattcaatgggtagaacatttaaaatattgttttccctgtgtgcttacttacaaatggatacatgttgtactcttggcaaaatttacttgttacattttaacaatgtaattgctgacaataaacacattagtacaaaacaatttctatatcttaaatcacaactatattcctcctgccacttttagtaggataatgaatatttctataactagtttttaacaagtttctaaaatatttttaagcccatacgaaagaaaaaaaaggcttatggaatttttctttaagaactacatattatatttcacaaataaagctaaacagaaaaatgcagatcaacattacaattcgcaagtattgagcatttaatgacctccatttctagaatccacttcttagaagatgccaccagttcatattgacccattatacatgaaacttctgcctgtaggattgcagttgacaaagcctgaaagaccacattctagaaggtactgctaagcttcatttgtccttaccatagctgactgccatcaaattgccatccagaactgcttttgggaagcagttcctccgcaatcttttcaacagattccctgttttaacatccacctgtgttactgaagaacagtctgacccggattgagccatggagcaaataataacactaactgcagctccagacagaaaaaaaaataggagttcattttccagactcttgtgggaatacagagcatgtctgctgaaaccgaatccaagagttcaatgatactgtagactcaagtatttctttaaattccacgtaatagcttttccgttcttggtgttttataacacacttctgagccatgattcagaaagtgagggaaattctctgtctttctctctctctctcaagttgagttatataaaaattacaattgtaaggtgaagctctaacagaaggccacaggagttgctatatgtactgttctcactgacccatcactgcaacttaagtcagttcatgtggactttctttgagggaacgccatttctttaggcattaaatctaaacttctttcctttgggttttgttttgcttcatttttgccagactctacaatccgccctagaaagcctgagtattacatcttcattctgtcattttcaaccctgttttctctcttgacaaggatagacatgttattttgctgatatcactgttgagttgtatgaggccttctccctttatgcaggggccaccagagtaatcagttttatgtagctgccacttcatactactgtatcctaacagcagacatgctagcaattctcttcagtttaattcaataaattggccacatgggtctatttattagctgatattggcctccaacatctaatataacaaatattaccgaaaagaaatagggttgaaactatacctaagattacagagggaaatagtcaagcatctgaggaaaagatcttgtttttccctgctattaaaaaacttaactgtaaaaaacactgtatgtagttctatagacggcatgcatcatcaggctgtgagtacagacacggagatggttcctttaaataaacacaggtgtcaggacgcttaagcatgtaaatggaggtcacaccttattttttctgtaagcttaaagtcttaaaaagtcgtggtctggatcaacaggagcaggggctgtatcaaggcatggtccattccctgctccgcatttggctgggaaagacttggtccttggctggatctaaaaagtgccctaaaaaaaaaagccctactttatagcagtgaatagtaaactggagatagcatgttggaatacaagtcttgagagaaggtggaatcctctatgaaaaagagagagcctcagagaggggagacaagaacccaagaatcacaaatgttttgtttctctgcaagaaagaatgccaaggtgcaagactatcccgttctcttattccaagctgccctcatgtaatgaatgctctcagccactcactcgaatacgtttcttttgaaattagaagtaaaacctaacacttatgttgccaacttaaagaggtttggttgtatttaagagcacacggatattagcctccaacagttttaaagaagctaagaactgacatttatccaggacccactatgtgccagggctacctaccatgtttcctcatttgaattccataaccacccatggtggtgtgcattattatgtttactttataaatgtgaaagttggagcccaaagatgaggagtaatttgttcaaggccacactgtctagaacatggagcaaccaggcctgtccaattccaaaagccacgttctatctcaaaagcttcttttagaatatttgatacagtcctcatagagatttatgaaatagaattttatcttgagaaactaagaaacacagaagagaagctttcctcatcactacatctggatccaataaacttaaaaatatttttttaagatacattacatttggtttctttctctttttaaatttgtagtccaaattatccccatcctctcagcaaaatgaaatagtaacctctatgataaattatgagattatctataatgtgaaatcatcatgaagtccaaagagaaaagaaatgaaacaactattatgttttaaaacttgaaatattcaagaaggatacatatagaatatacatttttaaaaaattaattttttaattaacaaaaattgtgtatgtttatggcatgcagcattatgctttgaaatatgtatacattgtggaatggctgaatcaggcatatggcttacctcatatactgatcatttatttgtggtgagaacacgtaaaaatatactcctttagtttttgagtatacgaagcactgttattacatatagagaacagaatatactataaacattcataaagggcaagctgaaaaaattacattcctttatttcatggtagttttaaatttttatattaaaaactattatattaaagctttaaaataaaatgctatattacaagggtctttatgactcaaagagaaacaaggaaaattagagtatatttcataaaatttaaaggaaagctcttttatttgaaatatataagaagaaaaacacattatatttctttaagagactttagaccttcctccttgagtttttgtttttcatgtgtccactttttaaatgtttccatttcctccacacacatatttctgaagagttatgagcaggaagttttctcacgtattttcccaagtagaaaggcctccagctgcacacagactttcccattgccccagtattaaagttctgggtaaaattttaattactaatttaggaaagatgagacattttaaaatttaatacagtttgccctttttacagaccatgtagaataaagcctcagtatgcttgaaaaaatctcttagcaactgagagcggagctggccaacaatggatgattcattgatttagcttgagtgtgcaggaatgtctgccaaaaggtctgaataaactcacattgctagacactatggtaaaatgtaccctgacctcttttaaaactctatcagagcggaaagttaaacttgcagctttccagcaattcactggcatctggaaacacacttgaattataatatcttgcttttataacaatcgatagattattattttcacctaattagacaatggctgctactaattggaggtttctaaggggacaccaccgtgcttttaagcactaaaaataatggtttcctattcaatttaaatctgaaaggaggctttttgaaatcccaaactgaaagaactgattgttggtttttggtaatattgacccaagggttatgaaacattaccctaaacaataatttgtgcatttaaaattggtaaacattatgtaacagatatcccatgtctctaagtttatgcatacatgtaaagattatatataccaggacatcctagcttatatttatataaaattcaaaaagctcggctcttttggttacatctatcatttgtctcctcaacatcctttttaggggcaagtattatttctcctgctttagaactggaagaccacgcatgtggaattttaaattgttggcttgcattcataggtattcaaatcaagtgcaggcccgggcttacaaatggatattctagtttaaaattgagtattagacgcattgcactactttatcactcacaacttcagcagctataataaaaataatccatgaaaccaaatccttgtttcccagtggtgaacaaagatatacttcctggtttcttttgcccttcacaaatgtaagcatagagcatggaacgttctgccttgaaagagctgtgcttttgtctgctttacttcttcttcctcatctttccccttacctttttctccttcttcctttttttttttttatctttttgtggtaaaatattcaggattaactgaacaattctctgctccaccccagaggtaaccatgtttatcaatttgaagtactccttttcatattgttttgtggagcatttccatgattaaatgaacacataaaggtatatcattttgatttacatgttttccctgtttaatatattatcacatattgttctataacttactttacaaaaaaagtacttcttggaaatcttttcatacctgtacatttgaatccatttcatttttaaaattgctaaaaagtatgtcacagtgttagcttactttctgaaatggggcaagttatacacatccactaaaaatacagctgttcttccagaataacctagatggtcatatagaacaaaacagcatatggaaaagtacaaatgagtgaagaaatttagcctattttttttaacttacttcactcttgacaattatatgtatccaatagcaccagaggcaatgaatgggcttgttacactggatgctaaaatccaagtagtaagacgaatatgatggggatcttgccagaaaggggccttgtcacttggagcagaggagtagagagctttatgggtcaaagctgaatagaacacacacggttcctgccctcatgggggtaacagtctaactcttaaagaccttccaacttcacccctcctttccattcccacagtaactgatagtctagaccaaacttgtccaacccacaacctgcatgccacatgcagcccaggatggctttgaatgcagccgaacacaaattcacaaactttcttaaaacattatgagatttttttgatgatttttttttagctcaccagctattgttagtcttggtacattacatgtgtggcccaagacaatttttcttcttccagtgtgccccagggaagccaaaagattggacacccctggtccagactttccacatttctggtgtgaactattgcaggaacccctatgtggttttcttgagtctagtgtcttgaactgctaatccacagcagagatattcccaaagagaaagatctgatcatgtcactgcccaaatgaaacaccttcattattttcccttaaatgacaatacaggacaaagtgtaatcatctcaacctgacattcacagtctaacttcccaatttttctcctgttactttaagttctagtcacatcaaacttcctactggtctgtggagattctacgtcacacttctatgctttttcacatactgcctaaaacgttgtttacctttttccacctggatctcctgcttgttgctctacaccggcttcaacattgcctctttggtaaagggctacctgacttccacagcagggatttacttcttctgtgctcccaaagcaggttgcattcacctctataatggcatttcatgctgtttcagcattatttgtaatgcatatataagttttcaactttatttataagaaattgtacatattagttaaaaatcaattgtgaagcacctacctatgctaaagtttttgtcaaatcttaagttatcagtcataactcattgctatactagtcctcagccctacttgagttgttggactgcaagttaattgggaagatccaaagccaattgtaatcataacaattctccttatgtatatatcaacagagattatgaaattatagattagctgagcacagtggctcaggcctgtaatcccagcactttgggaggctgaggcgggaggatcacttgagcccaggagttcaagaccagcctgggcaacatggcacaaccccatctctacaaaaaatacaaaaattagccaggcacactgccaaacacctgtagtcccagctacacgggaggccgaggtgggataatcgcctgagcctgggaggtggagactgcagtgagctgtgatcatgcccctatactccagcctcagcaacagagtgagaccctttctcaagggaaaaaaaatagatctacagaaatttccttaaaatgtaataatgtttatctctttttgagaaaaaggaaatgaggccgggcatggtggcccatgcctgtaatcccagcactttgggaggctgaggcgggtggatcacctgagtttgggagtttgagaccagcctgaccaacatgaagaaaccccatctctactaaaaatacaaaattagctgggcatggtggcacatgcctgtaatcccagctattcaggaggctgaggcaggagaatcacttgaacctgggaggtggaggttgtggtgagccgagatggcaccattgcactccagcctgcaataagagcgaagctctgcctcaaaaaaaaaaaaaaaatggaaatgaggttaacattgaatattctggggttcaggtactgagtataattgagtttaaaacacataatttgaataaatttttaaagatgactttgtagtagttggcttgacctagtcctaagaatactttgattctcaattttacctaagtttgtatcataaataattctttgcttccctgctagaatgccaaagtatacaagccaatgagaaatatccccctgcttctggtggaatatgaacctataagaagcaggcattctgatgacaggtgtgggaaagagggagggagacagtataaaagggtagagtcaaccatcaaagaactcgtaggctgttgtagatagcactgttcatccatggagctgagatgatgtcttgagacccaactctacccaagcatattcttcataggtccactgactgagtgtcttggcggggatcctgaccagctatcttagtctagcccacaagttatcacagcatcacaaaaaacactgcagtgcatatgaaaacatttaaccactgtcatccatgaaacagaccaataacagttgacagtgaggcaggagtctaagaaatagcaataaattgttatgaattgcctggaattaataaattaaacatttggaacaattgcagtaagtagcttagagtaatatttaaaaaacaaacgacaagtgttaaggtcaagtaggtcaaacagaggaattcacataactagagaaacaattagaaaggtaacaggcctgccttaatcaggatgctcatttgcttgacaaagtaaattttgaccctgatgaggggactgatgctgtgttcactaccatgctgtgctgtccttctgtcttctacaccaaattgcatgagctcatctgggggcagggactgtctttcatttctagactccctagctcttagcaaaatggctgtcctgtatacatctgtctagatatagatcaggacaacagacaattaattctattgggtcctaaatataaagactatgaaagagacatctgcagttcctgatagctgccatgatggcaactgctgagccatttgaaggtaaacgctgtgtttcactatgattctgaggctccccatggggactgctgctgctgcagattccttagaagtattctgatcatgctggcttctgctctgaaagggaggaatcttgagaaaccagagaaaggtcagccgacacctcagcctcagcactgtggaggtcaatcaatagctggaagagggtatagaaaggaataaaagcagaacctccaatctaccaaggcctgcaggaattttctccactgatatcattagaacttccgtctaaattatcccactgatatagaatgtacttgtggaatttaagagaggcattggactgatttttaaaattcctacatgtaccaaattccagacatagtgccaatggcagagaaaagaatatttttttaaaaaattaacttaaaacatgtgaaaggttttgttttaaggcctgcaatagtctcttgtttactataaactgtctttataattcaactccatgtgactacaggaatttcttgagtcggagtctactatgtcatgctagaggctctaacgctatttgttaagtgacacaaatgaacacagaaataatcagtctactgttagaacacactgaatttcatctttcagggtcttctaacaattgttcatctgcctcttctagctagtccctcatggcaaaccacaatgaccccttcactcaacacaagacgatcttcctgtgactgaagtctcttggtcattactggctctaagcctttgctcggttatttctttcactgagaacatcttcccctcttctttactaccaatcggtgtagtatggcccaaaacttcccctttatttccccctaatcccacctctttttggcttcatcatgttgaaggcatctgttgagaggacatttgtacccctcatccttggaaaagcatcaaggtagttccttagagaatgatgagaactggtctaaagaacagtgcaaatggcatgtataaaatattttgagggccaggcatggtggcctgcacctgtaatcccagcacttacagaggccaagacaggcacattgcttgagcccaggagttcgagaccagcctgagtaacatggcaagaccttgtctctacagaaaactaaaaaattagctgggcatggtggcacacacctttagacccatctacttgggagactgaggtgggaggactgattgagcctagcaggtcgaggtatcagtgagctgtgatggtgccactgtactccagcctgggtgacagagcaagaccctctctcaaaaaataaatttttctgaggaaggattactttgttaatatattctagaaatatatagccagagaaaaacgtaaaataaatctattaccatgaatacctacacaccaggctgctacatgactattaccattatcaagttctcactacttttgatggaatcaaggaaatttagtgcactttaaacaactgaactgcatctatgataagtggaaagtaaaggaaatttacttaaagttttaccatttaaggacactggatcccagtcctatgaacctgtgccttagcacgtattttttgcagctgctgatacactgaagagccaaagctaagctttgaaagtttggattcctgtgtgttgtgataatcagctggggtttggaaatgccttcaaaaatctaatgctctggccctttaacaaggcttctgaaaaaacaatttaacatctggaatcaagtattttgtggaagtccaagaccaacagggcaaagaacatttctttcagtaacagttaaaatgtggcacttccttctccttcatcaaataaatgggtttatttaacaaagatcctgaggtagtttataataagtaaaatatggcatagaagcaaggtatagaaaacaggatactccagatatttatcactgaaagtctttcctaaatatgctgctttattcttccagcatcattttcttttccaaaattcaaatccgaaaaacaatcgaagtcaagccttcttcatttaacctttctaagagactgcagagtgaggatgagtaaagaaattatagagttcatctttcatcttttccaacatacttcagaagaagacaaaaacagtaactgaatgtatgaatttcttaagtctttgggtagctacagtaactcatatcaaatgcaaaaacagaagtggttatatctattgaatgttgactaattctctacagattttagatattgtttaaaacaacatatgaaaatgtgtttcctactaaaataataacagatgacatttattgtatgcttaacatgtatcaggtcaggcactgtacatttaactttcaaaataattgttatccttttcttcttgtgatgagtaattaatacagtggtatggtagaactggcatagagagagacaaatagaacaataaaatagaaggattagaacccagaaacagatccacacatatatagggctatagctcacaacaaagagagcattgtagatcagcaggaaaaggacagaccattcaataatggtgccaggagagttagttctccatatacggtgtgggtaacaagaaaaagaaggaaattggatcccatcctcacacaatatataagaatacattccaaatggaagtaaggtcttaaacatgaaaggcaaaatgctaaagcttttagaagacaatataaagaaaggatctgaccacgttaaaattaagagctctggttcatcatcaaaaagtaccacagagtaaaaaggcaagccacaaacttggagacaatctttgcaacacacacaatcaacaaaggatgtttccagaacatataaagaattcctctgaaaaagagaaacaactcaatagaaaaatggacaattgatcgataggtacagtgtttctcttccactttctaagaaatggaggagagagattctcctttacccactaacctacaatgctctctttgtctgagttatggccctgtacatatgtgtggagttgtttctaggttattccttctattttattgttctttgaaagtggaggagagactcaaagactgcctggcagatgggatgtactcaaacaacatttgatgaatgaacaaaaacacaaatggcccataaacatatgaaaagatacccaagctcattggtaatcagggaaagaaaaatgaaaaccacaatggttttgttttttaaaaaatagaaggaaaattttaaaatcaaaatttggaaggcccctgtgactttaacgaaaatcaaatatttcaagtgttgctttttttttttttttttttttttttttgagatggagtctcgcactgtcacccaggctggagtgcaatggtgctatctcggctcactgcaacctccgcctcccaagttcacgtgattctcctgcctcagcctcctgagtagctgggattacaggtgcctgacaccacgcccggctaattttttgtaattttagtagagacagggtttcactatgttggccagaatggtctcaaactcctgacctcgtgatccacccaccttggcctcccaaagtcttgggattacaggtgtgaaaccactgcacctggccaagcggcacttttacccattgcttgtgagaacataaatgcttgaaagctatttcagcagtacttactatagcttaaaatcttgtacactttacaagccagctctacttctagaaatctgagagaatttctagcacgtgtaacctaggagatacatttcagtttattaattgcagggttgctcatagtattaatagcaagaaacaatccaaatataaatcagcagaaaaaactgaatatattcatacattgaaatacatcatacagtaatgttaagtaaaataagtcacacaaaaacataaaaagtatgattctatttatgcaaagttcaaaaacagaaaaaaatgaaacactatattatttggggggaaatagacaagtaatgaaataatgaagaaaaacaagggaataggttgacataaaactcagacgagtagttacctctgtggggaggattgtgattgaggagaggttcacagatgccttctaaattttgattttttaaatctgtgtaataagtatacaggtattcattttattttctttaaacttttcagttgttttaaaacactgttctgaatgtatacttttcaataattaaaaaattatatgtcagctacattttaaaatgaatcaaattcttcctgaatcctaccataggaattatctacttatataaattatatcatgaaagctttagaaaagcaaataatattaaagaaagaaaagcaaataaaataaccccttaatttattaatactgatgctcatacttttagttttgagtttgcttatgttaggacatatttgcatataatttacttcgaggtatgaaaaaagaatataaattttttgaatctttcactctaacaaagtcttatcacagtctttgtgtgactgtgattttggtttccttctatatatagtatttggtttttgtttttttgggtttttttttgagacggagtctcactcccgggttcaagcgattctcctgcctcagcctcctgagtagctgggactacaggcatccaccatgacaccggctaaattttgtatttttagtagagacagggtttcaacatgttggccaggctggtatcaaacttctgacctcaggtgatccagccaccttggcctcccaaagtgttgggattacaggcatgagccaccatgcccagcctacaaacagtatttgactagtttgattatctgcagggaaatgttcataaagttcataatattcccaaagatagttattttaaaaacagttgtctctagtttctggaaaagaaagaatttagaatagtgtggtcagacctggagtggatcagacaactgaactggtgccttcttttctttttttctttttttgaaacagggtcttgctctgttgcccaggctggagtgtagctgcatgatcatggctcactgtaacctttgcctcgtgggctcaagcaatcctctcatctcagtcttctgagtagctgtgaccacaggtgcacatcactacatccagctaatttttgttttttttgtagagacggggtttcgccatgttgcccaggctggtctcgaactcccaggctcaagcaatctgtctgcattggcctcccaaataggtgggattacaagcatgagccactactgcacctggatgaactagtgttttttctaaccaaggttctctcagtggcttttaccgggtagtggtcctacatataacatcatgaagacaacactagattttactttttagaaaaccattttttgtggatgaaacccaccaactgtaaaatgatcaaattatcaggtgaaaaaatatgattttagtgaagggactctgctggcaccttgagttgaaatctgagaccccgacagccaagctggctgggctggaaggctctgtgaagcacagcgtgcagccaggagttggcgctggtgaaggacagccacctcctggcagggctggatcagtctactgtgctgggtgagtgggaacagcggggagggaagtcaggcctggctgtgtgcaagagccccattcacagagaggcaagtgggttcgatatgcttgtgttctaggcctcatcccttccatcatgccagtctccatccccaatatcaccacccccacaccctctaaatgttgacaggtcccttcctgagggcaggttcttcaccactcttacagctcagttgactgagaagtccaatcatattttctgagaatttaagcaaacaggatccctttgaagaaaatcaaagttggaatgtaaatcctatctccttatagggaaatctaaaagccttaaaaatatttctctttatcaatcttaatacatataactctccttgtaatcagcagcagcttcctgcaaaattattcaatacaaaaagaataaaataatctctgtcctctctaatgcccaaatagtatgtatttgccctataaaagccatttctctcatgaattgaagagtgaatttagaaaatcaactgcaagataattgaaaaataccctgatttgaaaactaaaaataggcaattcattgtcaagctgagatcctttaaaagatggtcacaaagactgttttagaaatataattattacatatatttacataccacataccattctactaacgattacaaatcatagttgctttgcggaaagtctgtaggaaatggtggcagaagataagctttcagacagtttgattaggatgggcataatgaccaaatctacagagctctttgaaaacattaggataagaggctgaaatagctgcttcatctttttgaacctcatttgctattaagcttgctgctgctgcaggcagataagatccaagaccaaacacaaaaacatacatttgattcagcaggaggcttatctcagcaagtggaccaatcaaaaaattggtccaagaaaagcatttccctttttcgtcccaacaattcagggtctctctacaatgtaacaagtgaaaacatgaaaggttaatttgttttttgtcccactaaaatgagaccaataaaactcggtaaaacaagaaatttatgaaattccttaaaaaacaaatttctttttatgtgtttattatacaatttgacacatctggggtttataatttataggaacagaaggtaaaagaccatgaatttggtctgaaatgggcgaactatgatctaaactctggtgcaacataatttatggaccaaataccaggagaaggcatcacatttcattggtatttaaaatttcatttacacttttcagttaaatgctcgtttgcagaggaagtcaacaaaagtttttatctttcagcctttctctctagcaagctggaaaatgtagcatctcttcggatgttggaaatgtccttttcagtgttcaggaatgctgtcacttctccttttaacacagtacccatatccctgctttcccatccatttgaattggttcctggtgcaacaggaacactatcttgccatgctatgggtcctatcccataatcaatgttagtggtggataaaggagtggagtacagattataggtcaggacaggagaagccagtcatatctctccaacttggctccctctatgccctctgctcatatcgtagttgggttgatgtctgcattacaagagggaaagagccttccatgcctttgcctataaaagactggttctgcccaacttttcctagctggacaaatcagttaagtaggatctgtaatcaacgtatgctaagttttacaggaaaaacaagttgatgcatgacagatgtgattgcttttcctaggaaaaagccattaaaattgtaaaagtgttaaagccttgaacaactccaggagataccattatatgaatggtgtctcctggaattgtgcgatgaagtgctccttcaaacagtagcaataagaaagtttgggtaatgtggccagaagtgtggctcacatctgtaatcgcagcactttgggaggccgaggtgggcagatcacctgaggtcaggagttcgagaccaccctgaccaatatgatgaagccctgtctctactaaaaacacaaaaaattagccaggcatggtggcatgtgcctgtaaccccagctattcgggaggctgagacaggagaatcacttgaaaccgggagacagaggttgcagttagccaagatcacaccattgcattccagcctggacgacaagagtgaaactccatcttaaaaaaaaaaaaaaaaaaaagtctgggtaacatattttaaaaataaactttctctttgggacagttttagatttaaagaaaaattgtgaaactagtacaaaaagttcctatatggacctgcaaatgcattcccctattattgccttcttacgttagtatgatgcatttgttaccatatattggttcacctaatgtccttttcctatattgggatcccatctaggatccaacattgcatttgaatcctcatgcctccctaggcttctcttggctataacaatttttcagacttattttttaagaccttgagagttttcaggagagctgattttattttattttatttttgtagaatgtccctcaagttgcatttccttgattttttaaaaataacaattagtctgggcttatcattttttggagagaatcacaggggtaaagtgccattttcatcacattttatcaaggttgcaaactatcaaccctctggagctgtggtctgagctgcggttcgacctgggctcctctgagctatggctagatggggttcgactgggatgcagggagcagtgtcccgaggctgtgcagggcagcacactccctgggtctgtcccaggaaacctaggagggaagcctcctaggcctcagggcctgtgatgggaggggctgccatgaaggtctctgaaatgcctttgaggacttttccccactgtcttggctaccagcacttgccttatttttagttatgcaaatttctctagcaagtggttgctcagcagccacatggccaggttgcaaattttccaaactcttactctctgcttcccttttaaatataagttccagctttaagtcatttatttgctcctgcatatgagcataggctgttagaagcaaccagggcacatctggagcactttgctgcttagaaatttcttctgccagatagataccctaggtcatcactctaaagttcaaacttccatagatccctagggcacggacacaatgcagccaaggtctttgctaaggtataacaaaagtgacctttactccagttcccaataagctcatttccatctgagaccttggtagcctggacttcactgtgcataccactgtcagcattttggtcacagtcatttaaccagtctctaagaagttccaaactttcccttatcttcctgtcttcttctcagccttccacactcttccaacctctgcctgttacctaattccacattttcaagtgtctttatagcaatgtcccactcctcagtactgattttctgtgttagaccattcccacattgctataaagaaatatctgaaactgggtaatttataaagaaaagaggtttaattggctcagggttctgcaggctgtacagaaagctcagtagcatctgcttctagggaggccttgggaagcttccaatcatggcggaaggtgaagcgggaactggtgcttcacaagagagaaggagcaaaagagagggagggggaggtgctacacatttttaaacaaccatatcttgtgagaactcactcactattgtgaggacagcaccaaggagatggtgctaaaccattcatgggaaaattgaccccatgatccaatcacctcccatcaggccccacctccaacactggggattataattcaacatgagacttgaatggggacacagatccaaaccatatcacaaaagaaataactttatcaatgagaatactgtacattctttttgtgttgtatcttttgtttttaatcttacaaattccactcatttccaaagttactgaggtcagcagctttctcctccacccgcttcagtgaggttgcttcacacattgtaacacagttagattggttttatcacattctactttccattctgggactcccaacctcctgaatgattttttttttaagtttgcatacattgaggtttattctttgtgctgtgaagttaatgggttttgacaaattacatatctgtaattatagtatcatatagaatagttttgctgcccacaaaatcccctgtgctttacctgtttaaccctccttctctctccctgagcccctgatcttttcactattgctaaagttttgtcttttctagatgtcatataattggaatcatacagtatgtagcctttttggattggctgctttcatttagcaatatgcatttaagattcatctgtgtcttttaaagattacttatttcttatgatgaaaaatattcctttatattcatgtaccatagtttgtttatccattcacatatagaaggacatcttggttacttccagtttttggtgattatgaataaagctgctataaacattcacatgcaggtttttgtgtggacatgctttttcaatgcatttgggtaaatacttaggagcatgattgctggattgtatggtaagatcatgtttagctttgaaagaaactaccaaaatggctgttcttactagcaataaaaagagtacctattgttctgtatccttgccaagcgattgatattgtcagttttttaaaattttagccatttgaataggtgggtagtgatatctcattttaatttgcaactccttaacaacaaattatgttaagcatcttttcaaatttttttccatctgcatatcttctttggtgaagagtctgttcaggcctttttcctactttttaattagcctgttttcttattgctgtgttttaagagttcttcgtatattttggatacaactcctctatcagatatgtgttttgcaagtattttctcccatcctgtggcttgtcttttattaatttaacagtttctttcatagagcagaagtttttaattttaataaagtgtagattataaaatttttctgtcataaatcatacttttggtgttgtatataaaaatttattgccaaacccaaggccacctatattttatcctgttttcttcaagaaattttagttttgcattttacgttttggtgtatgatccattttgcattaatacttatgaaaggtataaggtctgtgcctagattcacttttttcttatggacatcctattgttccagcaacaattgttgaaaagatccttttgccactgagtggtgctatggactgaattgagtccccctaaaatgttgatgccctaaccccagtgtggtgatatttagaaatgggatctttgggagataattaaggttagatgaggtaacgagggtggggccctcatgacgagattagtgaagagactccaaacggcttgcttgttctccctgtctatgtgcacaaagcaaggaaaggccatatgagcgcgcagcaagaaggcagctgtctgaaagctaggaagagagaatccaaccatgctgccaccctaatctcaagatgtccagcctccagacctatgagaaaataaaaatttctgttgtttaagccacccaatctatggcattttgttatggcaggctgagcagattaggagaaatggcttttaatccttgtcaaagataaattgcctatacttgtgtgggtctatttctgggctctctattctgtttcattgatctatgtgcctattttatcaccaatatacactgtactgattaccgtgactttataggaaatctggagatcaggtagtgtgagtcttccactcattcttcttcagtattatgttagctattctaggtttctcacctttccatatatgctttagaatcagtttgccattatctacaggaaagcttttgctagaattttaattgggaataaatcaaatctataggtgaagaagagaataattaacatcttaacaatttgagtcttccaattcattaacaaggaactggatttctttcatccaagttttatggttttccacatagatcttgtacttattttgtcagatttatatgtaggcatttttcctccttcccttccttttccccccttgcttcctccctccctcccttcttgcttttttggtgctactgtaaatgtattgtttttaaattttaaattccaattgttcattgctggtatgtaagaaagcaatcaacttttgtatattaacattgtgccctgaaatcttgctatacttccttattagttctagaagttgtgttttcttttttgtcagttctttgggattttcttatggagacaatcatgcaaaaaatagcttaatttctttcttctcagcctgtgctccttttatttacttttcttttcttattacactagctaggactttctgtagttttgaacagcagtggtcagagaggaaatccttgctttgttcccaatattagagggcaagcattgagtttgtcacccttaagtatgtgttgcgatttttatcatgaacgggtgttagattctgtcaaatgtttttttctctacacattaatatcatcacatatcttttcttctttagcctgttgatgtggtggattacactggttttcaaatgccgaatcagccttgcatacctggcataaatgtcacttgttcattgtgtataatttttttatatattattagattcaatttcctaatatttcattgaagattttgtatctatgtccatgagaactattggcctataggcctttcttgtaatatctttatctggctttggtgttaagataatactggccacacagaatgagttaggaagtgctctctctgcttctgttttctggaagagattaaggagaattggtgttatttcttaagtctttggtataatttagcaataaggtaaacttgagcctggtattcttctctttttaagttattaattgcactgagatcaaggcagtatagggaatgtgagactaacatacagaatgaattatgcaacctgattatcttcaaatacctatatttttcagcacaaatatgaactaaggtgatatctgtccacacactatataagtaaagaaaagaagatctttgtagatacagagatagtctggtgagcatgctttttaaaaaactatttttcccccttaactagtatctccattttctcaaatgtaaaaatagataccattatctccttcctttttagttcacagggctatataattagaaaaacaccagtcaattttcctgagttccctaaggatttatcataggcatatataccaccttaatgaaatttctaagtgctgtgttattaaatttaattttttttaattttccaaattctctccaatgagtatatatttattagttctataatcataaaaaagttatacaataaagagaaaatgacctttggctttcctttctaatgtatcagtgtaaaaaaaggaagcaaatataaacacataggaagagataagaattagttatataaacaataatgagaatgatcacagtcatccagtctattgtcgttggctgtctgtagaaaagagtatcccttttttttattgaaacatttacttatgctctgttaagaagccttcaatgtttcaattattgagatcatacagtatcttttaaaattaagcatttatttgcagttcattttcatgtgagctgtcatgtcacattaactaccagatgaagttaggcattacatttcacactgcagttctttcatgttgaaaccaaaatctcacttcaggactgtagttttagacttgcacttttcaaagacaatccatcacttctttttttatttttctttctagattttcacttgttcatctctgcaagctagtaattttactcagttttcttcaaatatttttttttattgatccgaatttgtattcctttccccacaactcccactccctgcttctagagctagccatgccatctctcagacatttatatttcttcgatggataaatcagagctagactttcctcatctataaggaatacttttgccaatacaaacataaaatatcaaacacacttagagaatgcattcttaagcagaaacaccagaatacttaacaactgttttccaagtctgatcaccatcaatacgtaacgattatatctccagtctgaagttttacatcaagtaaatgtttctttgcaagaacttaaatccgaggataagagaagttattacgtttttccaaggtagtttaaaatttccctccaaaacacacatatttagttttggctggtaggttattttgtttcatttttaaaacaaggatagcttgtggtcttaaaagaatgcttgaataagctgtctgagttcaaatcttgtacccaccttgtattagctgagtgactttggttaaggacagttacttaattatcctgggcctcagtttctctctttgaaaaacagattcattcactaaaataatatttatgaagtattcattttgtgataagcactagtctagctaccggggatatacatttacaaaacagattttaaaatatcctgtcctggtggacctcacattacgttcattactaacagggataatttcagtgcctctctcataggattgttgcaagaattaaattgatgaatacatacgtaacacttataacagtgtcacaaaatgagagctcagtaaaagccatcatcaccataatcaaatatttaattttcataaaaagttttcctttatgttttcccattccttgtttccttggaacttagaaataatagatttaagttataaaataatagtgttaatgtagtatcactaggcctcaatttccttacctataaaatggtgatatccccctctacagtgttggtataaaaataaaatgaaacaatttaaatgaaagtgctttgtaaactatcaagagctccacagactaaatatgtcattatgtagcaagtgccttggcttaagtccttgcactcagaagtccttcaatacacgttaattgaattaatttatggcctaagcaattgcatagctactatttgagcagttctgaaatacttgagacccaagacactaacctattataagtaggtaacaagctactcaaaacaacttctgctaatttaatattgcctatcaataaattacctgacatctcaaaggagttgaaaaacaagcccagtgtggaggctcatgcctgtaatcccaacagtttgggaggtcgaggtgggaggatggcttgagtccaacagttcgagaccagcctgggcaacatagtgagacccccatctctacagaaagttttaaaaaacttagctaggcatggtggtgtgcacctgtagtcctagctacttgggaggctgaggcaggagcattgcttaaccccaggagtttgaggctgcagtgagccataatgtgccactgcattccagcctgggcaacagagtgagactctgattcttaaaaaaaacaaaaaaaaaaaaaaaaaaggaaaaagaaaaataaattacattttccttgactacccacttgggctaaaacttctaaacctcattatcttaaggatgatgttagttcaatttccttattttatacgaaggcaaataagtctcagaaaagttaagtgacttccacaggatcatagttagtgccaatttccatttcacctttaaaccaagacaagcacacatcaggtgccttcacatataaaagagaatacaggtctctgattctcatttaaacgctactaagttccacaatgtgttaagaactcatcatgcttgtggctctgtttttgtttttgtttttttccaagtgagctaaaaaaaaaaaaaaaaaaagtgggagacaatggaaaacaaactggagaagagggcattctgtactacagcatgtctgaaaatctgttcattttctgaaattttttaatgcaaaacatcagatctctaactgtcaaaaagcctgctcagaaggaagcagctagttaaggaactttgtttaggatttttattccaactggttcatatggtaacttggattcaagcaagacttttacagcagtgagatctttatctagaaatagcaagtacaaaacgcttgtgtcttgccagtctatgcagagccagctcaaagggacagactgaaatagtcatcatcttcttacatgatcattaaactgggtatgtttacatgactgtctgttgtcaattgctctgggaaaacaaacaaacacagtgtaaatattttgtttctctctaaggatgtaacaaagaaagagagaaagaaagagggatagaaaaacttgcattaggagcccctgatatttgagcatacatttttttttctttttgtacccctcccacctcataaacatgttatgtgtttcctaatgaactagctccgcaaatatcacaggtgagggaggggataggaaaggctccagtctgtcaggtgtcaaatgtctcctctaatagtgtggctgaacacaggtgagagaagtataatccaagatagggagacccaacccttacattcatggcacccacatcccagtcttattggttatagaagggaagaggaagctgtggtgttaaccagctgagtcacagctaactgccatgaagtggtctacctaagtaagaacccaagtagtttgtgtgacccaagatccttccagttatccatctgccttttcagacttctcagaaccaagactcagaagaaggatattattgtatgtgtagaggtttgattggagacggcattagtcttctctcacgctgctaataaagacatacttgagactgggtaatttacaaaggaaagaggtttaatggactcacagttccacatggctggggaggcctcacaatcatggcagaaggcaaagaaaaggcaaagtcatgtcttacatggtggcaggcaagagtgtgtgtgtaggggaactgccttttataaaaccatcagaactcataagacttattcattatcatgagaacagcatgggaaagattcgcccccatgattcaattacctcccacctggtccctcccatggcacgtgggaattatgggagctacaaattcaagatgagatttgggtggggacacagccaaaccatatcagagacaaacactacttaacaagggtaaggttgttgccaaggtcagagaactgatatctgagaaggcagtggaaatggtcttgttcctcatcaacttcctgcagcaaagactcaagagaagtaactccagacaacataaatagccagcagcatgcctgtttactcctgcttgcttggaagacaaagaatgctgtgctttattcaggaagatcaagcattttagctagaggataagaacgctgctggattaaaattttctggtgcagccttcttctattgaatatgtatgataaaagataagaatctgtggccatatggccagaggaagcaacatgaggaagtgaaacaagccaaggtggcaattgttggaagtctagagctatagactggaaggctaggaaactggggatggctgtggggataggaggctttttatttattttttatttttttattatatactttaagttctgggatacatgtatagtatgtgcaggtttgttacataggtatacacatgccatggtggtttgctgcacccaacaacccgtcatctacattaggtatttctcctaatgctatccctcccctagcctcccaccccccagcaggcccctgtgtgtgatgttcccctccctgtgtccatgtgttctcattgttcaactcccacttatgtatgagaacatgcagtgtatggttttctgttcctgtgttagtttgctgagaatgagggtttccagcttcatccatgtccctgcaaaggacatgaattcattctttcttatggttgcatagtattccatggtgtatatgtgccacattttctttatccagtctatcattcatgggcatttggcttggttccaagtctttgctattgtgaatagcgctgcaataaacatatgtgtgcatgtgtctttatagtagaatgatttataatcctttgggtatatacccagtaatgggattgctgggtcaaatggtatttctggttctagatccttgaggaattgccacactgacttccacaatggttgaactagtttacagtcacaccaacagtgtaaaagtgttcctgtttctccacatcctctccagcactgttgtttcttgactttttagtgattgccattctaactggtgtgagatggtatctcactgtggttttgatttgcatttctctaatgaccagtgatgaatttttcatatgtgtgttggtcacataaatgtcttattttgagaactgtctgttcatatcttttacccactttttgatgggtttgtttttttcctgtaaatctgtttaagttccttgtagattctggatattagccctttgtcagatggatagactgcaaaaattttctcccatcctgtaggttgcctgttcactttgatggtagtttcttttgctgtgcagagctctttagttaaatatatctcatttgtcaattttggcaaatttgtcacatttaagtctttaatctatcttaatttttgtataaggtgtaaggaagggacccagtttcagttttctgcatatggctagccagttttcccaacgccatttattaaatagggaatcctttcctcattgcttgtttttgtcaggtttgtcaaagatcagatggttgtagatgtgtggtgttatttctgagggctctgttctgttccattggtctatatctctgttttggtactagtaccatgctgttttggttactgtagccttgtggtatagtttgaagtcaggtagtgtgatgcctccagctttgttctttttgcttagaattgtcttggctatatgggctctgttttggttccatatgaaattttaagtagttttttctaattctgtgaagaaagtcagtggtagctagatgtggatagcattgaatctataaattactttgggcagtatggccattttgacgatatcgattcttcctattcatgatcatggaatgtttttccatttgtttgtgtcctctcttatttccttgagcagtggtttgtagttctccttgaagaggttcgtcacatcccttgtaagttggattcctaagtattttattctctttgtagcaattgtgaatgggaattcactcatgatttggctctctattattggtgtataggagtgcttgtgatttttgcatgttgattttgtatcctgagactttgctgaggttgcttatcagcttagggagatattgggctgagatgatggggttttctaaatatacaatcatgtcatctgcaaacagagacaatttgacttcctctcttcctatttgaataccctttatttctttctcttgcctgatttccctggccagaactaccaatactatgttgaataggagtggtgacagagggcatccttgtcctctgccgattttcaaagggaatgcttccagcttttacccgttcagtgtgatattggctgtgggtctgtcataaatagctcttattattttgaggtatgttccatcaatacctagtttatcgagagtttttagcatgaaggggtgttgaattttatccaaggccctttctgcatgtattgagataatcatgtggtttttgtcattggttctgtttatgtgatggattatgtttactgatttgtgtatgttgaaccagccttgcatcccagggatgaagccgacttgattgtggtggataagctttttgatgtactgctggattcggtttgccagtattttattgaggattttcgcattgatgttcatcaggggtattggcctgaaattgataggaggcattttagtcctgctaaggatagctaggacagttgtgcagggcacctgacaaacacttcaccttctttgtctgacagtgagaaaacaaaagtttcagggactgaaggggactaggctgttccttaagctagaatcctcctcctttgtctaataaccagaaaacctatggtccctctctccttctttccttcttccctccttcctcacctctaccccctcctctctccctccctccttccctcccttctttccttcctctcagaaagctctacgatagtgttagaaacacttccacatgccttcccttgtgcagtaatgcatctgaccctattaggaggctcttgatctgttactcagtaatcagcacctccatcctgacaatgctaatgcttggagatataagcaatattccttacatatatttatttacagcttcataaaatagacagaagggtcaagctaggtgaggtgaatgatcttaaagtgtcccgccatttctcacacatgaagttgctttgaaattaatacaagaggcaggatctcagagcatgataatttcccacaacctcaggcacctgatctatgctaacataccaaatgagtacaatctaatgttaacacaaacatgatgagctttacagttaaatattttgttaactcctaaatacaataaaagggatttctaaaagaacctcaggaaacacgtggtaactttgcagagttagaaagttgtgaaagggctatgtagaatgtactccctctttaggcccatgtccttctgtgcctctccctagactgtgacctcctgtttggcagtcctagagcatgaagaaatgaataaaggctcaagatagcaagattgaacatcaccacaccggaactccttcaaagtgtggcctcttcatctcccatttttctttttccacaggctaacaggtacatggttaagcaggccctcagctagctagtgataaatcaatgacacaacttccacccatccctcccaaagctatgattctgagatgtctaagcaacactagaacagagataatgcaacttctgtcattatgcatgcttctaaatatcatcaaatctattttattttcgtgtgtattgtttctgaccaatttccagtagattccacctttcctggaatggtcagcttttttcagtagattccatcgtgcctggaatgatgaaagaacaccacatcccttaatggcacaattgaattgtactcaggaaatgcagttattttaatattattgcaaaccaaagataattaagaatatgaattttcccaggaaaatatcacatgacttactgcagaacgaaacagaaatgaatctcagtttacttgatgatttggtttatctacttcaccttccattagttaatttaaatgtttaatatttaaggcatctaaaaatcaacaggaactttctacttttaattctggtatttcagcatcttgaaggcatagcatggtgaaagcaaattaggggcatgaactgatcaagacctggactaactcccacaaaacaaaataaacaaaacaataccctagaccttataattctccattttagttttggcttaaatatattagttcagagaagataactacagatgggggaatctactctatgaccatgatatttacactgtgtgataccaatccatgtaacaaaactggtttttggccagactatacatatatatgcatacgtacatgcatacatatacatacatacatacatatataatttaatctttttttgttgtttttgtttttaaggtcctctatgtgccactagtgatttttcatggaaagaaaggctgaggtgccaagcagagttgtaattaggaggtaaaacacccaggacctggcaagggactcaggctggcagacctaggaagagggcagcagaggagcagcaggggtttgagcttggcaggggcgaggagacagggctttcttctccaccttcgcacatgaaatctacctctcttcagtgatttctggaaaatgcatcaagtatgtggttgccatctgtagagattcctgtccttaatgcaaaacaacgacaactgcaataacgtacaagcggcacacagtctggaaacatcctcaggattttctgaggaaggctaattaatacactaaattgtaaggaattttacaggtattatcgtcaatccaacaactaggcaaacaacatgcataaaacttgtactaaattcttaagctggaaaaaaattgagcaactttttaaaaatctcaagcttgtgtatttttctattccttcataaggacatcattaaaatagtcatgttctttcataaaaacaataatgtcaacaacaagctaacagccatgcaacataatctagttatgttatttgtagcctaagctatgttaactatgaagagtaatactaaggaaactttaaacttaagatacaaataaaatattgtattatttctgatttagctcattcaaaatctacatatgttaaatgttcttgatatttgattttgtagaaaagaaacacatttaaatcttcaggtaattatttatgttacttagatcaaatgtaggattcaaaaaaataatttaacattttttgtacagtatttattaattaaaaattaaaatacatttaagataccatatcaggatgtaaaatgtaatcaaagtgattgatttttcctattgtgatttccttgttccacttacactgtttccctcaccccctatcctaacagcacatcttaaaatcacctgtttctcattgttttattattactttatagttattatattttagttattacatttaacattttgatccatcttgaattttgatgtgtcacatgatgccccaatttttaaaaatgattaatcagttgcctagccccattgacttgtgatgcctccttaccagatttttatgtacacttgagtctgttccatgactatgacatttctttaatttttatgtctattcttacactagtaccactttaattattaaagtatcatattgtatgtgtgttttgttttttttttgagacagggtgtctctctctgtcacccaggctggagtgcagtggcatgatcttggctcactgcaacctctgcctcccaggtccagggtagctgggactacaggcatgtgccaccatgcccagctaagttttatatttttagtagagtcagggttttgctatgctgcccaggctggtcttgaactcctgacctcaagtaatcctcctgcctcagcctcccaaagtggtgggattacaggaattagccaccatgcctggcctaatattctgttttaatgttacaataagtgacattctctgaccaaacactatcccttctttttcaaagtgttcttggctattttcatctacatattcttgaatctaggcaaactttaacttacttcccaagcaaaaaatccttttagaatttgattggaacaatattaaatacaggatattgaaattaataattagtatataatatgaaagagtattaaatatataaatttagaaaaaatagaaatcttgacagtatataataagtaatgattacccagattacatacccttttatcttgttttatgtctctaagttttactattttccttgtgttgttcctataactgttttaataaaaatttttccaaggcattttatatttgcataagatttaaaaaatatatttgctaacagattattgatgctatataaaataaaaatggatttttccacttaatttgcccattagttattgtattattaaagactagtcaagtgcaatagtgagaaggcaggggaagggtagaacaaagagttcgacctgtaactgactgtaatcaactgagaaaactcagtacctttggactagcctgcccattagtttcaatattattctatttgattgccttgagatttctaattaaatgatttaataaggcaaataacatgattttgttctcttcttttccaacagttattctttcattcactaaatattcattgagcatctactatatgttgggcatactactaaataatgaaaataaatgggtgagcaatacatacaaaatccccatcctagtggagcttacatgctagtgggggataaaaaataaataagtacaacaagtaaatgtagtatgtgagaaggtagtaagtcctacggaaaagtagtgaagagtaaggggaacagaaatgcaggaggtggagagttgtgaaattttaaataataaagtggtctgtataggcctccctaagcaaaggcttgaaggaagtgagagagccaagtggctaaatgggagttagcctagaacagaagagtaagtgaaataaaagggacatatgattgtgctggaccacttatatcttttttatttttatttttttgagacagtctctctttctctctctctgttgcccaggttggaatacagtggcacaatctcatctcactgcaacctctgcctcctgggttcaagcaattctcgtgcctcagcctcccgagtagctgggactactggcgtgtgccacaatgcccggctaattttgtgtgtgtgtgtgtgtgtgtgtagagatggagtttcactatgttgtccagactggtctcgaactcctgacctcaagtgatctgcccacatcggcctcccaaagtgcaggaattgcaggctcgagccaccgcgcccagccacttatatctgttttatattttattgcattggccataaattcaagaacaatactaaaaataaaggtgaaaaaaggtctccttaacagaatattaggccaggcatggtggctaatattcttgtgataatttaaaaaatttttttttccctttattttaactttatttttaacctctggaagaaacttgtgatgatttttaatagaaatactttcatgcttttgtattgatcattgattaatatttatcatattttaaagctacatgtgaattcacattaacaagacaaagagaacatgggcataaaatatactaaaatggacaatatagcttttggccaaaaccccagggaaagctgttgcatatcattaatacgaatgtgttagaagagatgagaaagcatgtactgctgatgtgaaaacatatatgctatagcaatctgggacactatgaacctcagtcagagctggctcaggcacaaagtgttgctgatgctgcagaagctctgctggctatgctggtaatggtgctcagcttatctctgggcttcagtatcctgggctaactaatcaatcagatgagtattatggtgggggtgagaagaggtgtgaagtgggagaagagagcagctctatggccacacaggccattactggtgggaagggaggccctgaagggaggtgagggtcacagttgtgaagcggtagacatttttgacaactctcagttcttgcacatttctgtccagggccaaccctatcactttaagttgaaacaggtgtcatgggagacactactcaagcaaggttcacaggtgcctccatggttttaaaacaagttcacaaattcttaagacattcttcccaggaatgggaagactaatttcctttcccttgaatatgggccagttttagtggctcacttctaaccaaaaaaaaacctgtgatggaagtgatgctgagtgacttcgaggctagcttgaaaaagacaatgcagcttccacctggttctccctctctcgctgcctgccaccagcccctccacacacactgggcaacctgagccaacatgaacatggaggaagcctggcaactctgattctgccatactggagagaccacatggcatgtccacacagtgatgaagagagaggcctgtggagcctcactgtgccagcctctagttagttatccgagtcttcccagtatcaactgccggatatttaaataattatagttgacccttgaacaacatgggtttgaactgaggggggtccatttatatgcagatcttcttctgcttctgccacccctgagacagcaagatcgacccctcctcttccttctcctcctcagcctacccaatctgaagacatggataagatctttatgataatccacttccacttaatgaacagtaaatatattttccttatgatttgcttaataacattttctttctctaacttactttattataagattaaaatagataagacatacaatacaaaatatgtgttaatgcactttatgttattggtaaggcttccaggcaacagtaggctatttgtagttaagttttgggggagtcaaaagttatatgcagtttttttgtgccaatgtatttaatctcttaaatgttcaatgtaaagttataaaattttaataaacacataagcatagtttaccactaaatacagattaaccattaatgttaggacttctatttgtttcatgtaatttgttctcattaactccttatttctcacaacaaatctaacagacggcaatttggaacttctcacaatagcaaagacacggaatcaacccaaatgcccatcaatggtgaactggataaagaaaatgtggtacatatacactatgtactactatgcagccataaaaaagaatgaaatcatgtccttcgccgcaacatggatgcagctggaggccattatcctaagtgaattaatgcagaaacagaaaaccaaataccagcatcttctcacttatatgtgggagctaaacattgtgtgcacagggatgcaaaaagggcaacaacagacactggggcttactagagggtggagggttggtggaggaggatgaggatcaaacaactaactttatgctcagtacctgggtgatgaactcatttgtacaccaaactacagcaacatgcaatttaccctgtaaccaacctgaacatggaccccctgaacctaaaacaaaaactagaagaaaaaaattttagggctccttaaaatggctctttatgagattaaaataattggctgaatttctatttaagggtgaaatttgctcaagaatgtagaggtttaaaatctatttgccatctgagaacattctgtagttcttccactttttggaagatgagcctaatgacaggaaatgactgcagacttctgactgtgtgaaagttgatgcactgacccctgtgctgttcaagggtcaactgtattctagtcctctttgagcaaccccagctgacaccaagcaaagcagagacatgttataccaccaagtcctgcttaaactgcaaattcacgagcaaattaaatgctgccattgctttaacccactacgttttggaataatttgttgtgcagcattaaataaccagaacagggatcaagatgatcctggaggaagatctatttttaaagggctcttagatttttaggtatgatatactgatacctagatacttttgttgagcagactagggtaagccaaaatataacttcttatgagaaattagtagtgaaggtgaataaaaagctttataacaggatggtaattaaaaggatgggtattgaactcaaaacagaccaaatctgatttgaaataactcgtcttcactaagtctgtgatcttagtcacggtatttaacttctttgaactccaactagctcatttgaaaactgtgataatatcaaattcatagagttgtaaaaattaagtgagctgataaaaatgcttaattaatggtgactattataatcagtcattgttatttctgcagttttactatctttgcattctgccattaattagcaggggtggaatatgaatgttccagcttaggctgattaccaagcatccttctgtaaagacaattcgccaactaatcaggaatttcccactgtaccctttaccttttctgcattctgctagaactgtggaagctaaagaaaaacatcaaatatcaccctgggaagccaacaacttaaacatcctaaactgagtaacatgcgagtaaatgtcataggactgcagcttcccaagtgtctgacacagttctgatctctcagctctctgccagggggctacaaagctgtgaaaaaggcttccattacatccctggctgctacagagattcctgcacattatacgtatcatcagtatttagtagtcaatacactatacatgacactcttctcttgtttcttatatctgttttcttaaactatctgctcttcaagacaaattttaatcatctagttactacacattgaaaagtgctttcgatgtaaaatttagaaagaattcaacatacagttcagctaacacttattgtgtgtctattaggacccaggcacaatcagctggaaactgtcaaagtgaaatttaactcagggagagtgacctagcatcttgtaagaataacaagacaatttttccgtaatgaatggagtttttactaattttcctactttaagatatttaaaatttttcagactgatagaaaagcaaagaattaattcataatgctaataagactacagcattttaaatacatgtgttctaaaacagttcagatagtagcctttgatatgatgtgtcatagttctacataaagaagttcatacttttctgaaaggaactcagaattctacttggaaacctggatgatgatccaggtcaaaacaaaacaaaagctgacatgggctttaaaagcctttagttttacataaattttgcctagcttattaagatttttttctattattttccacaataatgaatattgaggatgtatctgatatttatgagcattaaacagcataaaaagaaaaacaaaatatcattgcataattaaggtacttttaatttttgttatactttttccaaatcaacaacatgctttttcccttaaggaaaagtctgatttttttagcggggtgagccctgagtcagatcttcaatcttctttggaattccaaacacctccatgctcttttgctattagcctctctcctctacaactttccaaaatccctctgaaactgatgtgcaagacccactcacattgtgagctcacaggggtctaatcagaggtgagtagccgggaaagactgttatatgggtctatgaattatcttctgagacttggaagtttatttttcatccctgaccctatacaggactactctcaataattccagtctttgaaggggctggagaatgttatgtaaaattactcaagctttaacttttcatgggtcagaaatacccaggggctttggtttttaatgtaacttccttagataaaagtcagtttcctttttccaatccgggaagtggacgtctgtaatacaacataaattacaaagtttctgattttactgtctagacaccatcaacccccttaacactaccttctctgtcaaaagtctgggcagggcccaaaaaaaactgatgtccaactaagctcggaaatgtatttcttccaactaaagctggcaggattctggtgagcacatttgaagccaacaaaaagcaggattggaaaattaagaatggttaagagagaaagagggcaagtacaaaactcacaaattcacaaggctcaatggcatcaaccacttggaaagtttccatctccaccccaacttctaaataaagtggcatgtcagccctgcagataaatgctgaaatttttagagcctcactatcctcggtgaaggctccatgtctgacagatgcagataataacagaattaaagcacacgctcaataggatagcaatactcacctggatttttacagcacttctctgagctcaaagtcatcctcacagcacacaaggaaggaaagattacatacagtattgagaaaggaggtaagaaatcagttgctggctgggtgtggtggctcacgcctgtaatcccagcacttcgggaggacaaggcaggcaggtcacgaggtcaggaggtcgagaccatcctggctaacatggtgaaaccccgtctctaccaaaatacaaaaacttagctgggcgtggtggcatgcgcctgtagtctcagctactcgggaggctgaggtaggaaaatcaccagaacccaggaggtagaggttgcagtgagccgagatcatgccactgcactccagcctggcgacagagtaagaccccatctcaaaaaagaaatcagttgcttgttcagggatagaaagtggcagactacacaaggattgaaaatttgttacccctctcagatcactcaattgctttactccaagccagctgaataaacactactttatcctaataatagcagtagtaataatagtaatgacagctatcagcaagtgactactatgtgctaggcactacaccaatgtttcatatttattattctcacaacagtatacctttcaactttatgtttgccatacagcaggattcagcagaagaaagatctgtcttatatcacatctaaagaagattagtttcagaaattccgaaagaatagttttgatgatatcttccttataaactgcactttataaagacttttcatatatattttttcatttcatcgccgtgaaagtcttgagtggtaggaatcattacccatatttcatctatgagaaaactaggcccagaaagatggtgaccaaagccacaaactttttttttttaatgctttaagttctagggtacatgtgcacaacatgcaggtttgttacatatgtatacatgtgccatgttggtgtgctgcacccattcactcatcatttacattaggtatatctcctaatgctaaccctccctcctcccgccaccccacgacaggccccagtgtgtgatgttctccatcctatgtccaagtgttctcactgttcaattcccacctatgagtgagaacatgcagtgtttggttttctgtccttgtgatagtttgctgagaatgatggtttccagcttcatccatgtccctacaaaggacatgaactcatccttttttatggctgcatagtattccatggtgtatatgtgccacattttcttaatccagtctatcgttgatggacatctgggttggttccaagtttttgctattgtgaatagtgctgcaataaacataagtgtgcaaatgtctttatagcagcatgatttataatcctttgggtatatacccagtaaagggacggctgggtcaaatggtatttctagttctagatccttgaggaatcaccacactatcttccacaatgattgaactagtttatagtcccaccaacagtgtaaaagtgttcctatttctccacatcctctccagcacctgttgtttcctgactttttaatgattgccattctaactggtgtgagatggtatctcattgtggttttgatttgcatttctctgatggccagtgatgatgagcattttttcatatgtctgttggctgcataaatgtcttcttttgagaagaatctgctcatatcctttgcccactttttgatggggttgatttttttcttgtaaatttgtttaagttctttgtagattctggatattagccctttgtcagatgggtagattgcaaaaattttctcccattctgtaggctgcctgttcactgtgatggtagtttcttttgtcatgcagaagctctttagtttaattagatcccatttgtcaattttggcttttgttgccattgcttttggtgttttagacatgaagtccttgcctatgcctatgtcctgaatggtattgtctgggtttttctctaggatttttatggttttaggtctaacatttaagtctttaatccatcttgaattaatttttgtatgaggtgtaaggaagggatccagtttcagctttctacatatggctagtcagttttcccagcaccatttattaaataggtaaccctttccccatttcttatgtttgttaggtttgtcaaagatcagatggttgtagatgtgtggtattatttctgagggctctgttctgttccattggtctatatctctgttttggtaccagtaccatgctgttttggttactgtagccttgtagtatagtttgaagtcaggtagcatgatgcctccagctttgttcttttggcttaggattgtcttggcaatgggggctctttgttggttccatatgaactttaaagtagttttttccaattctctgaagaaagtcattggtagcttgatggggatggcattgaatctataaattaccttgggcagtatagtcattttcacaatattgattcttcctatccatgagcatggaatgttcttccatttgtttattcgttgagcagtggtttgtagttctccttgaagaggtccttcacatcccttgtaagttggattcctaggtattttactctctttgaagcaattgtgaaggggagttcactcattatttggttctctgtttgtctgttattggtgtataagaatgcttgtgatttttgcacattgattttgtatcctgagactttgctgaagttgcctatcagcttaaggagattttgggctgagacgacggggttttctaaatatagaatcatgtcatctgcaaacagggacaatttgacttccttttttcctaattgaataccctttatttctttctcctgcctgattgtcctggccagaacttccaacactatgttgaacaggagtagtgagagagagcatccctgccttgtgccagttttcaaaggaaatgcttccagtttttgcccattcagtatgatattggctgtggttttgtcataaatacctcttattattttgaaatatatcccatcaatacctaatttattgagagtttttagcatgaagggctgttgaattttgtcgaaggtcttttctgcatctattgagataatcatgtggcttttgtctttggttctgtttacaggatggattacgtttattgatttgcatttgtagaaccagccttacatcccagtgatgaagcccacttgatcatggtggataagcttttttgatgtgctgctggatttggtttgccagtattttattgaggacttttgcattgatgttcatccaggatattggtctaaaattctctttttttgttgtgtctctcccaggcaaagccacatactcttaagaacaaggctaggcttaaccacaggcatcctgacctcaagtcctgtgtcaaagttccacctacaatgtggccccacagggtaggtcctgagaatgttgtgagtgctaaactgtactgaatatagtctactcaattcaagacattcactgagcgcctactgtgtgctcctcactgtgctctgtgctggaggctcagaagtgaaaaggtcacaggtgctgtgggaaaggagttcatagatgtgtgagtaaccatgcaaataagtaaggacaatatggagcgctatgtgctgaccaaagtagggggattagtcagggttctctagaggaacagaactaatggaatagatatataaataaaaaggagtttattaagtattaactcacacaatcacaaggtcccacaataggccattggtaggctgaggagcaaggagatcctgtccaagttccaaaactgaagaacttggagtccaatgttctagggcaggaagcatcgcgcacaggagaaagatgtaggctgggagcctaggccagtctctcttttcacatttttcagcctgtttatattctagccgtgctggcagctgattagactgtgcccacccagattaagggtgaatctgtcttccccagcccactgacttaaatgttaatctcctttgacaacaccctcatagaaacacccaggatcaatactttgtatccttcaatccaagcaagttgacactcagtattaagcatcacagggggacatgatagctctaggagtgtggggtgcttcaaggaggaggggcatctgaactaggttacgaggatgaattcaggagttttaagcatactcttttttaattatcaagaaaaaagcataaaagattagtgatttgtgcaatactagacagtgccttaagatcaaatatttagaaatcttgacaaatgtgaatctgcacgccagactatatggcatcaatttaggacagacggttaacgtaaaaagcaagtgaagatatgtgaaagaataatgaggtccttctgtccttcctaaagggtatatgctcaatgaaaatatcatgttacattggattaatttacttacctacttatttatttttgagacagggtcttgctctgttgcccaggctgcagtgcagtggtgcaaacatggctcattgaagccttgatctcctaagcccaatcatcctgcctcagcctcctgaatagctgggaccataagtgtgtaccacaattcccagataatttttttttaagagacagggtctcttcatgttgcctaggctggtctcaatcacctggcctcaagctattctccctccttggcctcccaaaatactgggattatagacataagccatcacacttgacttcatgttacattttaaagccaaatgaagcaatcccaatagttaaatgccatctgcaattctgaccacttgttagaatggcaaattcaaaatattacagtccagtaaggacatcaggaacagccagacacttattttctggtgcatgtctgactgtggcatgtcagaagttgagacattcatgctgtgagctgtaccgccccagcaattgctcatggacttgttgtattagtctgctttcatactgctatgaattgcctgagattgggtaatttataaaagtaagaggtttaattgactcactgttcaacatggctagggaggcctcaggaaacttacgatcatggcagaagctgaaagggaagccaggcaacttcttcacaagaaggcaggaaaagtgccgagtaaagggggaagagccccttataaaccatcagatctcatgagaactcactgactatcatgagaacagcatggggaaaaccacccccgtgattcaattacctctacctggtctctcccttgccatgtggggattatgaggattacaatttaagatgagattttggtagggacataaggcctaaccatatcaattgtctactggtgggctttcaggaaaaaggaaaatggaaaacccacctggcccacttgatcatgtccattccaagtcctatcctttggcaacatcacgccaaagacatcaaggtggaatttctaccttttgaggcctaatatccaaaatcctttccttcctgttatttgcccccttgtttcaatcccacctcccttcctctccctctccctcaattctcctgccacccctcccccaatcctctagcatatggcttagtgtcatggagatgtatcaagtttctgggtagaaactgaggatttcatttccagttagttcctcctcctttcttcttctccttctctcttcctatttgccccttttcttcctgatgtacactattcctgcagcaacagcattttacattatacttaaatttcacctaggataggagagacgtgtgtctcactgaaaggatataggacaggccacctttcaacaggaagaaagaaaggtggtcatcattgaattttaaaactcaatggaataaaagatcagaatgtggcttccccacacaaggcactctttctttcatgacaggtcagtgtttggattcatttattagcatgaggaggtcagctacacaggagacaccaatcactgcctgcctatttatatgcaaaaatatgcctgctgctctaagcaaacccactctgatcttggcctctgaagctacatctggttgaaccagagctgggcacctgaactgaattcagtctatttataggctggccagctatatatcacttggttgcctgcatcaaaaaattagcatgggcccatgaggctctccatttaaacattttaagttgagaaactggaaatctgagtcagaaagccacagcagctaagttacaggaatatgaagtaaactcgagtgggccacaaggaagcttaagataaaccagagaattgaatgaagcaagtggacagtgagaagagatggcatgagtagaaagagagacttcatgtccctaatgattctgtggtttctatttgagtctatccttacaatcttcctcctccttcttgcaggaatatgtttcagttatttgcaacctaaaggaatctgactagaatgtaaaatcattgacctagtaatatgattgctagtctgagcctggaggtagctcccgtttacttccaaggcttgccaaagattcaaatggagttaccaggaattgtaagtttagtcagtctgaattatgcaaaatgttaaccaaaagctacactgacctttgatgtctgaatttcctcatcaacaggctaatccttgacagaaacactggaaggatttcttctctgcaaaactaccctcttccttcacgctgaatcatcagaaagaggagccggctgcatccctaaattcatcccttattttaattaacccaaggatgacatggaggccttggagaccctatacagtgctgtgtgttcagcagtaaatatccacccattgtagtcaggagccagcatcttcatcatcctttcttgttagaacaaacttgtccaacccatggcccatgggccacatgtggcctaggacggctttgaatgcggcccaacacaaatttgtaaagtttcttaaaacattaggagatttttttgtgatttttttaagctcatcagctattgtgttagagtattttatgtgtggcccaagacaattcttcttcttccaatgtggcccagggaagccgaaagatcggacacccctatgttagaacaccaaggtctattactttgaagttgttatcctggattaccaatcagaatttgtgttttcaccattactaagcctactctttaattctctcaatcatctctgctctaagagataaggaatggcaggaattattaagagtgagaggttctgaaaatctggttggtttattttagagttctatgaagtattcatttcctccttgtaccacccccctttgtttacaagtgagtatccctctgttgctctcctttggcacaaatattcagatgaaaaacatccacataaatgagcggtgtcttaatctgaagaaatgtgctctgcatcccatcaataggagctctaattcccctatggttcaggacactccagtgactcaaatgacctttctgccaaaggatctgcatcacttcctttgttcctgttctacataatatggaattacaataatgtgaataatttttcttttataaaaaaaccccacgaaacacaggaaatctatcaaaaacagttttgacaattgagaaaatcacattttaatctgtttaattaaacacagtgaaatttcttttctgccagcaaagaattttacaaattttacaaaattggactagattcagtttagtgagcattccaagaacaagtttgttaaactgagacagaaaagtagcatttaattgataagctatatagctagttactacaggagaaggggaaagagacaaagttaagggtgtgcctcagtcaagttatcgtacctcaaacttcctaagaggctaaatctagtaaatactttaaaatataaaagcacacattggttctgagtcccgtcagtaaaatggcccaatagcacaaggccagtgaccagggatggttccgactctgggcaaaacaaagaagactcagaatggcagctggcatcaggggcccccacagaaggggctaggctgagggcacaggccagcataaggcaggttggtgtctggcccaatgcagacatatgagaaggttggcagaacatggcaccaagaggacatagcagtatgtttgagagattctctcatatgaggactagaggtcagccttggggtcttttgcagggaatctaggtaggaaaccaacaaaaggggtcaagatgtaaacccagttaatggaaccaaggcactacctgagcatatgaaatgaataagagtcatggtggggtagggccatcagcagaatgatgaggctgaccaacagacctattgaacaagggacactttatttcttctaatagccagatggcttccagggcttggaagggggccaagacagctagagagaatgatggatttaaagtgctggcacccagtaaatacaggataaacgatactgctgttgtttattgcgggtgaaggattagctgggagaaggtgtataacactggaaggggtctctgaacctgaaaactacatgaagcacaacggagatgcatgtgtggtgggtgaaagtccaagcaggtggggctggatctctggaaagcatggcagcaggaacaggtggcagatgaagttgggaggtggagaagaggtgtgtttgtactggagagagaggtagactacagggtcaagaagtcagagctggccagaagcaggtgcccatggtgctggagtacaggggcaggattcttgtcccttccagcagagagagggaatattcctaagaataaaatcagaggtatacaaacaggagcaacagcatgggtaatccactaattcctctgcaacacaggtaacaccggtctcatctaaaagctgatactcaggtcttttgcaagtaaggtctcttattgacattttacaactttatgagacaagttgcgttttttctttaggacacttactggtatttttaattacacatatatttgcgattatttatttcatgcttatctctccaattaaactacaggctccatgagggcaggcatcatatttgtttactttatgttttgcatgtagtaggcactaaacaacaattgcctgttgaataaataaaagtagtgtcaccctttcttacaggtgacaaacctgtatcaaaagtttttttggccaagttcaccttgctaataagtggtaggtctgggtctttacaggtgaccgaagctttctaagagtagtctctttctatcaggacctctctctaaggttgtcacagcttggtgtcacagttattgtgcaaaggatattggtcaaatctagtcaatccgatatatcatcaagaataggctagttatcgccagtccataaataataatgttactattaccatacgtacaatccttcactcatcataacattgccactgtaatcactgttgtataaagcatcacagcattcaaaaaactttgatcttcatgcatccttgggaagaaggcataaaggtattttacaggaaactgaaacttttgagttgcctgagatgatgtaactgagaagtggaactgagactcaattccaggtggaatttcacctgcaatgtaagaggaattttttaagtacttaaaatggaaaatatatcgaatgtgtaaagatacttaaaatgtgaattcaaatgctaatatatgactagttcaagatcagatgataagcttaatggcagaaatatctctaagtattcattcacttagaagatcagaggatgaagagaaattataaaaagggtagtaccttttgactcagttgagtctgatgacctactcctaaaaccatgagctggagagaggccagtgcccacaagagacctgcctgtagagtggcacaggcgctgggtgactggcccggctgccagctgaggatcaagtgcatatctctaatggtcttaccatcctcctggcatgtttcaggtggagtcagcataggggtccaaaatacaagagcaatgaatgccaactgctggacagaatctcagtctgggcaggccacaggtggtctggccacagcccaatggatggaggtctccagtttccaggaagagaagatagcaggagaagggcacagcctcaatccttaggggcttgaatagcagccctttagaaagacaaaaagcatataaaggcagaaagaagagggactgatcactgatggaagagctactctgtgcatggtactgctcagtaccttacctgtattattgcatttattcaccataacaatgctatagggtagtcaaaaccacctcaacactacagatgatgaaagtgatgctgtacttgctcaaggccacacagctaataagcactggaaccacaatttgaatttatagctgtcccctgccagtcctcagggcacatggaaaggaagagaacgccccctctcaaaagtgccccaggagtcaagcaagtctgcctcctgagtcagcttagaagcatgtgtctctagatacctgggttgagtgagaggtatgcatgctagaggggtgatgaagactgaatcttgtgctgatttgatatctcgagtgattgtgggtctgggagcaggtgggcagttcagtgaggagcagaggaaagtagaagcagtagaaatgagactggaatcaatagaacagaaaatgtactaggctttcatatggccattttaataagtggtatgctttctgaacacctgccatcctgggctataatatcacaacattataatttggtttacaaatgagtgtatcacttcaaagtgtacagaaatactctgtagcattaatgcaggggagtctttgatatttgaaaatgcctgtttactgggaagagcctgagactttccacctacactgtttgttttccttctcttcctcgccatcccctgcattttgctgcctttggatgaatggctttaccttcctaataggcaatgaaaaacccagtgccctgagatcaaacagcccatttgctcaatggaagtcaagtgcctttgacacatgccaaaattctgttgctgcaaacaacaaagaatggcaacaaaagctaaaatgacagcatttatttaaggtattttttggtctcctagataagtagatttaaaacctgttgacaacaacaacgacataaataaataaataaataaagcctcttgacaatgacctacactaagaagtacactttatgttgcaacctatagcataagagggaacacgtagatgcgtgcatgtgtataaatgaaacaaaggttacatgaaacattacctagctatattatgggttgcgaatacactctgatattttctattctatttcagttcctttacaaacaaacaaaaaaaaaactggagtgacctactagagtaattttacgatccacttacgagttgaacttaaaatttgaaaatcaccatctagacctagagtaaaagaacaaactcatagtgttataggagctcccctaaaaaaggaaggtaaagaagggtagggaagttctaggaactgcatatatgctttctcctccacagatagcaccataaaagcccatcccaatgatgaaatcaagacgacctgcatggaggtgatcacaggctgaaagagcccagtaaaaaaggcacaattcattaaagcaaaccaacaacaacaaaaactttctcctggctaaacgatcactgaaataatgtaactcaagaatccctgtaaacatttttgataatccacaataccaccaagcattcacaagcagagcactgttagaaaactgattttatccaaacctgtgtatgtgtgtgtgtgtatgttataaaaacagaccaagtgatagtagctgttacatttgcagaatttccagtcattaggttgacctcagggcaggcgagtgtttcagggagcgtgttctaaatcataattgagccctcagctgtattgaggccaacaagctatatcttgtgtgttttttggcatttactttcaagaaaatgttctaacttaaatccatattatcccatccactcaccaagaaacttccttctgaggactggacagtttagaagcagtattaatcctgcttttctgcaaaccactcagaggcttcagttatccagctcagtgctcacaaagaaaaatgcagacatggacatgacaactgcactccccattttttctcatgtaattacagctccaagtctcacaattccaagcccttttcctacaaacacacaatttttccagtcacagccacacactgtttgcctctatcattaatgtctctcatcagaatcttcaaggcactcatttttggggcatagaagagcatatataagggaatacattccactcttagtactaggctgctcagctaggagaaagggatcaccactgaaaactgggtgcttcatttccctgcaatcccagattgacccattactaaacatccatatatactttgtcagaatgaaccccaatttatatgccagtccagatgtctcatacttaataggcaccattaccaacaaatattgctgaaatggattacttggcagagaaaactaaattttctttggattcttacataaggcaggatttccacttatctagtgttgcataagtgtgaaggaaagagagtgaaactagttatttccaagatctcttttaggcctttagccagtgatctgagaatgacatgaacattataatcacattttagcacattctgtatttgaacacatgctggggttaaagtaagtgtgctgagtttcggtccctaccccaagagtgtctgtggtcaaatcctgatgttggatcctgatgcctcccagtgtctgtgtaggtctcagcccccacctggatgctactgcttcctactgggtacaacccctggcaagggattcagggaatgctgctgccaccaaattttcccctccccgcctctgaaaaatgcaaaagatgcaagttcagaaggaaaactatgctttcctgtcttaacataaccttcccttaaccaggttaaaatttgtcaccaaagaaggaaaggtagaatcagcttctagcaaatggtgaagctgacaatcttccccctcttcatgttccccgatcacacctaccaggccacatagaactatggactcatcactagtttgctgaatggacaggggtccaaacagtcaggaaaccatcaccgtaaggagtcaacacaagtgagaggaaataaaacatgactggatagaaagtaatgctgagattttggccatgattcccaggacccaactggccaacaggaatggccctgcagaatttctataaagaggctgaatggtgcaatccagttgaaaggggatgcggtcgatttttcacatttattttttaccatgacctagtgtaagaaatttatttacctaatcagtatacacaaacatagtgtgtaaaaatgaaacaagttttatgaaacaatacttacccttatgacgctatgttgcagtacactctgacattttctactgattctattacaataaaaatgaaagatctggtcatgacccactaaattgatttcatgacccactagtgggtagagagcagcaattggggaaaaaatggtacaaaaaccttgtcttgaagctgtgctctagtcataattggactgtttctacatttggggtgacttgggaagactcagagattagggaggccgaagccttaatgatgtttagtttgagagtaacaaaagacgaaagtgaagaaatcaataacctttcgactagggcccttcaacatcccaactgtgtatttttcagagaaaagggagctggaaaaccagggtccctgacagagaactaggatggcatgcagaaagttagaaaattccaaaaacaagatttaaaaaatggtttgggtatttcaaaataaagtactagatctaaatctcttcacacaaaactcttgagctggaaaatatgattacatcataaatggcctaaaatatgacctaaagccaaactgtagtaataataatctttcttcctgaaatgatggttcccttatgactgaaaaaaataattaaaagaataaaatggctatgtttttcttccattactattttgaaactgcaccaagattaattcattaatttcacctttttcaatcatttcaggctaaaaatgactacatctataccttatttggctaacatgtgtacacagctaattataggaaggctacttttaagtaggtatctttttctttttttttgtctttctttagaaaaataacttcatgtagttttggaagccaaaagttaaatattagaaaactaacagttcagcatcaggaatagaaaccagcacacatatatggaaggtttgtaagaaagaattaccatgggtaagtcaagacttagttataacagaaaacacaacttacagcaatacctcatcaccatttactctccatttcttcaggccactggttcacattcaccacacaaaaacatcaactgacagacactgaggaaagtgatgtgtgatggcagacagtatgtgggtctaggatcttacactatttcaatggtttttatttaaagtcttctatagaaaaaattacttgtcaaatgtgctataaatggttgagtaagcagagcttttgaaatagatttagcaaattcaactgcatctcataatggattatcattaacaaggcatgagttcatatgattagttaattaagcagaaaaagtataatgtctttggttgaataaaatcagtattttttatttatcaaactccaattccatttcacaaatgtaagttatcatcagctccccatccactttctcccatcttcttatctctttcccaccctacactttctctcccctacaacccgggttccaaaaagaaaaaaaaaaaatccctcagctatttgatcttaatatcactgcaaaaatcaaaaccagtgtctcctgcccccaggacagtgggtatccccacctggctgcctcctgtagctcatgcaaaattcaacccataattatagatgcattctcagtttacgctgcacttgagattcaatggtgactaatgtcaagatggagagatttgtgaataaaaataatttcaacagcaaatagaaattagttttgtcttatttgtcattgacatgggtaatgtacagatggtccctaatttatgatggttcaactttcaattttttgactttacaatggtgcaaaagtgatatgaattcagtagaaaccatactttgagtactcatacaaccattctgtttttcactttcagtacagtattcaataaattacatgagatattcaatactttattttaaagtaggctttgtgttagatgattttgtctaactataggctaatgtaaatgttctgagcatgtttaaggtagtgtagcgtgagctacaacgtgcggtaggttacaagtattaagtgtattttcaatttatgatattgccaacttaagatacgtttatccggatgtaattccattataagttgaggagcatctgtatataactacatactacaagatgacaggttttcctgatacaccctcatgtaacaaattatgggtcaagggggaaaacccccagcaaagaatatactgataacttacaggacccccccaccctccaccaccaaaaaagtgccttaccagaatctaaatggcaaactcaggaaatgtttaagtttcagacttaaagtagactttagtcaactccagagtgggctacattgttcccaaactgtgccagtcaggaatcctagaaggggttccagaccattatggagcatgtggataagagtaagagggaagtacacttagaaatgaagtgtgcaaagtggccaaatccctctagacccaaaacaaagtaatacagttctgtacctgtttcttttggtgaacttggaattggatctgaaatttcaaaagatctgagagggcacgggtgagtttttctcaattctacatcttctcaacattaataaaattaatcttcactggactattacccccatcttatctcatcctgttctctgtatctggaaggttgctcttctctgccttcccctggttaattctcactcaataatcgctccttctgggaagccttggtgtgggtgagacacatcttcttgagcttccatggcactgggctgaggtctgtcataaaatctgcccccgtgttctgcaagtgtctgtcactgatctgcctccctctctggactgtgacatcctcaggggcagtggaagtgtctaattcatctgtatctccccagcaccaaacattcagcctggacataatagacagttattgaatgtactaacagatatgagtaacacaactattatccctttactatcaaaagcagtcatttttcacgcaatcatggcactcataattaatgccacacaaaaactggaaaactttaatatttcttaagcaaaataatgacgacagaatcaaggcaaaaggatgaagacggagtttcgctcttgttgcccaggccggagtgctgtggcgtgatcttggctcactgcaacctctgccttctcgtttcgagtgagtgtcctgcctcagcctcccgagtagctgggactacaggcgcctgccagcacgcccagctaatttttgtatttttagtagagatgggggtttcaccatgttggccaggctggttttgaactcctgacctcatgatccgcccaccttggcctcccaaagtgctgggattacaggcgtgagccaccacacccagcccaaaacgtcttttaataaaggcaaaggtttacttacacatattcaaacagaggaaaatgctgatgtatgtatcttcactggaatgataacttacccctataagcccatccagctgcaaaagcagcttaaatgatatagtccttttaatttgctaacctaaactaagtcgggttcttgtccacactgatttgttggacaaaattaaaccaaccctgtattagtttgtacttttctttgtactttttcatgctgattcctcttgtcatagttgcttggataatctaaacatttagcaacaaaagtctaaagtctggtgatttattcctttctatgtgatgctactgctccttcagcagcatcagcttcaggaaaatgatgtacattattaaattacttgataatgacaaagtgaactaggatgacattacacacacacttttttttttttttttttttttttagacagagtcttgctctgttgctaggctggagtgcagtggtgctatctcatctcactgcaacctccacctcctgggttcaagtgattctcctgcctcagcctcctgagtagctgggactacagacaccacacacacattttaaaatgggatttgttgcttgagattatgcctgcttgtccattcagatgaaaagcccctgcttatgaaatgagcctgagatgtctgacagatttaatatctaatatcagtttaggggaagtgatggaagctaacttcaaaggtcaggggaatattttgatggaagttcagaggattcagttatgtaagtaaatatttatggacaacctgaaataaatactgcactatgttctgtataagatataaatgaaacttttttctctcttattaaggttttagtcattttctctttaattatggtactcccttgataagcaggaaggaacactacacatatccagatctccagtcaaaaaatgaggctttctgaaatggttacagattttagtagcaaaagcccataaaattaataactagcactcatttttaaaacatgcacctccaaatttatattgagaatcataagatgccacaaacaatttacttatgacacaaaggcagtggaaggtaaatctgtttgttgaaaagttgtaagtagatttttctgtttttgtggtttatattaatggatggatacctaccattattataataaaaactaattttgaagaaatctgagcttaataagaattcaaatacatgcaaaggcaattttccagcatatctgaattacaagggatctagccctgccttcttagtcttataatggttctctaatgagtctaagaatctctgcagaaagctcattttcagctaatagtatctaatagaagtcactccctagtcattttgttccttattttcaaggctttcaagatcagctgcacaggaagagactacattattggatgcatcccagtctctgggacacatcaatttccaaacgttactgccaaggccatgtagaagagtcaaaacaataaaaaaaaaatcctgaaaaggagcagttgttctaactagttggcggtgatgatttatcaagaactgttaatctgctgccatgtgaagagcctccagcacattcactttccatcttggtgtcagaataatttctaattatggtttggggcagctttctcacttgaaactaaacagaagtttgaggaaatttatgcatttaaaaatgcaatcatccactatgctggtaaataagatacaattacgcacaaactgtgcctaggccatttagggggttatataaatgactgaattgttatttttaaactaaagtgaaaacaacatattctcatttacgagagaagggaagtaaaataattcacttagtgttcgagttagattgcatatcactaatgtgtaaaatgggatttaagtagttattctacatagatttaatgttatgttaggattaaccgcaactggcaacaagcacttcatgcaaaaaatgaccttcagattttcataaaaacctcatttctgcaacttattactgtgtatgactttggacaagtcacttaacctcagttacctgagcctcagtttccttatcttttgaatagggttaataataccaccttttaggattcacacacattcaaaaacttggcatttgttagctatagctattagacattatcttgatgttcacttgcctccaggatgaacatatttaggctttttcctaaccagagaataaacccagaaccaaaatatataggtcctactaagtaccctaataaaaggggaacatctatccaaattatattccccatcccttccatttatgtccccattcccccatttgatgcctaattccacttttgggatttattacctggtgctaagcattgacttcttcctgaagaggcccctacaaatgcaaaagctcaaggaaacaataattaaagctattatcactttgtaagaatgcatttgtgtggttttctccaagacaaaattaccccacatactaacacttggtacctgggaaaggataaaatagctgttaaaaaggagcaatcctagtcaacagggtacatgacaaataaatttaaaaaaaaagtaaaggggcaaaagggccttttgcaaaacaggatatattttgcaattttgcttaagttaagttttgtcagttaatcattcattaggtactaagaacctttggacagaaactcaagaaattggcattagtagttgcctctaaggaggagaactggttaggcaggtgcaagagtgggcgtagaagggcaacacccactttcactgcatatccttttgtaccttttgattttggcactgtaggcattaattatctacacaaaagttttaatttaaaaaattcaatcctcacaccctgttatttctcctacatcatcttttagattatttgtttacattatttgacatttaaacattgacttttggccaggcacagtggctcgtgcctgtaatcccagccctttgggaggctgaagcaggaggattgttgagcccagaagttcaaggctgcagtgagctatgatcatgccactgcacttcagcctaggtgacagagtgagaccctgtctctaaaaacaaacaaacagagaagttgcattttttccctaaaaagtaagttggagtcatgtaaaatttgataggcctctaacggcttatttttctttaaagtattaaacataaaaaatactcaaaatctaaagatacaacattattagacaattaacattatttactgactttctgtaaatacagtttccttcactaaaacttaggcttcctgcacacagggcctgtgttttattaatctttgaggccccattcaggcaaacactgggctttcacaggaatactttcttgaattccaaggaagaaaagtcattaaatgaaacacgatgttttgattaagaaggaatttctcaagatttttataaaaacaaacaaaacaacaataacaatagaaagaggcagggacagggaaagggagaagaagaaacagctataaaccacctacgttcataatagaacttttgggaccttactgattgggaatgcttgtgaaacaccaaatatgtcataaggagggagaattaaggttaatctaaaataatgagaacacttgttcaacaaaatatttgctacatgcctattgtatacaaggccttggtgacaaaatgttgaccaatacagacatgatcctagccctgacaggttacataatagtgggagatacagaacggtaaacaggcaattatcacgtggtatgatatatataaaaggaagtttatagcgttttaggagctcataaaaggagaaccaattccatgcttggaaaagtgatgtctaagtgggactagagctttggagttctctaaacccgagttcaaatcctggttttacaggttacactctataaccctggccaatttatttaatctctccaggcctcagtttcaccaactttaaaataggaattatgatagtattgagttcaaagagttgatgtgagtattaatgaaatgcacatcataaatctggtatggtgtatggcaagtggcaagtacccaataaatattagctaataatagtgataacagtaagctgagaacttaagacagataaaagggaagagaggaaagaggaagagtacccggacaaaataaaagcaatagtctggtgagcttcagtgaaagaacctcgctcgatccatggatcaggggatgcttggggtgggatcagaggtgaagctgaagctggaaaggcaagcacagcccagctcaatgggtttatctaagctcagtgggggccccttgagaattttagtcagagaagggacaggatcagatctgagtttttaaaagaccagcttggctacagtgtgggaatggaatggaaaattgacaagactagaggcagagatcagtgacaataattttaaaataattccttggctactgtggattttcacagttgggaatgcagacatcacatgaaaaaaatatacagcaatccatagagggtcttgaagtaactatcttcttgtattagcatttcattcatcattcattcattcatccactcactcaacaagcattaacacctaccaaggcggtgagctggtgccgtgagagatttctacaagcattgccctacatgactctgccctccagaagcatcccatccaacactgactgcccatattcctctccctgcctgggaggcctgttaccctggtgacccagatcatgtgcaatgcaaaggcaggcaccagcaggagacccaaacccagaggcagtatcacatagtagagagatgtcactaactacatcagtgtatagctgacttcttattaacggagtaaatcttccctgatccatagttaagtgaataataatagtcaacattcatcaaatgtcctgtcctgtgaatttcaggtagattaatacatctattacaacaactttgtgaaacaggtattattatgtccactgtatagatgcgaaaactgaggcaagagacactccctaaaggtcacagaattagaaagtggtagagctgagattcagtctaatgtttttatccactacaccatgtgacttctggcagtgggccaccaggctgatatcagaattaaaccaatttaaaatgtatgcttcaaaatctaggcaggggaaaaagatcactgctcacttaggtatcagggaggccaaagcttggaagcttttattataggaataaaatgaaatgggtgaataaatatggtgacagtctcttgagaagaaattggactactctcatcaaaagagtgccattttgaaagggttttgaaatcgattttgctcttttaagttcaaaccatagctctgccatttggcctagaacgcattagaaagtattcaaatgggattacattccttatcagtttaaaagagtgggacatctcacagactcaaagatggagaggtgtggcaaagacatcaaagggctagcagagatctgttactcttttggttttctgttaatggagggtgaaataaaagctgattatctcgatgagaaattagtagaatatgcttattttctcagaccatgtggcattccatcaaccaagtagtggagcaggtgaggaataagcatattttatcataagctctatgaggcatttccaatgtgaagtgaatacagacaaaatagaaaaaaaattcttaaatctccagaaatgaaagaaaccactagcttcttgcaatgccactggatgccaatagcaacggagtcttgagcctgggctcttaactggcaatgagaagaatcccaggccagatggcattttaaaatccaatctcactctatttgtctctccccactaacctacattgcacttaaagcaatcagccatttcacaagctgcagtatttcaaagtagttacaacccttgagaacagaaaaactctcttaattgctgtgagtttaaaaatatagagaataaaaattatggaatttgtgaaacaaccatctctaattaaacacgctcgctagcacacacacccaacaccgcacagagtacagcttttcaaacctagcccattcatgcacacatttagcacagctcaccaacaaaacacttttccttccattcattcacttactagtcccgttctttgggactcactcgccaccactgaaaactaacttgagaagccccaggtctgtgggcaccgacaccccgttaattcatccagcttgtcctgctccgagcgccaggcaggacttgggggcttcggtgtcacgactggcgctgccccctggagggacgcccagcctccacccgccctaccggagcggcacccctcgcggccctcgctccctgggaaacactcagagttgcactgtcgtcgctgccgtttaattttcacaaataaaaatgcccgtgagacggaatcccccgcccacccacctgcccgagaccgtacaaccacattgaatcggatcctccagaaggctgccggcagccgggaggtgtgaacaatgaacttctctctgactctctgacacacacacacacacacacactcgccccccgacgggaagttgtgaactactagcccgagggccaatggcgcgactccccaggcaacacggcggccggcggcgggggagggcctggcgcgcgccccggccgcgcccctcgagtcggcagttacctccttcctccggctcggcgccccgggtcgggtgatgagggccgtctcctcgcacaccacggccacgtcctccacgaagacgcagtccggaaggctctcgtcggccggcagctccaccacctgcagccccagcttgctgcccagcacgcccacgtagagctggtgctgccgttccgcgcgggcgacgtccacctcctcgcccttggcgcttctcagcgcgtgctggccgagcgactcgggtagcgcccgcaccacggcgtgggtggcccggccgaaggcggcggggtggccgagcccggccatggcttcgggaggcttaggggcggcggcggcggcggaggcggccgggtcctgccgcgggcagcgcgcgctgagcctgcgagcgcccgtcggctcctcttggcagccgctgaatgtggtgcagaaggagcccagctcgcgcccggagccctgcccgcgcgactgagcatgcccagagctccgggcgccggcccgcgcgcatcccgcgcgcccactccggcgctcgcgggtctcgcgccagcccaggcgggagttgtagcggcgagcgccgggcgaggagtggggccaggagaggcggccggggaagcagcgagggcaagaagtatgcggaggcgggggacctcggcgaaaagccaccgctacccggacctggcggtacctgtgttctgtcgcaggtgcacacctcccatcgtccccagcgcggacttggagagccggcctcggtctggacagagcagctggagggcttcctggtctttacctgaacagtttaaaccttgcgtgcttacaaagtctagcccacttttgaagagctataatggtttacagattcttcatgttgagcttaaatcccacgggtcccagttctgttttctggccttacctaaagtacaagtttttcttgttttgtgtgtgttcgcgtgtgtgtgtgttttcacaaaacagcatttgcatatctgaaaacagttctaattatctatgctgcctaacaccatcctctaccccccaccctaaaccccctccagtcctggagcccaaaccactgaaaagtaactagtgatttggtttccaagtcccttcaacattctggtcagcttccttttgatacacaccaatttgcttgtatccttttaaaatcatagtatccggaaaataaacaattcttcctgtgtggtctgaccagcacagactacagcagcacccttgttccagatgctgggcctctatgaacactgcctaagcctgtattcacttttttggtggtctagggccaaggcccaggctacagccttcttgccagaactctgatcccagcttttaggaaactctggatttctaggagcaggtctctctgagcatcctagaatggttgccccaactgagcccagagatgtgatctgccttctctcccctcccacaagggtggtgtgaatttataaatgagcttcaaaattctcagcttcacatttgaggagttttttttgttttttgttgttgttttgttttgacggagtttcactcttgttgcccaggctggagtgcagtggcacgatctcggcttacttcaactgctgcctccccagttcaagcaattctcctgcctcagcctcctgagtagctgggactacaggtgcacgccaccactcgcggctaatttgtatttttagcagagacagggtttcaccatgttggctaggctggtctcgaactcctgacctcaggtgatccacccgcctccacctcccaaagtgctgggattacaggcatgagctaccacgccctgcccaaatttgaggagtctcaaggacagctctgacactgacattgggaagtgggaccaaaagtaaaataacaaacctttaagaccgactaggtagtacttctaaagcaaaattcttaggggatccaggcagccccattagccccagtttagcgtcagaaatcacttaatggtgtcctcagatggaggatttccatcaaagttacaggtgaaagttgatcttttaccttaagcttgccctggttaaatataaaatttatttatttttaaattagttcattatttattcttttttttttttttttttttttgagatggagtttcgctcttgtttcccaggctggagtgcaatggcgcgatctcagctcactgcaacctctgcaaccggggttcaagtgattctcctgcctcggcctcccgagtagctgggattataggcatgtgccaccacgcctggctaattttgtatttttagtagagacggagtttctccatgttggtcaggctagtctcaaactcctcaactgaggtgatccgcctgcctcggcctcccaacgtgctgggattacaggcgtgagccactgcacccagcctatttattcttattatatattgtttatttgtttagctcccgggttaaataaagtataggacttcattctgctctttactgcagactttaccagacattgaggctccatctgtctctagctggccaccatctagcaatcttcattcatgcctgtgccttgttggagcctgaatatttcacctaccactcagtgccctgagtctaactatgaacagggttctgtgtaccactctgggctcatgtcagtctagcagccaattaaaacctgatgttagccatgtctttccatactgaaattgggtacctgttcttttaaaatctaattttgtagttatccctgttaaatgttatttacttatttctaatttgtctagttttgattctgttatctcgtgcattacttattacttctaattcgtgccatctgaaatttgataagcatgccttctattttctctaagcagtggtcaaaaagtgttagaatgtatatattagtaaaaaagaataataaaaataccaaatccattagattatagtttacatgctttcacacttcagcaatgaaggactgtttttaggaaaacggactttattgagcttaatacattgatatgttcatttttcccatgaatatttattgaaaattcccaaggcacatcaccatgttatgcacttcagagtcacaaaagaaggaagcacaaagacatgatccttaccttgaagagctcacaatctcactaggagaacaagacatccagaattggagctggggtaagtgcacatgagaggtatagataacaaagtgctacaggaaggtaagggaaagagagatctatctctatggtgggtgggagtggaagaaagctgcttgaagatgattggacttggtttaggccttaaataatttttggatgtgagtaactgaaggagagaatgagaattctaagggaaaggcattttcaaaggacagtaggtagatctatttacatatctatagctgctgtaacaaaacaactccaacacatataatggcacaaaattgacagaagcttatctcttgttcactcaaagtctagcacagatgttcctgattgattctcaactcttttttccaagcaatattcagggatccagccttcttctattttgtggctccaactcttctacatgtggcatccaagttttccatgctcactgtattagtcagttctcatgctgttaataaagacacacccaagcctgggtaatttataaaggaaagaggtttaatggacttacgattccacatagctggggaggcctcataattatggcagaagacgaaagaagagcaaagggatgtcttacatggcggcaggcaagacagcttgtgtaggggaactctccttttttttttttttttgagacggagtctcgctctgttgcccaggctggagtgcagtggcgcaatctcggctcactgcaagctctgcctcccgcgttcacaccattctcctgcctcagcctcctgagtagctgggactacaggcacccgccaccacacccagctaatttttgtatttttagtagagacagggtttcactgtgttagccaggaaggtctcgatctcctgaccttgtgatccacccgcctcggcctcccaaagtgctgggattacaggcgtgagcaaccgcgcctagccgggaactctcctttattaaaccatcagatctcatgagacttattcactaccacgagaacagtacaggaaagactcgttaccatgattcaattacctcccacctggtccctcctacaatacatgggaattatcggagctacagttcaagatgagatttgggtggggacacagtcaaaccatatcactcaccttcctcaaactgaaagaacaagaaagaacatacagccaccacatgtgaaaggcttaatgggtcaggcccagaagggatgcatatcacctctgctcccattcttctggctaaaattctgccacccagctacaataaccacgagcaagggctggaaaatacattctgctgtgggcccagaaagaaaagaaaacatgaggttggggaaacagctagctggtgtctgcctccagagaacagtggggaaaatggaaaacaaaggtggaaaagtgggctaagccttcatcacatcagctgtggggaggcatatggtgtggaaattaagagcatagcttctagagccagactgtgtaatgaaagcttggctccactatttccttgttttatgattttagacatgttacttaaaaactctttgcctcagtttcatcatcatctataaatgcggagcaatgaacacgttatcatagagttattataaatgttaatattgcaaagtgcttaaaaagtgcatagaaagtaactagagcctaatagatgctcagtaaatattatccattgagaggttttgaacagaaggctttgcacatgatttcctaccgaatgccaaaacacacgtacacattcactgaattaccagagtcatatagctgcttgaaggtatgctttccaggagaatttgtggccttcctaggttgacagaccaaatctcacccacaagtgtaatcatagattcaataaatatttattgaacccttgccatatgccaggtattgtgctaggaaatggggatgtaattatgaatggtaattatgaatgataattatggcttatggtcaaattgttccttttcctcttctggacatttcaagacctttataagcaatttcctttaaattccctctgtttgacatacctaaagctatttctgttctggttggatgttgattaacacaggggcaagttttcttttccattgataatattgctggtatcttgccttatttgaagtcaattttagatagcaagtatctgaagattaaaacaggcattcctgtcttactcttttcttactccattttagcagatacaagatttactttcataggagacaggtgttttgagatgggggtgtgtattagtctgttttcacactgctgataaagacatacccgagactgggtaatttataaagaaaaagagattttatggactcacagttccatgtgactggggaggccttacaatcatggtggaaggcaaaaatgcacgtcttacatggccacaaggcaagagagaaaatgagaatcaagtgaaaggggtttccccttataaaaccctcagaccttgtaagacttattcagtaccacaagaacaatatgagggaaactaccccacatgattcaattatctcccactgggtccctcccacaacatgtgggaattatgggagctacaattcaagatgagatttgggtggggacagaaccaaaccatatcagggtgggaattctcaaagagaaggagggctcaaggatgtccttgtccaacctaagtgctagaaatatcggataaagtaagtaccataaatctgcaatttgacagtaagtcctgagtgttttaacataattattacataaatgtttaccgtgaaagaaacccattgctgcagattgcctgttatatccaaagagtgagtggtgtttggttgaatgggcaggcagtgagttacagacccagagatggttccacggtaaccaggactctggttcctaaagtcaagacacatagcctcctaatctcagtttctccaactttcatctggggtttcgttcattgaagaaacatttactaagcatctacagtatgtatggtagaggaatacataaaagcagtggataaggcatgggttttagattcagacaagcctgaatttgattcctggccctcctacattctggctgtatcaccttagtgtacccaagacccgtgtttcaccattttctgtcttgcttgaagctgtggaggactgatcttcatggacttcatcacctgcgatcccatttttgttggttttggtgaatgggatatacttacaggagactggaggacaagaggggacagagattggggtatttatttctctggctcccttcctgctttttcatggttgtagcaacagctccatccttctacaatcatagcttctgctggcggcccctattctatggttccagctctcagctgggttctgataatgctgttgccttccattattccatctaggggtagtattggcttctcgtttttgctagtccctgggttcctcgttggttctctttacctgctcacacctctaaaaacattccttttattaaacatgctcttcagaattctttaagtatgccatttgttttttaccagggccctcacttataactcattgttacatacatatatgtgtatatgtgtgcacacacattgccttgaattgatgtgtaaagtgggagttataataccttgttttcagagttttgaggctgaaatgtgacagcatatacaaaggatctgagcattgcttctaggacacagtaaatactcaattgtgatagccactaatattaacagttattgtgctcttgtgccaggcattgtattcattatggagtatccatctgcctctgtataaagtgcctattttcactacttaaaatacccaagtccttcaaatgagataacataaagtgcccacgacagtgatagggacactgcaaacactcagtgctttctgcacttcaaagctcaaccttctctggtccccacctcctcctgtgcaagcaacacatcccttttctgaatttctgtagctctttctgtgttcctctgttggggctcagaaaacaatgccccaaaatgaaggcctcagaagcagcctcagaggtgtaggtttgttctctgaccttctcctgccctcctgtccctcagtcccatgccccactgaggctagcctcagaaactagaatccctcttccccagggcgggtcatagaaaccaaaatgcctttttctccaaagccagacataaaacctaaaaatattactccaactttccttctgccctatttctgtgaaaacaggccataaagaaattatctgacataccttgtttgtagatcataagacccccattccagagaaggtcatgtcccatccccagaaggaaggaatgctgctcagagaggcgaaggagaatctaggcagacagacctggctgggcttccttgctcagtttattagcattagatcatacctttttggtgcaatcatatttctacatggctgtccatactttgttaaacctaagcataaaatagatcaatttctcctgtgtctttgggtcttcattctgaaggctcccatgtgtacatgctaaataaatttatatgccttttctcttattaatcttccttttgagagttgatttttcagtgaaacttcaaagggcccttggtccccacaccgctcttatgctgcttattactttctcctagcacagtgtaataacccacggatgccagagtcatctgcctcattgcaaccacattaggggctaatgagataaccaaaatatcctgtaaagttcaaagtactatataaatatgttgagttttaacaagtttgtgatgtattatggtaataagcagaggtgagtgttgctccaaacttttttttagattcagcgggtacatgtgcgggtttgtgacatggatatgttgcataatgctgagatttgggcttctgttgaacccatcatccaagtagtgaacatagtacccaatagcaagtttttcagcccttcccacctcccctcctgtctctttttggagtccgcagtttctgttgttttcgtctttatgtccaggtgtattcattgtttagctcccacttttaagtgagaacagtattgcagtatttgattttctgtttctgctttaattcacttaggataatgacctccagctgcatccatgttgttgcaaaggaaatgattgcattatttttatggctgtgtaatattccatagtgtatatgtaccacattttctttatccaatacatcactgatggacacctaggttgattacattactttgctcttgtgagtagtgctatgataaatatatgagtgacagtgtctgtttggtagaactatttcttttcctttgggtagaaggggattgggattgctgggtcaaatggtagttccccaaacttttatattagctattttttcagtttttcagagctttttgcaacattatttttccagaagtatgtttatgaccatttgatattcaatatatatttatggggaagaaatagtttgaggggaaagatctttcaaattctaggaaatctaaatgtagaagaaaagaaaaacattactctacatttaaaattgttatatatgtatatgtatgtgtacacacacacacacgcacgcgcacagggctctgataacccccttcatttccttgtgaaatgaagttgcttcattttcttacgaagcacagagaaatgccagtttcgcaatgccagggaatcactgtatttgcttttgtggtattaacgcacaatggttttaacatagcattggtatacacatgtccaaagaatcctttgcttcagtgatgcttctctctcatgacttcttttcttctgccagtctgtctctctccctctgcttctactccattgcttttcctcattctttcctttaaatgttggtatttcccagagttctctagcctccatctcttttcttccaactttacatgcttcctgctttggatgagcgaatctaggcccatgacttcaaatacaccccagtgccaacatggctcaaactttcatttctggtcttttcctgcccagcttcagaactacctaaaagacatccgtatttggctgctccaaaggcactccaaagttgacatcccaaagcacagctcatcatatcctgcccaggattgctccttccaatccctattccattcatactggtagttgcttaagccagtaatctgagtgttatcctttggctcacgttctcctttacctccacatttaatcaatcaccatgttttgaccaatcaatccccttaaaatgattcaaatccacccatgtctcttcatccactctgctaccacttagtccagaaaataattattggtttcctagattactgcaacagccatcttatccaaggcagtctttctgaactgcaaatctaactgccattgtcttgtctaaatcctccagtagcttcccagtatcctcagaatgaagtccacatgttttaccatggcccacccaacaccccacccccatgatgtggcctctgcctacttgccatcctcattctgatctcatccctattctctcttacttgggcttctgtgcatggtttcccatttcctggaatgtgtgtggccccatccctgcttgggtaattcctaatcctctttagactcgttgaagtcatcactctattcaagaagacttccctgggtccccaggtgggatgagatgcatctgtatccctgttttgactcctatgacaaagcactgttttacttgctaatccaaggagctcttggcaaacaggcacatcttgttattactggatcctcaattccggtgtgtagagaatggctgaattaaagcaatagatggcattcctttctccccactctcatcagcccactttcataagaatgggtttcagttcctataaaataagaaaattatactaggccccttccagctttaagaatctatgattctgttgctcccaatgcttataaattgctatgggagagtggagggttcatggtcagggtttgaaccctggctttgtcacagctgtgtgatcttgtacaacttgcttgacctttctgagcataagaccctcatttgaaaaatgagggtagtaatatcaatcttacatagttattatgaggactaaattaaattaacttagacaacatatgaaatatgttcttcgtctcccttctgctgagggagccctttgttcaaaggagccctttgctcaaatgctggctccactacttactatctgtacaatcctggtcaattaacttcacatacagagcttcagtatttttccatttgtaaaacaaagattacacatatattatgacgtaatgaagattaatgagatgatccatgtaaagctttgcagcatgtagatatagcaagtgctcaacaaacgttagccacttccatgatgatggaggaggagaagggggaggaggagggaaaaagaagaagatatgcaaagcatagcaatagttgactttcaacaaaggttactccctttcctctttcctattccattattggttgggggaaagcttcatttacccattctagggtcaaaccccattacaataaaattattgcccaacttcccctgctgaatgggaaccttcttatattaaattttggtaagaattacctacattttaaataattcaggttacttaattcaatatgtttgacaatgtataggcataactcttagaaaaatagatcatgtaaacactgtcagattatttccccacactttctttttcttgccagcaccattataaaattatagagggcttccatatatcgggacctgcatcatgcaaaaatggttggggtggagtgggagtagaggttccaaacttctagtggctttatggagaaagcctcactgtccctattacctgaactcttacctctgaggtggttgggttttgtttgtttgttcgtttgtttttggttttggttttttcgagacatggtctcactctgtaacccaggctggagtgcaatggcacaatctcggctcactgcaacctctacctcccaggttcaagtgattctcccaccttagtctcctgagtagctgggactagaggtgcacgccaccacacccgggtaatttttggttttgtttttgtgtttttatacagacaggtttcgccatattgcccaggctggtctcaaactcgtgaactcaagtgatctgtctgcctcaacctcccaaagtgctgggattacaggcgtgagccaccatgtccagcctcaagatagttgttacacgcttctttattttgcccttcacctactttctcctctgaattatctttcctcagctccttcttctcatgcatttacttttcttactctttgtttcagttattgttgatgcacaaaaaactactctgaaacctagtggctttataaaacagtcattttgtttggaccatgatttgtggattaggaattggggaaaagcttgtgtctctgatccacatggagtccactggggcagctgaagctgggaaccactttccagctgactttctcacgcacatctctagtgcctcagtgttgttcagcctgacccccagctcaccccctccacacaggtcccttcttccagagcttcttcatgtggctcaggattctcacagaatagtggtcccagaatagtctcatttcttggtggttggcttcctacaggtgagaagtggaagctgccgtgctctttaggggctatgcacatagctagcatggcatgatttctgctatcctgtactggtcaaagcagtcacaggcctgcccatcaaagggaggggaacagacactttctcttgatggaagcagtgtgtatcattaaccagtcacactcttagtatcaagttctgttattcttccaagatagtatttcaataatattttcagaaaaatttctttcattttctgaagttttgctaacttttttctgaattaaaaacagggtccataatacacaactagcactagtcactgactagtagtaggtgctaatactgtctagcagagagacagctatgaatcaaaccatcactaaatactcacaaactaagtgctgtaaaggaaaaggactgggtaccatgagcatgtataataacgtaaatcccatatgtctgggggaataaaggaagacttccctggagaggtgacttctgagctgagaattgaaagatgagtaggtattaatcaggagtggagagaaattaccaaactgagccgagcatatgagcaaagacacaaggtgggagggaatttagcatgttggaggaaggaagagaaaaatctatgtgctacagctggaatgtcagtgatattgttaaccttgttttaaagctgagggtcagctcctggctgagagccctgacacaggtaagggctccataaatacgtgcctccccaatgacagggggcctgtcaataatatgcatccgccctcaggccttttctacagcctttacaactagaagagtgtcccctacaacctcatgacatcttacgtgagaaccatgcagattcagagaagtcaccattgaaaaccacccgaagaaaacattatctaccgaaaatataacacatcctggtggttattatagagtggagttaaaatgtaaatcaagattaactcacaccaagattatcctgctctttagagatgatatatgactcacactactgtctctgctatactatatatagcagagatagtatatgtatatgcatatactatctctactatatatagaaatatatatagtatattatgatgtgaaattttgatgtgaaagctagaagaaaatggtaatttgtgttcatacaggtcacatatgtagctacgtactaaatttttcagggaatttatttaaacatctcaaccatcaaattagcatatgcatcaataaaaaaatgctgtacaaattgtctataatttattgtacaggaaattttatgcttttattccctagtatatgggcttctattctctattcagtttttgttattttaatatattaaacataattgcaaaaaattaatgatctatgccatctgccaactcaaaatctcctaatctcagtttctccaactttccttctaaaaaaaattagaaaagcctttaaagaaagtatttttcaaaaatatagggaaaaaagggaaaggaaattgccttggaaagcaaatttttcttctgtgagaatgctgacagataaatcattttggagagaaatgggcaagaatattatatagaaaaatcagtttcatttttatagaaaacatgggtttccactaaagaccatatcataggatacatctttaaaaagaaaagagaagtttccactctaacttgctttttgccaagaatgctttctgacatcttaattaattttaggaattatctgtattagtctgctctcacgttgctaatgaagatatacctaagacagggtagtttatacaggaaagaagtttaatagactcacagttccacatggctgaggaggcctcacaatcatggcagaaggtgaaggaggagcaaagttatatcttacatgatggcaggcaagagagcttgtgcaggggaactcccatttatgaaaccaccagatctcatgagacttattcactaacagaataggaaaacccacccccatgattcaataacttcccattgggttcttctcacaacatgtggggattatgggaactaaaattcaagatgatattcgggtggggacacaaccaaaccatatcattatcctttcagttgtatccttcctattgtgacttaatgtttcttgaattttataatattgtctgccttattgcaatagtgttcagatcctcatcagaagtggtcattgacgggtaagttggagatcagggaataggtttggcattgtcagacaagactaatgaatatcaattgataaagaatgggttgttaatattatgggggatagtctaaagcatattacattactgtataatgctgtattctatataattgtatattactttacaatattctagaaatatggtgaaactaatacatgctttaaaagaaattatatttttattgccttttgaaagtttacatttaatttttattttactttattttgcgttttgcttttaaaagattattgatttgctatagcccaagaggtagtaggtgaaaagcttaaagtagttaataatctgagattatttttcctcccttctgtttttctttttttttttttttttttttttttgagacggagtcttgctctgtcgcccaggccggactgcggactgcagtggcgcgatctcggctcactgcaagctccgcttcccgggttcacgccattctcctgcctcagcctcccgagtagctgggactacaggcgcccgccaccgcgcccggctaattttttgtatttttagtagagacggggtttcaccgtgttagccaggatggtctcgatctcctgacctcatgatccacccgcctcggcctcccaaagtgctgggattacaggcgtgagccaccgcgcctggccctgtttttcttttataaagacaccagaaggaaattaaatgcttaattaaattaaacaaatcaggcactaatattaccacaatcggggttttcaccactaattgcttattgagtattacaacagtgttcacacaatctgaaagtagagtggttttggccacatatcaaaataggcagtgttataacagttccagatgttatggtaacaggcactctggaggtggggtcaatgtgagcatcatcagaacaccagacaattagatattgctagttcagtttgctgggccttgtcttgatccctttagggtgaaaatggtgcttccagcttccatctgtttggccctgcttgggaaagagtcatgctgggccaggctaatcacatgttctagaagaggtcacaaaattctgatttgggaatttttgtaaacgactatacccatcttacacatactgaaatctaagaagataatatttccttgtcacgtttttctgaagcagacgttcaattaaattcaaagagcacatgtctgctctcataggaacaactatgagcaattaaaagagaaacagaacaagtgacaaaacagctccttcttcagaagagtgggagaagtaacccactgtggatggttcaacacttctgtcagtaggtaaaactgtgacagagtcaacattcaccttagaaattcttctatgtgcccctgctccaccccacacactgttagcagttccccatccctgggttgcctctctgagcacaggcttaaactgctcccttccacaccaaaatatatgtgctctggagttcattttgtcagattcctcttaagcttctaataaaacctaataaacctattcaggataggatctcagatgaaaataacttttcaattcaatacttttatattaagtgactaagtgtgctagatactgtggctaacgatctgattaagaaatggtttctccattcatcattttaaaaatcaggaacaggcaggtgcggtggctcacatctataatcccagcactttgggaggctgaagctggcggatcacctgaggacaggagtttgagatcagcctgaccaacatggtgaaaccccatctctactaaaaatacaaaaagtagctgggtgtggtggcaggcacttgtaatcccagctactcaggggactaagggatgagaatcacttgaattggggagatggaagttgaacgacccaagactgtgccacagcactccaacctgggcgatagagcaagactctgtctcaaaaataaataaataaattaattaattaataattaaattaaaatttaaaatcagaaacaattggaaagccctataataaaagagtagttaaataaatcaaggtatatccatacctgtgggatatgctgtagtcattaaaaataatgcttttgaaaataatgttttagtatgatcacagtttaatgacatatataggagaaaatgcttaataaaatgtaacagtaacttttgctatctttaagaagtgggattataggtgatttttattttctttaaaattttatgtgttttccaatttttctttaagaagcatatacttcataaaataataaaaatcatttctttgggttttttgtttttttttttttttttgagatggagtcttgctttgtcgcccaagctggtgtgtagtggtgcaatctcagctcactgcagcctctgcctcccaggttgaagtgattctcctgccccagcctcccaagtagctgagatgacaggtgtgtgccaccacacccagctactttttgtatttttagtacagacagggtttcaccatgttgaccaggctggtctcgaactcctggcctcaggtgatccgcctgcctcagcctcccacagtgttgggactacagatgtgagtcacctacccagcctaaagacaatttctctctgtaagagttatgtctagtccaaattaaaagattgaaaacaaattattaatacattataagtgttatagttacatacaagatgttatgagaataactacccatgtgaatgatatcacttaatattataccaccaccaatgatttctcaaaaatcttttttacacattataaaccagctagtttattattttgtagtaagatatagatcttttaccatgcagactgaaatacctatgtcttcatgaacagtacttttcttcctagaggcagttacatggaaaaccaggttattatcaggttatttaatgagtgtgaaatcccaacaagaggagactaactttaagacctataactcatccatgaaggctgggggcacagtttcccaccacgggaacaccttagcctccagaaagcttattgactcttctctcctcatcttggtctggctgagcactgtcactggtcagtcacttcctgcagccatacagtctggccagcttggcctaagagctgtatctctgctcactggtttgtgttgtcactgccactgttactaacagttaaggttctgaagggggtacgtcagttgctcccatgtaccaactaggagacacaataatcctgttagtttgtcctcccaaacccactcaagtttatcaggtaatatgcttcgtaaggttctttccaaccctgttagcatgtgcatagattacctataaattgacctaatgtaacctacttcctactgaggattgaggttttaaggttttgttttcccactttcttgatcagtgattaccaaccatgtaggagttaatgaaaccaattctgtatcaccactgcaaccaagacagagataccaagtgatatgtatttttcaaatcaatagtattttattctctataatgtaaaaaacaagtagatgcagtcctcaacttagtactcaatactaggaagggtcaatttgtcaaaaaacgtctttcaacagtagaaaatgttgctttccaattaaaaaacaaaactgatattgcaatcgtgtaataatgataaaattacagaaaaaaacatgttcggactgagccacagcattcacaccacaccagaattttgcctgtaacgaaacagtgaattttgtctcaaaaagtaggttaggttcatgctggctagaaacttccatcccagacccaataaatgaggatgaaatacatagtgcatgcttaacagacattgcatatacatcaaccattctttaatgcccctcactagggttttgagggatggagggatgaaatgtggatggacatgtgcactcacaaaggcagaattttcttccaattataaaaattcatacatgtgaccctttactatgtcttgggcaatagctaagattttatctgtgggaatccacctttgaaaatcacaacaaaaatcaataggaaatgatttaactaatataaaatataaaaatttcttaggatgaggactttcacagaaaaggaagaaggggacaacaataaaaatgaatttttggccgggcatggtggctcacgcctgtaatcccaacactttgggaggccgaggtgggcagatcacctgaggtcaggagttcgaggccagcctggccaacatggtcaaaccccatctctactaaaaaactgtgcgtggtggcacatgcctatagtcccagctactcggaaggcttaggcaggaaaaccgcttgaacctgggagggagagattacagtgagccaagatcgtgccactgcattccagcctgggcaatagagtgagactatctcaaaaaaaaaaaaaaaaaagaattctcttaaaaaataacattccccttattttgtccccttattttgaccaacactcaaaaataaatctgtacaaaactaggaacacagaaaagaaccagagaggatgttacgttgtaaagtcttaggacctaccctaaacttctgccctcatcaagaccctcatctacagatttgcctttcgtgaacttcaaaacctgattggctcgctctccccagtaaaaaatctttagtattttaaggaaaggtacagttaacaatttcttacccaaaatatttgatgctagatgtgacattttttggattttaggaagataatgtggtgagtatatctgtttatgtaacacccccagtgggtcctgggcagcaacccataatcaaatgtactaatatttccattaagtgagatgaatggggactataaagcttcacatcaattttggccaccaaattttgttactaaaacttttgcttttcagagccctttggatttctgaattgcagaccacggatcgcggacctgtatgagaaaagtggggactcagtgctacagcctgtgaaagatgcatcttctgttatctagtctcaactcattcagcccaacactcgctctgattgtagaagtcataaagctaatttcaattcagaatagagcatatgatcatatttgatcgcagatacacactccaggagtgaaagttctctaatgctatgtcttaaagacatggtgcctaaggggctggggttgttttaaccccaggagggaaatgttataaacccagtttgcaaagatttaaagaatatcaagaagtatgtgggtcatctaggtagaagtaatatcaatagagctggcaaaaatgcacttctcagtacattttaaaggttgcctctaggcccaaacatttcttaatctctcttggaagaatactggcggcaagtgaccaaaaggctgtggtttcagaacttaactgtaaaactgctgagtttattgatacatagctggttcaggataaattttatctatctacctatttatttatgtttaatatataatatatttatatgtattatatattttttcaactttgtggtataatgaattatgtgtaatgtctgagctcatatcgcataccactgagggcaagtagcaatttccataaagtgacagataagcggttttagggggaaaaatgctgccaaggatgattcatttgaaatcagccttgacagttttcctgctgatgaggctgatggaaggactagaacaaaggttaaattctttacttctaggaaactgtgctctgtgtttaaggcttggtcctctgagctctgctagtccatcaagactagcatgtggatacaagatctacagtcagactaaccatgtagagcttttgatagaaaaaggaatttctccacagttctacaaacagtgcaattgataatgcatgtcaatttaatgatgtaaactgtaaatgtaaattccacattaatccctaaaaataatggtttaacaatcattatcaccatctcgctcagtaaccctatcaccagaaccaccaaaatgtagaagttggctgatttgacctcctgtatgccttttcagcctctttctggaaacatacaggctgaaacatagctctagagcaaaagcaggtgagcaatttaagggacacatgtactctgagtcattggaagttggctattttgaacatttcatcaactgctttcacataatactaaacccttcttagtaactaatacaggttactgtgtgctatggatagcatacctgagcttcagtaactttattttttgatgttaaactcacattacatcagcatgctatagattcccatcttcatcacactaaaataattattgcctgtttaatatcacataatgctgtgcgggtgccacagaaaataaggatactcaggtcctgccttttgggacctaacaattttctacagataatgacaatgacaacacagagagacacataagtcatatgataaacaattgcatgaactaggtaaagcatcatattaagaacaaataaaagagttagcttaggtagtttttttttaaatgagtaaagaggcaattatagaagcaaaccacaggagaatcactggcttttaaatgagcttaattaattatttaattaagacagtgtttcctggaggaggacaaatccagaaattttgcagatttggtaactgcagaataactaaaatcctagcatgggaaaaatattccaggactcctatcatttttatccccaaactttacaagaaatggcatcagaactaaagtcctgcaaattttgttggatttacgttttgccttcagccacatgtcagtaagatcagatgtgctatttatattgtgattagtgccaggattttgctcaaatgtatactgaactcaggcttgtgactatgctcattactatagaaaatgagcactaacacattatatcaatggacgcatttaaacagcatccgtaggacaattaaagtcaatggactctgaaagcaaactattatgaagccatgtttatgcaagcatgtctaaataggtggggttcaagcatttattttgtctgttttgttcagagtgaagtgaattaacaaaagatgggcttatctctgaagtctgcctcactagtggcctattgatacaactgaagcccaccaaaatcaacccctttagcttgggaagtgaactattttggctagaaactgttagatttttctggaaatttcacactttaaaagaaaatctttgagaaagacacatgagaaagacatctaactacaaagtggttgagtttgccctgctgtcactcttgctctcttgcaagcaaatgcgtatctgaggtttgagctgaaaactcacttctgtggggtgattttcatagatatggaacttactatcacaatgcctaagaaatgtggttttcaggagataaggatgaaaatccactggattgcaagctgtcatctatgctttagaatatgagaagtaaaatgctgttaaacagaggagatcttcaaagagctaccttagtatgggaatgctcaccagagttttcaaaccacagacacacaaatctgcaaaagtgaaagccttccaaaaaatcaaaaggctcagggagaattgttctgacagaattcagctcttacaagtcaatctgaggctgaattatactcttaaaatgcagagttagaatcctcctgcaaggcacttttcctaagccttgggtaggattttattatagggtactacaatgttctgtctttaaaacttcagctagactacatatttattcagtcattcagccatcaaatgcttactggatgccagcattggagatgcaaaatgaatatgctatggcccctgaacttctcgagtctgatagaaaggacaagcacatagagaatctcaatggtgtgcaataaatacagggtgatattagaaaaggaacactcactttaatttggaaaagcatcatcaaaaggaagaaatagaagggtagtccaggcaatgaaaatggcatttaaaaaggcatggaggtagagaaaggaaagcactttggggtcatggcaaaacagctcaaaatgagcagatgtgggtagagagataggctgaagcctgatgaccagagtctttgaatatcatattttgaattttggattttaccctgaaactaatagagaagaattctttgatagatattaaacagaaataaaatgatcagaactacagaaggacaatgttctggggcagtatgatatagtgtccgtaaaacaattggatgtttaattcgccaaagtaggttgtgagaaaagttacatttgtgttcttggaagagaaattaaccctcttcaaatggatgactggatccttttctcagtagttgctctccttgtacttaggacttccaaccaagggaagttgaaggagaaggtgtcactctcaggcaccatctgagcattattgagagtacttgagaacttgtggctatcacctttcaattgaatacatgtcatgtgggcacttccagctctgctggcagtagccaacgcagatccaagaaaagggcagtaacaataagaattgcctacactgtcatgggagttattaaagagctgactgggaaagttatttaatacatctgctcctattctttcatcttgttcaaattgtgcctgcatcaaatgtaaacttctgctttagttattctgctagtcagccatcttctttcaacataatcagtatttttcttctttgaatataatcttatttttccaaatgaaatgtttttgttattaaatgtttttgttttattactttaaaaaagtaaattttatttatttaattccttgaactggtagcacattcacatagttcaagcatcaaaaagtataaaaagatatacagcaatgtctcctttcctcccttattctctatctgcctatctccaaaaaacaggtaaccaatattatcagtttctcatttacacttcccaagatttaaaaaacatatatgcaagccagtacaagtatattttctcttctttttttaactcccattgcagtacacattggcactttgcagtacacattggcactcttttctcccctacttaaaaataaatcttggaggctagatgcagtggtttacacctatgatcccagcactttgggaagctgaggcaagcagatcactggaggtcaggagttcgagaccagcctgaccaacatggtgaaaccccgtctctactaaaaatacaaaaaattagccaggtgtggtggtgcacacctgtaatcccagctactcaggaggctgaggcaggcaaatcacttgaacccagaggcagaggttgcagtgagctgagatcgcaccactggactccagcctgggtgacagaacaagactctgtctcaaaataataataataataaatattggagattgtattagtcagctcagactgccataacaaaatactatagattgggtggcttaaacaatggaaattaattttcttacagttctggaggctgaaagtccaagatcagggcaccagcatggtcagattctggtgagggctctcttcctggttttcagatggctttcttctcactatgtcctaacatgcagatagagaaccagcaagctttctggcatctaatcttataaaggcactaatcacatcatgagagtcccaccctcataacctcatctaaccccagttacatcccaaaggcctcatctccaaatatcatcatcatattgagggttaggacttaaacacatgagttttgagggagacatgaacattcatttcttaatagagatctttccatatagacatataaagagcttccctattcttttttacagttgcacagtatactactgtggcatcaaatacccttaatgtcaaaactgggaaaactgaagctgtccttaatcatttttttgctaataggatctgcagaaacaaagttagagagctagagtcctagagactgaaaggtgatgtttctgatgaggttagacataaactggaattatattctgatgactggtgaaaaagtattaaaagtcaggcaacatgttcagtgtatattcattagcatgtcattagatcctcaaaatttcagcattctgaatcaaatacggttgaattttctaatatgaagatggtgactgcatttgaaaatgcaaattaatagacatacgctatgaaatgtatttttgtcatgtcactacttataaacaatagtcaacttgcacccagctgttacttaccaggcatgttatacaggccattctagccattctaaacatgtttagtggaagttctgagaaaatgttagcacagaagatttagtggtctttgtgaataaagttaaaatggttattcagaccagaaaagggaaagaactaaggaacaaagaagggaaaaacagtatgaccacaaaatacgtttggataaccctactgaaagcaaaaataatagggtgtgtgctattccagcagcctgaactatcactacctgaaggaagagaaggcagagacagagtaaatgtctgtaaaatatggctgaaattagattcagggataaggagggaaaaatcaatcatggaattagggtttcaagcctaggtgactcagtaaaagagtaacactgttggctgagataaggtggaagatatttggagtggggtaagagtttattttactatacattttctttgggggctagtgggacatctaggttaaaattatcagcaggcaattaacagaggttgaagaaaagaatttgttggtggtttcaaggagtatttatgagaatcagagagagagggagagaaggaaggacagaatgatagagaccacccacatttagagatagaagggaaaagatggacattgaaggaaagaggaatggttaaagggagaggaggcaaatcaaggtaatgaggttacaaaaaccaaggaaggaggatgtagttaactgtgtcaaatactggaagataaagttatgaacccctaacatagtattttaggagacagaatcagattttaagacattaggtaatgagttgaacagtgatatagtaaaattaaaaaatattttatattgatggttttttgaaatgatcacggagggaagaagaaagacaggattatgatattattccatatttatattctacttcagagtaacagagcactttcccaaatatgatctcatttgatactgtttcaagaggtaggcttgtggtggataagtggagaaagatgcaatgaagagagatagttgaaaatgcaaatagaagatgaaggaatgaatgaagttagttttctaaggaggtagactagggaagaatttagtgctggaaaagactaggaatacctctaattttgagacagaaaagaagaaaaagtgagttcatgaaaatataggaacaatttgaggtaaaaatagtttagaaagattcatgactaaaagacctgaaagtaatcaaggtaaccttgaattgagggctgaactgacaggagaaatgtgaaatgagtgggaaaataatgatgttggcataaaaagtcaaaacactgactcttcacccagtcacaagctctccgtatctctaacacagtatgatagttctcccactaatgtaatgatgagtggtcattgaaccactggagacaagggcaaacagttcaatgtcttaaataaacccagcaaagccattaagcaaagttcattcactatacaatccaatttataagtctgctttgagtaccactcccccaagcccatgctacaggaaggaaaagcattaagcaatctgttaaaataatgctttccaacaggacaagacagcctgcaatttttcaaccaacagggatgttagtctgtggtccagcctctagacactctctttagaaagttctgctttctctaagataatgcccaaatgtttataacttccttctttaaatagtatgcatattaagaaataaatttaagtctgtagtctatgagataacacaagtgggggacaaaattatgataggcctcccttcctggctgggcagtccatgtgacatgtctgctcagggctcatggcatctcagccagacattctgagattctggcctcttggctccttgagccaactctaccattaaaatattaatttctctattataactcattgaaggtgaaggttatgatttttgcttgcccaatacacttccctctcttctaatgacaacagtaacatgtattcttttttttttttttttttttgagacagtcttgctctgttgcctaggctggagtgcagtggtgtgatctccactcactgcaacttctgcctcccaggctcaaatgagcctcccacctcagcctcccaagtagctgggacttcaagtgtgtgccatcatgcccagctagctttttttgtatttctgtagagatgaggtttcactaagttagccaggctggtctcgagctcctaacatgtcgtgtgctcttaattgggccaattatattactccatcttcctggcttggtgattggctcagggaagagtatatgacctaaactgattcaatgcaagtgattgttaggattgttttcaaactgcagacaaagacaaaggaatcctctttctttgctggtagaactgctgttaggatgagatgagagatcatagttgctaggattcatgttccccatggcatggagaaagctcatctgcaaagagaactggaaacatacatcagaaatagagagtataagccctaaaagtgtgcttgccactgagtccagacatccataggaccagctgtccacattctgtgtttgggtgacatcagccagcaaattctctttttttgtgtgatcaagttggaattccgtcatttgcaaagtagcccaacttgtacatagaatgtcttatacttacaaggtgcccaataaacatatattggttatctggttggtttgatgtcagtgttttttctgtatcttttgcttgtgtactttgtactctataccatcattctcaataaggcttgttcaaaacaaagtctgcagtttgcctgtaataactaggtgacctaaccccctatactggcatgaggaatatgtctgtgtttcagtttcctaatttataaaatatggcaaataataatagcagctacttatttagtatctactaaatttcaggtgctggtctaacacttaacatacattatcctaattcttatggcaactttatgagacatgcataatgatcctcattttatggatgaggaagctgagatgcaaatgaggttaaatgaagtgaccaaaataatacagcttgactggcagaattcagattcatactcaggcttgtctgagtctgtgttcttttgaatgtcctatgatgtcctacttattcaaaaagcttttgtgtgtgtaataagataatgcaggtaaaattgctctaaaaatagaaaatgttcagaaatcattctctaattaacaataaaaaaatgcaaaaatggactcaaatattaacaaggaagacttaggttaagtggaacattgtgactacccaaattgcagcattagaaacagtaatagaaaaaaataaatgcagaatctcatataaatgtgaaattttatgaagagggaaagtgcagccaagattctgttccatttctgaaatctcagtaaaactcgaaaggatatagataagcattgctaagctagggagaactagatctcacttctcattttcctcattggaccattgatatcagcacgtggaatttcctttgtgatcctgttgatggacagcatttataaaataatgaacattctgatttacagatctgaatggcaatatcagtaatgtttaaaatgaacaaacatatatacttacactgtctatgtagcattaagatatatataaacctaatttttgtataagtttaacggaaagaaatgtaaggccaagtctatgtgttaaatgacattttgtagtaaaacccttatgtttttcagcttgtaattactctcaaacaatgtcaagggaaccaaccacattatgaactgtctatgtccattttcttcattagactatgagtgctttgggtacagaaactgtgccctacatatcttcttacccctagaatctagcatagataaaacttggcatatgtcacgaagggttgcattatcattttatgggtcctggaaacttttgccttcatgggccccttccttcattaaaaaatatttaaaattatattttatgatcatcctggtatgaaaatgaatatattaatattatatatactttctttgacctaaaattttatctttttcttctgattttaaaataaaaaaatttgttttcttctgattttaaaagactgtttttataggcctctaaaagtattgtgggccccaggtgctatgcctaccttgcttagggataagtcagtcaaatcctatgtgttaaatatatttttgttaactgaatgaaatgaataaatgacttaaagttaagttggtggtagtgattcttaaagcttctattttggagtgactttcagcttaaaaaatttttcaaaagcaaataattaataaaatcaccacaacatactaatattcatttaatctgaagccaactattgaagtttagtactgtaaacaaaattaaaacccaagggcagtgtagaaggctgtcaaagtggcaaaataaatattttaaaataatatcagaggttgctccaatattgaacaaacattgcacacctcttaaatagagaaatttaaatattttctttttaaaattctgacattccaaaagagtcagttcagaaggtagatactttaaaaaatgtgggcttatacttggagccacatggttattgactagaatttagttaagcatgtgcctggaacgctagacctgctgcctttcacaacattgcttttggaactcagcatctctccactgttgcttccagagacagctttttaaaatggaaaattgattgatgaaatcttaggcatgaatacatgccaacgcatctaataaattaaaatactgtcattttataagaaaggtttattggctaactgtgtatttctagtaattcaaagtctagtgtttaatttacataatgaaatgcagaaatcaattacttggtcagtagtaaggtgaaactgatgttcaaaagtatgttttgggatgcaaccaggctggcttatccactgacttaaaatgtagaaggtcatatctgagcagttttttcccccttctgaatgtattgaacaatgtccagaatatgaggaagcatctttgcattgtctggatagggttgtgtgcagattaatatctggataataattcagatttgcccttccaaaaaggatatcacacatataaagtagtgctagtatttataggatgggcatttaccagaacagctcttaaaggctacataataaaattgcattaaggctgcctaacttaattaaacatagctactgaaatgaattcagctaatggattctgcttccccaaagagtactctctcttaataataattttaaaagcaaaaacatgtttttcctcctctttttcataatatgtagccacctgaccaagagtagtgttgggagagagactgtccctaccacccaggagacagcaggagggagaggtcatctagtgatcacactcctgcttctcctctccaagggcaaagggctgcctcagcagctgtcacatcctgctgccctttgaaacagaaaaccagtctagagtttcacacttatctcctgctttgcattaccaaattggcagtcttgctagaccctagtaattgcctttcatagatgaaggaagtgaacgctctagggaatggtgaatggggagggcatttgtgtttgggaaggggcagtacctggttcagctgtctgccatccatcagatggttctgcagatgaaacaagcacagaggaggaagagaacacacaaggtcacttggtctatctcaggcaggcaggcagaatcatatctttgtgcacagtgaaccatagagtcttgtgaggagattgctagtcatacaaaggcacatcatgaaggacttcaaagattcccattgtggactcacaaatcacagttactcaactcaccttctagtcagactagcccctgttttcccacatttcccatacaatgtcctgcttttgccatcttactgctcattagcagttccagcagagggcaggcgggggaaaggagaggagttgtatattatagccaaatatgtcttctgaacgtgttaaggcaaattttctggattacttagagcaacagatgtctttctgtccaattttttttttttttttactgtctatctgtctgtataggtatttctagttttcagggtctcctctttcaaggaatttacaatctggcttgggaaagcaaaatgaagacacatgaaataatgagaaagccatgccataaagccatccctgttattccaagcaaagtcatgggtttgaagagaagaaagagaggtcttcatgcactgaagttggtgatagcatttgtacattaaaaatataaattgaagtcaacaattagtgcagagaagtgagactcagcaaatgggcagatgtaattgttgaaaattctgtaaacaggcttgggtaacagtcccatagagaggacttgtaggcatccagtgagaatgtggtttttgtaggacaaaggtctcactggatctcagtaccaagcctttgccatgatcagctggaatgaaggcgctgggacactgaagcttggttggcattccgggaggaaaaatattcagtatctttccatatcattcattaaggtctgtgtgacaatgtcatgagcaattcactactgggaggtcttcatcagataaacagggctgcaaaattcatggccaaggaatgtggactggagagacactcccagccacagctgctacctgaacacccagagctggctgggaaccaaggagacatgctgaaaccaggagcctcagcgacgagtggcaacgttacagacgcttaatcctgaaatgaaaagtaattgcttctggcttaaagaataaaggaaaaacaagatcagccttggctggattacatttttttaaaatacaaccacgctaaagaccgggttctgctacttgcttggtgtttgaaaatgtgaggaaatggatgttttctgtcaatgtaatttaaatctatccaggagtattgacatataagaacacttgaatgcaagtacattttgatgaatataattaaatcaaatgtgtttacttttagctgtaaaggaggacatctaaaatttaacttacctaatataaatttagaaggtctttcttgaaaatagctcttgctttgtattttgaagcatttcctactgaaaagtcttggccaaagttaccagagctccttttccatacagatgaaactgcaaatggagaaatatggaagcagagagaggggaaaggcattttaatacctctaatctctttctgtgatgaaatagtcttctctagagagaagagaattc

SEQ ID NO: 72 - DNA, 162173 bp, Homo sapiens
gaattcaattcatctaaaattatgttttagacagatacttagtgtcattgtaaaatacttgtgacataatggtaaatattaaaagcagtatttagaagttcatatgaggtatatatggaatgactagaagaaaataaaacaaaatattaatagaggtttttcttcttgagaggtagtattatgggccattgttattttcttcttttttaaaaatgtttttggcatttaaaaaataatggatatatttactttaaatacaggaataataattttaaagtcttaaaatttaaccaagataattattaaaaccaagcgattgcatgttttctaatgctaatattttaagtggtcatatttaatgtccaaattccactttgtctttcctaggtcatccagaaatttatcctttagtattaaccaccaagacccaagaaatatttaactgccgaatagatgaagatgtcacagatgaacaaccttataagcttatcaataaagaagacatttttgaggacctgcgcaacagagctgcagtatctgatttccacccagtcaaaaaaattgtccaggtaagcacaatatccctatttattttcagtcctacctcaagaagttcctggtacataataacaaaagttggagaggttgttggttcaaatctggccccattgctttgggcaagtgctagcttgcccacccctccttgggaatcctgtttgatgatcctctgtgaaaagcaaagttccatcaatgacttgttatctaatcccacacccagaaaagctcatccttgcccagtttttgttttgttttgttttgttttttgaggcagggtttcactcctgtctcccaggctagagacgcaatcatggcgcactgcaacctccgcctcccaggttcaagcaatcctcccgtttcagcctcctgagtaactgggaccacaggcacaggcatgcccaactgatttttgtttttatagagacagggttttgccatgttgctcaagctggtctcaaactcctgagctcaagtgatcttcccgccttggccttccaaaatgctgggattgcaggcatcagccaccgtgctccgcctttgcccagttttaactagaatatgaatctatccttattttctgctttaattgtttaattcataattttggttctgatttatctctatgcatgctacagagcacaataccaaacaaaaactgcttcttttttcctgttagaagtaaaagtgcatgtacatttccctggatgcattatgtttttaagagctttttaaagttaataaaataattttgcaatttggtgttatcagccatagattagcacaatggttatcttctataattggttgattagcgaaatgtgaattttgtgttggcatcaaaataaactgaatgaccattgaacattaacttcctatctcaattatattcttgtaggaatatcctggaaatgagcttctgcttgtttatgacaaagacttcaaatatggacttaacttttatcttattgcaactgaagagggcaaagaaaactatttaaatgtgagcaaaccccaagcccttgtaatttgtttgtttttgttgtggttgtggttgtttttgagataggctcttgctctgtcacccaggctagagtgcagtggcacaatcatggtcactgcaacgtcaatctcccaggcccaagtgatcctcccacctcagccccccaagtagctgagactacaggcgtgcaccaccacgtcaagctaattttgtttattttttgtggagatgaggtctcatatgttgcccaggctgggcaatttgttgattagcagaaggaagcagaagcggtacctctgcggggatccctatacatagtgatgattattcttgttcagctctgtttctttgggacccagatcgggttctggcacctagaatatgtaagcagtaaatgggggatgaactaaatcaagtatctcagggtagcagatttgcccttcgttgacctcgtgagagaggaaacagtgaatctggagtaccgctttccttgttctcttcttgccgtctccacaactttgagtaagttactgagcctctcattggtaaaatggtggcaccattattgcacatttccagggctttcatgaggattcatataggtaaagccctttgttcaaggtgggtaagaaaggtaacagatgtatgagactctctttccaatcttccattcctgtttggtaaaattgaaggaagcaatttgggaggtttgtttaaattgtttgaggatgacagagaggtttgtgtggctgtccaataagcaataagaataaagggaaaccatataattaaaaaaatatctaggctgggcacagtggctcatgcctgtaatcccagcacttcgggaggctgaggcgggatcacttgaggccagaagttccagatgagcctgggtaacatggcaagaccctgccaccgcaaaaaataaaaatattagccaggcatggtagcacgtgcctgtagtcccagctacttgggaggctgagatgggtggatcacttgggccggaaaggtggaggttgcagtgagccatgatcatgcccctgcactccagcctgggtgacagagtgagaccctgtctcaaaaagaaaaaaaaataaaataaaagctaacagtttataattaaaaatcatctttcatttagccttaacattttcaattttatttttatgattgttgttctgtttttaattttttattgtaatgaaatattttaaatgtttagaaaaaactacagagtagtataacaaatatctacacttaattatccagaattttaaaatattaatttttattatatttactttaaaacttttttaacaaaagaaataaatattacagacaatattccactccctctcgtatcctccctaattccattttctttactcctccctataaggaaccattattctaaattgttacatattgttcttgtctgtggttttacactttaccatatatttatgttctacaataatggatcttatagtcttattaacttaacattcacataaaaattgtgtcatttttatactcagtctgcaacttcatttttcaccaaattataaaattctaggatctatcaatatcagtacatttagataccatatatatgtaggtcaaatttgttcattataactgctctatggaattttattttatggttttaccacactgtcatcaatccattcctctattgatattcatttggttgatttttttttttttactattacaaataaagcagcagtgtgtgtatatatatatgtgtgtgtgtgtgtatatatacacatctatatgtagagatgtgtatatatatgtgtatatatatatcagcagtgtgtatatatatatatatatatatatatatacacatccatatgtagagatgtgtatatatatcttttcttgtctactgtctttttcttctttctatatgcttgatacctcttttttctttttcccttttttgctttgtttccttttcataattcaaaagtgtgaattgacaaaaaaaagtaaaaaggtgcttaatgaatttatataaaagtaaagtttgttgcaaaatatatatatatatataaagctataacctaaacttgggcatacattgtagaatgctatttattttactttagcccccagaagtaccagaagaacaagaagaatataaagaacatattcctgaagatgtgtatatttataaaccacctgtctctaaaccatgggtttctttgggcagtgaaaaagaaattgaggaagaatcagttacggaatctacaaagcaggttagagggttatatatgatctgtaatcattacctccctgtagctgaacaacacttattcctgagggattcataaggtttactgtgtttgctatggaggcatagtttttggtgtgttgttttggtttgcttttatagaagaatggtcattgtcttaagtgggtgttatgagttgaattttgtctccaaaaaatggtatgttgaacttctaacctccagcacctcagaatgtgattctatctgaaaatagggtcattgcaggtatagctatttaagatgaggtcatactggagtagggtaggtccctaatccaatacaactggtgtccttgtgataagatggccatgggatgacaaagagacacagggagaatggcatgtaaagaagcaggcagagactggaaagatggatacacaaaccaaggaacacaaggattgctggctgtcaccagaagtcaggacagaaacagggaacagattctccctcagagccttcagaaggaaacaaccctcaaacacatcaatttcaaacttctagcctccacaactgtaagagaataagtttctgttgttttaggccaccccatttgtagtacttggttatggcagctgtaggaagctaatatagtggcattccctctcaaaggaactcctgtgagggggaattgtgtatgagtggtttattaggaaagtgccccagaagagaacatgacaagcgctgaacagggatatggaggaaggcctgccaggctgcactctcaggcaaaagtctgcagagggaaggcttcagccaaacccaaagaggtactctgagtgtaaattatacctcagagttgtcccacacagaagccaaggagaggggtttatgtatccctcctgccagtccaccattagtcaagatgaaactgccagttacttcctgttctttgcacctgctggcaaagtggtcccaatagccctagagcagccctccaaagaggaggagcgggtgctgctcatgtgaatggaaagcatgcagagctggaggtgctcacagaaagtgcacaaagggctctgagtggatctgagcagagtaccaacattgcctacacatcagggacttcattatgttacctttactgtttacatgtgttacagattacatatatgatttctcgaaaacgaagtgaatttggtgcaccaattaagttcagtgaccagaatgcttccagtgtaaaagatgcctatattgaatgtacagcctacccagataaaaattttacccttaaacaacttgaaaaagatgttggcatgcaagtaatcccccaaataaaggacataagcactcagacaaaatggtaagtatgtgatgggtgtatgtaattttatagccagttacagtaaaatctagtaacttccattattattttgagagctctttataataaatagaaatggattaatgatgatgacacatagatctccacagagtaattcaattcaggaagatctaattatattcaataatgcctttaaaaatcataacaggaaaatgagatagaagtatggaagattgtaaagactggagtgggaaaatgagtgatgctgtttatcatgacagtgctggtcatctctcatctggcatattaccatgcccctcattgctctgttctactacctaagtcatcattcttaaacatcaaatcagatggtgttacttcattgtctaggtttcttctttggctttcatcacttaaaaaatacatccatccagagcccttaggatggcatatgaggttctccttcctctatgacgaggaactgtctgcctctccagtcccatcatcccttgttcctaaacaagctctctgtgtgccagccctatgagttgcttccagttcccagaatacctgcggttccacctcctcctgccattgcccatgctgaatcttcctcctctcagtaagtggtaatgatattgttctaattactcagaccaaaagccttggattttgttgggtctatcttcaaaatttacccactgctattaccttagaccattcatcatcatctcctgcttggattactgtaattccttctaagtgggcttcctctagccatcctttctctcctgcattcagttctccatagagaagccctggtaatcctattaaaatgcaagtcagatcatgtcactgatcaaaaccttccaatggcctgtcatcccaaatgaacctacaaggcttcatatgatctagatccctttacccctctgccctaatctcccacagttctccctgctcatccatccagccacactggcttcctcattccttgattcaccacgcatactcatacctgatgtgtttaagcttacgagtcctttacatagaatgctcttcccttgtgcttatcccctccttcattcagatctctgctcaaatgaggtgttccctgacactcctatataaaagcaacaacttggccgggcaccgtgactcacgcctttaatcccagcactttgggaggctgaggtgggctgatcacgaggtcaagagatcgagaccatcctggccaacacggtgaaaccccgtctttactaaaaatacgcaaattagccaggcgtggtgacgtgtgcctgtaatcccagctacttgggaggctgagacaggagaattgcttgaacccgcgaggtagaggttgcagtgagccaagatagtgccactgcactccagcctggtgatagagctagactccatctcaaaaaaaaaaaaaaaaaaaaaaaaagaaagaaagaaaaaaaaaggcaacaactccattaccatctatccccttactctatttttctccactgtgccataatcacttgatttgtgtttttcgtcatctctcttctcttcactctgcccttggaatttaagctctatgagataaaaactttgtatattttgtttactgctatgttcccaactcctaggacagttcctggcatatatttattaaatggaggggaaaaaagaatggaggagggaaaacaggaagaaaaggatgtaggtaaggaagaatgtgcagaatgatgacagacttgaattcagtgttaagtgaagagctatgaaatacacagtgagacaagtcatgaccaggagaatcagggctcagcaccatggaatgcaatacagaagatacttttcagatctatgtgaactaacaggttaaaaaccatgaaagtgcaatgttaaagtcagggcatatatatatatggactccaaaagttgggccaagaaatgagtcagaaacaagagaagaagatgaacagacaggccaaaacaagaggcggtaaagagaaaggcaagaattggtggtcaagtcctggcagggaaggaggacatcagacatccataaatatcaagaagtgagggcaagagaggaaggagagaggtgatatattagtaccaaatgaacttgaattttgagacaaatttctaagtcaagccagccagagatttattttatgttcctactagggtacagacaagtaccaagaatgagtcagccagggtagactcagtaggtagactcagaatacagactaataataataatattggcagtgttcctacatagagggagtaaacagatgagaaataagggcaggtcttgacccacaaaatgaaaaaacaattttttcaaagaattaaaaggaactcaagtggtttaaacctaggtgactgggagaatgctggtaccatgcattacaagcaggaaattgggaagggtagctggtatgaggtagagaaagtaggatatgtgattatattggagggagtcaagaaaaatcaaagatgaagttcaaagaataatgacagtgaaagcaaatgcctagtgttcccaccacataccaggcattcttctaagtgctttacacacatcaattcaatcctcacaagtgctctctgaggtaggcactatccccattttacaaatagagaaactgaagcaaagagaggttaaaaatgaaagcccaatgtttcgggcataatttaaacttgaagcaataatgaatggttttgctgaaaaacaacaaaacaaatcatatttcgaaagtaagagtgactcttaggcatgttgctactttgataaaaccaccaagcaatatatcattttgttttttttttacttaaccctgtctagagagcagaaattaaaaggtgaagctgagaattgaacccaagtctctctggttccaatactaatattatttctttctaccactctgccttctgctatggatactgacctaaacaaggaaaaaaaatgaattattctaaaaactccctttacccctttgtctgattactctccatttaatatattacctctcacagagacattctgcattgtgctgacatttgttcaacaaacacaaatactacataatattttgttgatcatttaaaatgtgctaggcactgtttttaaagttttgcatgtatcaacacattcaatccttacaatgacactatgaactagctacttgaataatttcatttagagatgagaacacaggcacagaaggttagataattggctcaggggtcatatagctagtaaatgatagaaccaggcttcaaagccaggcagccaatcaccagaatccacactcttaatgattgtgccctgtgacttttccaagctctacatgccaagatcaagggctcacccagtctaatacttgagattgataaagcccagaggtacaatgccatatgaggtgttcacatacagaggccactaagagcatactagatggagcaagacttcctgccaccatcactgctgaaatgtatcttattcctagttttgtatgtttagagcagagtttctcaacttcaacaaattgacatttggggctggataattctctttgagggaaggctgtcttgtgctttgtagggtttttaacagcatccctgggatctattcactagacaccagtagcatgtctaggttgtgacaaccaaaaatgtttctagacattgccaaatgtcccatgagggggtgaggtggacactgacttagtgaaatgaagagagagagaaaacaataaagatggcaaaatgttaataattgacgaatctgggtgaagggtgtgtgggaattccttatacccttcttataacttttctataagtttgaaatgatttctaggtaaaaattttacaaaaataagatttttttgattatgttggagagaaattcatgtagcctttgaatagtggtcaatatcagttgtctaggataaagaaaattcaatgtatataatttaaatataaaataatatcctaacatcattgtcacagagacacacttttgacctgttgtggcccatatttgctcttctttgacctaatctttagtattgaattttcttttaatatattaggacatatcctaaaaatgctactacgcaatattatccaagagaattctcagaagaggaaaaagagacactcaaacaatcaaagcctttggttgattttcttaacaatgcatccataaggtaaaaaattgcatattaaattttaaaaataaaacataaaatgtatatgtttacatagaataacaggtctaaataaacaattccatatagggtatctagataaaaagtatgaagacagttgtcagtgtgacacattctacagattctcaatatttatttcctttctattgctaagcaacatcttagccctatcaagctaaggccacatcaaactgtgtgaggagttgagtgtgtgaggatgttttcctaattgcagattaacatttacttgtatttaccatggttacttttacgtaattctttttctccactcctcactcctcttcctcattaactttttataggatgaggagaatgctgtggccattattatgatgataagtatttgcaaaaatatctttgtagatgagaacctgaatttaattcaaatgtctttttggacatttcactcttatcaccaattcctgtgttcctgcactcttactggctttgaaagagaagcatcttcaaaatgccccctaagctgttagtaggaccctgggtagagttctggggcttctaaaccagagaaacagcttgacaagttctcaccaagctgatactagagtttagagaagtggatccactggaggacaagtctgccagttatactcaataggctggtttctatttctttctaaaattaaaaacttggtggtcaagttcatatatagcccaagttaaacttttttatttttaagaaatgtcgttggttctttcatactggattaaatatcctaaaaattccaacaactctcaaacttgttacttatgcctagggagactctggctcaaaaattcagttaatgattcagagagaacattatttgccactcgcaggaaggatgctataatttttgctatacgggcaatgagatagaaacaagaaaacctgagtttcaccctccccttatcaaaatttagtagtcattacaatttttcctgtaagaatattcaaaatgagaagtttgtttacatataatcaatatccagagaaaactagatcttgagggaataaaaaaatgttcaaaataaatccacattgtatattatctttagacctgggcttttattcttccctctgaatttccatgcttataaagaaaagaatagtggacagctttatgattccatccctgagatgtgggaaggagaagccagatctataagaagaaagaggaaaattggcacaggaattataatagcactggcccagagtggataagaaacccatgtttatatcactgcaaacataacttccagctttaaaactgcttaagctttattcaatagtttttaattaaggtaagcctgattttgttctggaagaaagcccttttagaaatgggaaatttctttctcatagaattttatctaaaacaaacttaagggaagcattatttgcaaaagaaggcaatgacatgagatgagagagaggaacttcagggggattcacaaaacaactaagaaaccttcctttcggggttaaaattcctagacaacagttttgctagcctccaatttgttactctcgggagctacatggttccaggaaagcaagaaaccggaaaccagaagaaagatgtgttttcacttcttccgtttgaattacttccccgttctggctaaggaggtagaatcaggaaaccagagcggaagccacgtctttaacttttctcttgagaattcccttctcatttgggcttaaccagaaagaaatatgatttggaaaatgcttactaatgcttctactggaaactgtttaagcctcgagagtccgctacacagggttattcaatgttcagtgtgcttatgaatcacctgaggactcttgttaaaatgcaggttctgactcagtaagtcgggtggagcctgcgactctgcatttctaacagccccaggtcatgttggtggtcactggatcacactttaagtggccaggtcttaggaaaggggtctattttgaaagatgaaatacaagaagaatttaaccaagggaggactcaattaggcaatgactggtagtgtaatgatcaatgacaggggtatcaaacggtgcccttttttatattttaggagtatctgtttttactgtttatattgaactatctaaaggattttttcttattttaagaaattcacaattgagaaccactttttcaacttaccacacctatataaaaccaagaagtttacagttttgatcagtagggtaaaaccttgggtggcattctaattgtgggagggctcttagcaactttgggagtatgcagagctttcagatctaagcataaaaagggacaataactatcatagtaactactttaagacaggagcctgtcaaaccaaggtccctagactattagcaaatgatcctagcactcagatggtatcttaaaggagcaatgttagtatttttagcaggataatttttcattttggggactgtctcatgcattgcaggaggtttggtaatggaattaaacacagtagcacctcccaggcattgtgacaactaaaactacacacacacacacacacacacacacacacacacacacacacttctaaactccaattcttcccttgttcagaatctcttatttgttgttttgaattacatatgtattggggctatcctgttaaggataagtgatcatttagtacagaatatgcctaagaaaactgccatttgtgacagttggggctttccaggaagcaaatgacatcaagttagaggcagacgtttactgaggattacactgtgaaaaataaaggaggaggagacaggaccgggaaggtagagcatcagacaaattctcagcctactcagcaggagctccagagcaaagatgcctgctgtgggagtgctgcacaaggaggactggccaggcccagccatccctgcagctgcatgctcaggcattggcctggagagagtacagccttggcttggaaactgaggcagatcatgaagttgctcgaggttctgagtaacatgccaccatgatgtttttttctcttaagtcatttatttcacatgaggttaatcattatcaccaaatataattgagaattattattttttgttcagtataaatgaaggaggaggagttgctaagatagtcacattattggatactaaaaaccaatatcttaattgctttttttatttttacaaattagtgttgaaatagccctgcagcaaaatgaaatcatgaacacatttattgatgactggaaatacctcgcagaagaagaaggcacctttggggacaagaccgatacccacctgaaagagtaccagtcctttaccgaccttcatagcccaacggagaaaatgattacctgtgtctcatggcatccaactatctatggtgagatggaaatgatggggattcccttttgtgataacattgaaattgtctgttgctttcatatgtaaaattgcaaactagttcaatgtcaataagacaccttccatttgctctgtactcactaggtacctgccatgtgctttccacgccctcactgtcatgtgtcctcccaacaaccctgtaggatacacacctgtcattatctctgtttcacaacaaaaggacccaagctcaactcagggaagtgactcgcccaggtcacccagatggcataaggcagagtctgggttgggcttgggcctgttgctctcccaaggctaaatttcttcctcctaacactgcctttctgattactagacaagagaggaaatgtgcctcctttaaagagctcagcagccaagggaggtaggtagggatgtgcaaagatggaaacatggaaagagagaggtatttgtcctctttcttcctcctttcaccctacactggcccttttctcacaaaaaagaaacaaaacaagattttcttttcttccaaaatcttctgagtcccctgtatattttatactaacagtacatgtcagtttggaccagccagatttcaagtgctaaataagtagcatgtaactagtggcaaccacattagccagcagagctctaagaaaactcttgctctcctgtggacaaagtgtaaatgaagagtggctgtgtagaaaagcaaaagctagagacatctctccatgtatagttgctgccaactttaatttctacatgtgtttccatcagggctaatagctgtgtcggtagccgtgcgactttcttttgaagacagagttcacttttctggtaaattattgctgcagccatcactgattcttttctggagcttctctgatcctatacatcctcaggtaattagggagagttgcctacatagcctaaattttcaaatactactttcatgtatacctttagcagtttttattgcaaagtactttataatcatgtaatgttgtaaacatttataaagttaggctttcttcaatgcagaacttgtcatcattcaatttgagcaaaactaaagtttacaatttgtttattgaacaaatcaacatgctatttttttcaaagattgtaagaggaatgtttaaactatttttaaaacaaactcttttatggactttacttgaatactaattggtcaaatgcaaatagattttagtttcacatgagtttcctcaattccaaggatcactgggtaataaataaaggtgaatgtgtgggagagcactggggagtggtagggactgcggccttggagagtgcattatccatctctaggctggctgccctcttgttgccaggtggtcccattgtcaagagaattgagaaatttggaattttgtatgaaatcgcccaattttaaatagctcaactaaaaccaagccaaaacacacaaaaaccccactcaaaccaaccaaaacacatagcaattcaaataaaatgaggctgaaggctgggtttgctacacagggttctagttttcatggtctgctcaataagagatctgcctagtgggtgggtggtgtatagtgttagattaagttatttcaatgttttaaatataataatattttgtttctaaaaagtattcataattaagactttccctaaaaaaccctagcctccccttcttcctttccccaattcatttgaattaaggtagttttactgtaatagattctagatactttaatgattatagacccagagatcaaattgaaagatctctagccctttcttgtcagccacaaaaacagagccactctctcactagagttttctaacctttctaccctgtagatctcctctccactccaggagtgcctggctcagtattcagcaagcaacaaaacagacacagatcctgtcctcacagagcttcccttccatggttttcaggaacactaatttcatagtctttttgttataaacattgtaacatgctcccaaaataactacaatttgtttccactgaggggtgggttggggaatacctgggtccccttgagaacatactcactgtcactcgtatggccaatgtgcacaataaaattaagcaaaagcagcttttagtccagaggcagaactctgagaatagactctctacgcaccttgcttatagatagctataaaattagacttttaactgtcttaatattattttctcgccatgatcttaatctcttttctcattctttcatgaatttgctgggtttactttagttaatgctggagagcccagatgacatcttctgcttcaagttctgtccgagtgatcctaatatcattgctggaggctgtatcaatgggcaggtacttaacagaatttttttcagctatgtattaatgtagacaacctttggtaataagttttgacttggcagttccttggacttaaggattcaattcagcagaaggaaggcatgccaattgtgtgccagacaccacaccaggaagcagggtatagagacgtgttacacacggtatcagctcctgaggtgttcacggggtaacccagcttcaaaactgaaacagaattgggtgaaatctatttgtgttgctgggactgaaccacatattgtataagattccatggaagaacaaaagctacaagcattactacctcttggaaaaaaaggcctcttctgaaatttccttgggagtaggagttaggggatgatccagaacttaaacagaaattcactagaaagcatacacacatcactgaatttataggcagatatatgtgtgtatatatatatatagatagattatatatatatataaagattatatataaagattatatataaagattatatatatatatatgtatctcaataccgtttgcttttatcttctttttaagttatctaatatcaaatttagatcctatcctccaatatcctgtttctctagtgaagcaaaacaatcataaagctgttttatggtcaaggtttaaattcattgtgattcagtgggtttgaccatcaaaagggtatatgatttttgtgtgtgtggtttgaaaaacttccttgtggttaaaatgtaaatgtctgcagcttccatgtccatttatccagaaccaaaataaccaggaaaacaattttttctccctcagttttgttcaacaataactgagggtcataatgactcaaagcccatcctccaagccctgcaaatcccgaaatgcctttttcactcattacaaaggtaatgtgactttattttagaatatttcagaaaagcacatgatgaaaataaaatcacttacaattctgtactcctgacattttgttaaaactttagtgtactgaaataccttttagtctttggaaacctaatttagtgttatatatctaccttatcctgacttgtttttaaaaaatggccttctagatacataagaattcagagttggctgtaatagtcaattaaatagaaataatcacttcccagccttctttggacagtcgggtgtttgtactcaattctggagtatgggctgttttttcctgggtccaaagcaactgtccctacaatcatagcacacctccaaaaacaggaagaacttttcctaaagcaaagggaattgcatgacatttattttggattttttaaaaatactggcctttattaatgtaagcacaaaaatgaaagtgctaaagatacttttacagagaagaaaacattctttttatattagctttaaaaattgctgacttacttaagatataagctacatttgattatcccctaaggtgattgacttatcaggctacaaaccaatagttaaaagaaaattaagactcaattagatattttctgaaaaggttatgataacatttatttccattttagattgtcatgtgggatatcaccgcacatgcagatcgcatagaaaacattaaggcaggtggtagtagaagtaaaagagccacactgaaggtaagctttttacaacatttcacttgcaagttttttccattgaagagtttatggaaaagtacataatatagttgccaaggctaataaaaactcaagagaaaaaaggaaaaaaaaaaagaatgttatttcccaagccttcacctgtgcttgtgaacatgttctgaatcacttttatgtgggcccttgattaaaacacaatgaatcaagttgcaccatctacccaaggatatgaagttctgtctggttgttattgttaaatgaaatgaagggaccaagtgacttgcctaaagtgaggtgattgaaagagcactggacagaagagcggatacccaggctgtggaccgtagtcctgtgagtttggacatgccacctcacctcagcacgatagcttttctcatgtataaaatgaaggggttacatcatatttgatgataatataccatgattttgtggggctatggattctgttaagagggttgagaagattactccatacctacccaccatattatgcatctactccagcccagttcttcagccttaacatcaacaagtctcttaccaaagaatggtgagatgcagccttctataggcacaaagaaatactccttctaaaatgagatgtctcattgattctttatggagtaggtcaataatacttgttaagtttagagaaatagtcttagaccaaactgaagggaaaagtagataatcctattacctaaatatatgatatagagaaacactaatttatgtttttccttgaactggtatatctctaaattgttcattttaattgagatgatgagtaaagtatgagttcattcatcagccctctgaaattagcacttaactttcttttaatatttttcagcctatgtttctccttgaaccggagagtaataaagaagcaatgtatatcagacactgtgcagtctcttcaatagaaaatggacataagaaagtaattacagatatacactggttgtctgacacatttgaggtgagacttgatggccttatacttttctcctgctgaattacacattttcagattttatgcaaagaagatgtttcaagtcaacaattcatttacacttaaattgtgaaataaccaggaactaagcatcaaaaaatggggttactgttgccagaccagtatctgagttggagtaagaataaggccaatctttcaactcagttggcttctaactaaaaaatgtgggtggtgtcaacactggtataatacaatagtggagaagatgagggcttgatgtgtaaaaatgaactgcaaatattttacacccttagcatgtatgaatttaagatttatgatctcagatatctgggggaagggaaccctaaagatctgtggcataccatgtaattttgctgggcacaatctggaattgagtgtgctgagaggctggtgggtgaaaactagttgtgcagtctgtgagcccagctgactgcccagcttctgcactggtgtttgtctttatggttgtacacttacttgactataacctcacaaagcatgggatctataaatttggaaactggcaagttccccacatgttttcctcaagggcattaaagatctactatgtactttgaataattaacaggtgaaatatcaagaatattctgagaaaatcacaagcattctatacaccaataacagacagagagccaaatcatgagtgaactcccattcacaattgcttcaaagagaataaaatacctaggaatccaacttacaagggaagtgaaggacctcttcaaggagaactacaaaccactgcccaatgaaataaaagaggatacaaacaaatggaagaacattccatgctcatggataggaagaatcaatatcgtgaaaatggccatactgcccaaggtaatttatagattcaatgccatccccatcaggctaccaatgactttcttcacagaattggaaaaaactaaagttcatatggaaccaaaaaagagcccgcattgccaagtcaatcctaagccaaaagaacaaagccggaggcatcacgctacctgacttcaaactatactacaaggctatagtaaccaaaacagcatggtactggtgccaaaacagagatatagatcaatggaacagaacagagcccttagaaataatgccgcatatctacaaccatctgatctttgacaaacctgagaaaaacaagcaatggggaaaggattccctatttaataaatggtgctgggaaaactggctagccatatgtagaaagctgaaactggatcccttccttacaccttatacaaaaattaattcaagatggattaaagacttgcatgttagacctaaaaccatgaaaaccctagaagaaaacctaggcaataccactcaggacataggcatgggcaaggacttcatgcccaaaataccaaaagcaatggcaacaaaagccaaaattgacaaatgggatctaattaaactaaagagcttctgcaaagcaaaagaaactaccatcagagtgaacaggcaacctacaaaatgggagaaaatttttgcaacctactcatctgacaaagggctactatccagaatctacaatgaactcaaacaaatttacaagaaaaaaacaaacaaccccatcaaaaagtggacgaaggatatgaacagacacttctcaaaagaagacatttatgcagccaaaaaacacatgagaaaatgctcatcatcacgggccatcagaaaaatgcaaatcaaaaccacaatgagataccatctcacaccagttagaatggcgatcattaaaaagtcaggaaacaacagatgctggagaggatgtggagaaataggaacacttttacactgttggtgggactgtaaactagttcaaccattgtggaagacagtgtggcgattcctcaaggatctagaactagaaataccatttgacccagccatcccattactgggtatatacccaaaggattataaatcatgctgctataaagacacatgcacacgtatgtttattgcggcactattcacaatagcaaagacttggaaccaactcaaatgtccaacaatgatagactggattaagaaaatgtggcacatatacaccatggaatactatgcaggcataaaaaatgatgagttcatgtcctttgtagggacatggatgaaactggaaaccatcgttctcagcaaactatggcaaggacaaaaaaccaaacaccgcatgttctcacccataggtgggaattgaacaatgagaacacatggacacaggaaggggaacatcacactctggggactgttgtggggtggggggaggaggggggatagcattaggagatatacctaatgctaaatgacgagtgaatgggtgcagcacaccaacatggcacatgtatacatatgtaacaaacctgcacattgtgcacatgtaccctaaaacttaaagtataataataataaaattaaaaaaaaagaaatagcacttgaacataaaaaaaagaatattctgagaaattagagttgtaagaggtgattatcattataccagttttaagaggtattcaaatggatgatgcaaagcaatgatacttttaaaagtcataatgaaccaaaataaatagcccacgtatagtttctgtgatatgttaaaagtttacatataataatgggagttgtaatacaagtaaaggaacttcatatcacttccatttcaacacacaccatgcatgcaatttaactgagatgattttaaatttaaatgaaaataacaggctgggcgcagtggctcacacgcctgtaatcccagcactttgggaggccgaggcgggcagatcacgaggtcaggagatggagaccatcctggctaacatggtgaaagcccgtctctactaaaattacaaaaacaaaattagccgggcgtggtggcgggcgcctgtagtcccagctactccagaggctgaggcgggagaatggtgtgaaccggagaggcggagcttgcagtgagccgagatcgcgccactgcactccagcctgggcgacagagcgagactccatctcaaaaaaaaaaaaaaaaaaaaaaaaaggaaaataacaaatcatacaaaaatacaataaaatcaaaatagagtatcagactctggaatgaagatagttttcaaagatgattaatgttgaaagaaatcagaaaggaatgattgacagattcaaaatatacacatataaatttctaaattaagaaataatgagaggccaggcatggtggctcattcatacctataattccaacactaggaggctgaggcaggaggatgacttggagtttaagaccagcctgggcaacatggcgaaaccccgtatctatgtaaaaacaaacaaacaaaaaattaaataatgagagggataaagagaggttaattaatgggtacaaatatacagttagatagaagaaataagacccagtgtttgacagattagtagggtgactataattaacaataatctattatatattacaaaatagctagaagagaataatttgactgttcctagtataaagaaaataaatattattacttaaggtaatggatagcccaaataccctgatttcatctttaaacattatatgaatgtatcagtatatcacatataccccccaaatatgtccatcggctatgcatcaataaaaaataaaaagtaaagaagaaataacaaaatggaggaaaatatttgtaccaaatatggtaaatataaaaatttttcataaataagcaaaagacatataaaataaaacagtaaatcaacatgaaaatcattcagcctttctaatatcaaagaaattaatagtaaggcaacaataatgtgccattttggatttatttaatttttaaatgaaaaatgtgattaatatgttaaaaagaataaagtggtgaaaccagaacacattgctgatttcaacataaaacttttggaatgcagttagtcaaggtggttcttaagtcatccagattttcaaactgtttgaccagtaattccaattttagagaattcatactaagaaatgatccaatttgtatctctagatacaaaattatatgcataccttgaaaaatcatgtcacagtgtttccatgaaagaagactggaagagaatatacgggagaattatatatgattctaaaatattctgttttccaaacttctataatactgttatgtttttggatttttagtcattaaaacataaaacctcagagcaagcacatctctggggtctctgacttcattatagcagaaaagcctcagtagagagagaggtaacaccatgcaggttctggaatgagtggaagttggtagttcaggccacagagatgtccatcaggtttgtgattgtttggcttctggatgcctgcagacatgacccaggtgccacctataccttccccacccctgttttcacctaacttcatttgctgctagaagccccacctctgtttattattttgctcatcagttctttcaggaggttagagaattgaggaaagtcatgcgtttccctctcagttccagagtggcatcttcacaggttgcctcaaagcctgctgcctgctttgagagctagtgggttggaattttggaccttctaggacctgaggaaccataaaccctcctgtgaatcctctgtgtgcatgcagacttatgcccgtgattacaaaaaggtcaggtcttacaacagtcatggcacacttttatttggcgtctcatttaacacttagcctctttcccattgatcttacctgcttagcaacctcataaaagcctctatgttcgactgcacaattcagtgaaaaactgacagagcctacatttctaataataatgggtaatgaaatggtggtatatcatccgtatattataaaaggattaaaataatttatgaggccgggcgcatggctcatgcctctaatcccagcattttcagaggccgaggtgggtggatcacttgaggccaggggttccaaactagcctggccaacatagcgaaaccccgtctctactaaaaatacaaaaattggctgggcatggtggcacatgcctgtaatcccagctactcaggaggctgacccaggagaatcacttgaacctgggaggctgaggttgcagtgagctgagattgtgccactgtactccaacctggggcacagaatgagatgccttctcaaaataataataataataataataataataataataataataataatttatgaatatataggtaaatgttcaaattatgtggagggaaaaatctcagtataaaaatgtatatgcattctaattactactatgtaaaaatgtttctgtgacaaaagactagacaagaatatgttgcagaattgtatttaattttaaaccttctgtttcacaaacttctgagatagtggtatgtccttttttttttttttttttgggctggagtctcgctctgtcgcccaggctggagtgcgatggcaccatctcggctcactgcatgctccacctcccgggttcacgccgttctcccgcctcagcctctggactagctgggactacaggcgcccaccaccacgcccggctaattttttgtatttttagtagagacaggctttcaccgtgttagccagaatggtctctagctcctgacctcgtgatcctccctgcctcagcctatcagaatgctgggattacaggcgtgagccactgcccccggccggtatgttcttttattaacatttaaaacaaagaagaaaagaatttaaaaggtaaatagctatgagaaaaacaattttatttctctttcatttttgaaaaatagattaacagaatgggctccgtctttgagaatcgaagtggaatatgctgtcaacttgtcacatgttcagcagattggtaagtcttgtttcaaacatttcctaatgtgttttcatacatggtgttttttcttcgatgctcctaaaatcagtgtcttcttctccttaatatttatggtagcaattaaatctaatataactaaatgaaagaatgttatggattgttgctagcttaaaaattgttttatagagttaaatgttatgtaaagaagaattaactaagctttgtggttgataacgttgtatagcattatccatagttcttcttcacattctcatatttgtaaatttgtaatatatgttatttatattcagttttatctaagaattttgaagattacaacatttaattgggaaagcctctttttaaaagtagaagagtttttacatttttattgtatatttataaaaagtgtttttataaacaactcggtagctactttgaagaagatttacttaaataaaattacatctcccagtttatagaactaagaattcgtaatgaaacaggaaatatgaagagtaatatcattatctagcatccaaatgttggacaaactttcccattccaaatcctttgaccccagtggaaacaatgacaccatacgccacagaaaaaggtgtggagtggcagaagaaggcacaagtgatgttagtagcagccatgggccagggatgagggagacatgattaatcctgtgagcatgtgttggggaagattctgtgactacaggcaatgagaattgactgtggctaacttaagggaaagaaataagcttattggaaataaatgtattggatatttatgccaatactctactgagtgctttaatgggttaactatttttatatttgcaacaaccctgaaaaatatttacagatagaaaatatgaggtgcgagattgcgccattgcactctagcctgggcaacaagagtgaaactctgtctcaaaaaaaaaaaaagaaaaagaaaaagaaagaaagaaaagaaaatatgaggctctgaaggcaaattcatattccacctatagctgactaaatatagagtgagttatatgtaacactactgaatgtcctatattgtagctagtaagtaatgacattcctgaatcaaaggaagagctgacttgggccttggaaacagccccagagatttgggtagcaggaacaaatggccagccccttttctctgaatgaatcagtgccaatcattgtgtcccgctgctcaagattcaaattaactggaaggggtgtgcctggctcctactgtatcatgaacccatccctttagccaggaaagaaatgacagagcaccttgagtgacgatcccaacctgactgcatgtaatggagaacggggtggttccccaaagaaccactagaatgccccgtctctactaaaaatacaaaaaattagctgggcatggtggcacatgcctgtagtcccagctactcaggagactgaggcaggagaatcacttgaacccaggaggcggaggtttcagtgagccgagatcatgccactgcactccagcctgggtacttcttgtcttgttgggtgcctactgtgtacaaagcacattatatccaactctgtgtatgttattttcactatatcacttttaagattatgtaactttgatgaaacaccaaaagtgcaagcaatgaaagaaaaaaatagataaattggacttcatcaaaattaaaactttttgagcttccaaagttactaccaataaagtgcaaagacaaccacagaataggaaaaaatatttacaaatcatatatctgataaaagacttgtatccagaatatataaaagaactcttaccatgcaacaataaaaacccaaatgacccaattaaaaagtgaacaaaggttctcagtagatatttccccaaagaagatacacaaatggtcaataagcacataaaaagatgctcaatatcattagctgtcaggggaaggcaaataatgagacctagaatagccaaaacaatcttgtcaaggaagaaaaaagttggaggactcacacttccaaatttctaaactgtctacaaagctatagtaatagagacagatgtactagaactagcataacaatagatacatagatcaatgaaatagacctgagagtccagaaatgaacccatacatctttggccaactgattttcaacaaggatgccaagacaattcaatggataaagaataatcttttcaacaaatggtgctgggacaactggatatccacgtgcaaaatataacgttggattcctatctcaccctatatacaaacgtttaaaatggaataatgacctaaatgtaagagctaaaactagaaaactcttagaagaaaacatagtcacgtatcttcatgactttgaattgaggggtgatttcttagacattacaacaaaagcacaaatgcaacccaaaactacttttgatgaaatacaactttatacccactacaatggctataatcaaaagacaaaaagcaacaagtgttggtgaacgtgcagagatttggataaattgtagtgattacacattgctgatagaatgtaaaaatggtgcagttgctttggaaaacaatctggcagttcctcaaaagattaaacacagagttaccatttaacccagcaattccagtcctagatacacccaagagaaatgcaaacatatacaaatgttcactggcagcatttataatagtgaaaaagctgtggtggggaggtgcagaattcaaatttatttatcaaatgtactgatgagtggatacataaaatgtagtatacccacacaatggaatattcatcagtaaggagtaacgaagtcctgatacgtgccagccacaacacaaatgagccttaaaaacatgctaagagaaaaatggcagttacaaaagaccatatatgattcattttattaaatgtccagcatagtaaaatctatagagctaagaagcagatcagtagttgtctagggctggtgggatggcttgggaaaaactgctaataggaagcaactgctaatctgcatgaggttttttggtgaggtgggagagtgtgatgaaaatcttctaaaattgattgtggtgatggcttcccaactctgtgactatattgaaaaccattgagttatacactttaattggatgaatgttgtagtatatgatttatatctaaataaaacttacatttttaaaagattgcatcaaactcaattctcatatgttattagtcccaagatgagggaggctgttaactcaataaacagtttaattctctaaaatataaagtacaaagctgtcttgtttcataaaaatcttagtttcagatacattaaaatatagccatggtcacaatgctaatatgtagcagcattaatggtagtcctgaggctgcacctcttgtttgtacttaataaaaaatatatataaattttttttagcacaatatgtttttgggatattagaccacagaaacctttaaccccccaaacaacagagaaaaagaaggaggaaagtattgaaattccttttgatgtaccatctacttttttgcatctggatctctcctggaaacctctcactaaggtaagtaatgtggggtttttagtccatcctgcttgcataatacactatttactttgcatgcatagacatacatatacacacactctctaaaagtagagcagctcagattaacacaagactgtacaatttgtgtttattcaaccaataaattccttgattgggaggatttttagttttattttatttttaattgatacatgttattgtatatatttacacagatttactttgtgtaatctgtgtaatacacacatacactgtgtatgatttacacagatttactttggaaagctgacaatgaagaagtatatggttgctgatgtagctgatgtttgcaatatacagaaaaagggagcagaaaaacatttcagtcattctaactgtgccaataacaatgataagtttcagagttcctgggagagcttcaagctctcattattttttaattattatttttggattcagggggtacatgtgcaggtttgtcccatggttatattgtataattttggggtttgggcttctgctgaacccatcacccaggtagtgaacatagtacccaataggtggtttttcaacctttgcctcccttctttccttcccccttacaagttattttgatgcctctttagatccaggtagaaatcaaaatcatcatgaattcaagattgatatttcatgtataaacaagccacaatttccaaatggtgtgtgtaataattatccaatagcatgtcagttgcctgaaaattggttggtgctcaagttagtccagaaaagctaattttcctccctactgtagccaaaattctgcctatcaaaattttgcctatcaatagaaggaactggtattgttccttctgtacgttttttgggatattagaccacggaaagcttgataatacctatgaccaaacagaactgaaaattaactgaatgagaagttgtttgtatttatctcacatagcagagcttgaagaaaagcagttttaatttgagaaaaatatggctatggacaagatatgtgtggaaaatataaatggacttcaaacttgatggctctctttctttagaatgtctagttttaagtttaacttaatacttttcttctgatttataaatatcacaagaattatattattttgtatttgctcccaatggaagagagaacatggaggaataagaatattgctgagataactgggaaataattggaaagagaagattataaatttgggggactgggggtaggatctactgagctatgaatagttcaaacaaacaaccccaaactcatctaagaataattgcatagcatgtggacaaacatcctgaaggagaaagggctgagggagctgtgagggaaaactgtgaagtgtgacagtttctctttccagccaccaggatgcagtgcaggcccagggccttctggaactccagtgcatgtgttcctgagaggacttggaggtggccaagcagatgcaaggtccctgcacaactttctggggtctcatttaactgaatgatttagggaacagggtaacaagtaattattttatattaaaactcttaaggatgtattatggaatacaatacaaggcatttttcagaaagaaaatgacacatgagaatttgggatgtggaaatgtgtcctcagacaagctcctttctgtagctgggtttagaaatgtggtttaggtgctttccatggaggaaagaaactagaaatttgagggaggaaagggaaggaagaaaaaaaaggaggtgggtttccttcaatatgggagcagaagggaaaggcaagaataaattacccaaggataatttcaggatatgtggaaataatctttgctatatgttctcccaaaaggtaaggctgtccaagggtgaaacaagtttagaccactgtccaaccaagataagcctgaatgaagaccatcttctttgcaaaacacaaggtaactgcctttgcttatttaaaaaaaaaaaaaaggccgggcgcggtggctcacgcctgtaatcccagcacttcgggaggctgaggcgggcggatcacgaggtcagcagatcgagatcatcctggctaacacggtgaaaccccgtctctactaaaactacaaaaaattagccgggcttagtggcgggcgcctgtagtcccagctatcccggaggctgaggcaggagaatggcgtgaacccgggaggcagagcttgcagtgagccgagatcgtgccactgtactccagtccgggcaacagagcgagactccatctcaaataaataaataaataaataaataaataaatacatttactaatttgagtgttagtagctgattatgactaacgtgagttactcactaggatagtctaatttgtaaaaagaatacagaaaatcaaaccctccaatgtggaactttataatggcaataatagctattgccaacgcattaaaattgcctatacacaaaaaagattcagttcatttcagcttctcaaaatatttattgagcacatttatgtgtcttcaaaaactcattacattaaaataaaatgaagcccacttaatgaatgttacatgctcaaagaataatgctataggatggaacacatctgaagtctagtaaaataagttatgaagtatcaagaaacaaattaccattctcaattagaatataatttttaaaaataatatttatatggcaccaagataaaactgaataaagaaagaaaactgacttttaaatctatctcaactcaacccacacatctttgctgaaataattgaagggggcacatataagctgtcaaaactattaagataaaggtatgcatgaatatcccacctggagagcaatgcataatgaaaatgttcgagaataactagcaattgaaatatttcccaaacattcgccttatcaaaaggatttccatttatgaatttttcaatgttaaatgatagaatatctaagaaaaacacatacctaatacccagcttgagcaaaatttcactttgaagccatgtgttttattgatataacccaaaacctcatgctaaaaaatactgattcactaaacttttatagacattgtcaaagcattattaaaacattgcatgctgtttctctattagggcctgcttcattctagagggaatctaacgggagttttctccttctccacctctcctcctcttccttcttttcctcctcttttgtatttgatcattggttataatgtatcacattccagccatggttcaggtacggtgctactattgcacatactttcattcatttaacagatatttgtaatttgcttactttgtgctaggccccaggggtacgatggtgagcaaaaacagatgctaatgatcacaacaatctgcaagctgggaatttccattaccattttataattaagaaaaccaaggctgagagaggttaatataacttgtaaaaaggtaactttattaaatgtcctagtattattttttaacctaatgaaaacaggtggccaggaggatgagactacctttatccagtttataggaaggatatcagtatctcttttaaagtgtgaggggtttttattcatttttaacaaccacactgaggtataattgacatacaatgaactgcatattgtcaaagtgtttaatttgatatgctttgacatatgtacacacccatgaaaccatcaacataatcaagataatgaacatattcaccactcccaaaagtttattcatagaggaattccctttgggacacttccctccagcacctccctcactcccaggccacaacggatctactttctgtcactatacattagttttcattatctagaattttatgtaaatcatacagtatatactctttttttttttaagagatgggggctcactctgtcacccaggctggcatggaggggcatgatcatagttcactgcagcgtctaactcctgggctcaagcaatcctcctgtcttagcctcctgagtagccaggactacaagcatgcgccaccacatgcagcaatctggcttcttttaatcagcatgattattttagaattaattcatgttgtctgaatgaatcctttttattacagagtggcatttcattgtatggatacacaacagtggtttatccattcacctgttgataaacatttggatttttagcgtagacctattacaaataaagcttttatgaacattcatgtacaagtctttgtatagacatatgccttcatattttcctgggtacatccctaggaatagaatggttgtattatatggcaggtgtatgttttactttttcagaaactgccaaagcattttccagttttaccagtttacattcccactagcagtgtatggagagttccattttctccacatccttgccaacagttgatatggttaatccttttaatttaaccattctaaaatatacagtcggatctcatttacacttacctaatgacttaagttgtcaagcaaattttcgcatgttttttgccacctgtatatcttccctggttaagtgtctgttcaaatcttttgcccatttatcagttgggttgtttgttttatttttatttttgagacagagtctcgctctgctggccagactggagtgcagtagcatggtctcggcacactgcaacctctgcctctgggttcaagtgattctcatgcctcagccaaccgagtacctgggattataggcatgtgccaccaagcccagctaattttcatatttttagtagagacagggttttgccatgttggccaggctggtctcgaactcctgtcctcaagcaatctgcccaaatcggcctcccaaagttccaggattatggatgtgagccaccacatctggcctgtttgttttcttattattgaattctgagagttcttaatatatcttatatactagttctttctcaggactagtgatatgtgatttttaaatattttctcctagtctgtgatttgttgtctcatctcttagcagtcttttgaaaatcagaagtttttaattttgaggaagtccagcttatcaatttattcttttgtggatcatggttttggtgttgaatttaagaaatgtttgcctagcccacagttgccaatgttttttcctaatttttctagttttatggttttacatttagggctatgatttcttttgagttaatttttgtaattggtatatgttatggatcaaagttcatttttttgtgtatggtattcccacaccatttgttgaatacaccatcctctttctactgaactgctttgcacctttgtcaaaaaacacttgtccatatatatgtgagtctatttctaaactctattctgttccattgacctatctttagagcaatacgacactgttttgattatgctagctttataattagtcttgaaattagatagtgttagttttccaaccttttttttttcaaagtagtttttgactgttgtaagttttttgcttttccatgtgaattttaggaacagcttgttatgcataaaaagctagctgtgattttgactgagattgtattgaatctgtaggtcagtattatgagaattagcgtctaacaaaatgagtcttctaacccataaacacagtatatctgttcgtttatttaggtcgttaatttctcagatatgttttgtattttacagtgtacaggtctttcacctcttttgacaggtttatttctatattcttcatattttttggtgctcttgttaacggtacttaaatttttttaatttccaattgttcactgccagtgtataaaaatacaatttgtatcttttttttttttttttgagaaggagtcttgctctgtcgcccaggctagagtgcagtggtatgaccttggctcactgcacctccatctcctgagttcaggtgattctcctgcctcagcctcccgagtagctgggaccacaggcatgtaccaccacaccaggctaatttttgtatttttagtagagatggggtttcaccatgttggccaggctggtctcgaactcttgacctcaggtaatccacctgccttggcctcccaaagtgctgggattacaggtatgagccaccacgcctggcctacaatttatctttgaatattaattttgtatcctgaaatcttgctaaaatctcttactagttatagtggcttcttttagacatactgagttttctatatagataataatgtcatttgcaaatagagacagttttacttcttttccaatctggatgattatttttttcttacctgattgcactgtgtagagcctccagaatgttaaatgaagtgtgagagtggacatccctgttttgttcctgatctttggaggaaggtcactctatggccatgatctgcctcctgtgtgaatggccagctttcaagactttgagatcaactatggtatttcagatttcctttggtcacactgccgactatccgcccattctgaccagacttggccctgttaactagaatatactcataaggttcttgatcacattttgattcttgatcctgtactggtttctcctttgactgtatcacaagtcctcgctatcccaccattttctcttgaggcctgttgagacttagtgtcagtgtctggtactctgtcactatctaatggccagggaccacccaccctttgtctgccattttaggtccatgacaacccatgctcttctaagtggtcactttaagaaattctgtatttattctgataaggaaacccttgctctaaatgcttttggaattcctctgttggaatagcctttagagcctgacatatattcttctaagcaatgtggcatagcagctatgacggtagattctggagttgatggtctgggtttaaatcccaaagccacaatgtattatttgaccaagttaaattactttacctctctgtaccttagttgtttttttgcttttaaatccatttgaaaatagagtgaggaagatgaggggagtaaataataaagagaactacctcatagggtgttgtgaagatgaaatgagttatacacgaagctctcagaatagcacatagtcaacacacagcaaatgttaactaccatgtgtgagaccttgcataaattacttaatctctctaagcctcagtttactcatccttggaggaggatgaatgcataaccacctggaagttcttgtgaggactgaatgaaatggttcctataaagcacacactttagtgcctggcatgtagtaagcattcaataaatgtcagatgctgttattattactatctcaaaggatgggaaatccatgacctatgaggatgattttgaatctaagtatccaaagttattcccgtcaactctgaataaacatagttaataacgtttttccctagcctcaccttctttgactctatcatagccttccccaaccttttttgcaccagggaccagttttgtggaagataatttctccactgggtggcagggggaggtgggggcaggggggcaggcattagattcccataaggagcgtgcaacctagatcccttgaatgtccagttcacaatagtgttcacgcttctgtgagaatgtaatgctgctgctgtctgacaggacatactgctcaggcagtaatgctctttcgcccacctgctgcttgtctcctgctgtgctgaccagttcctaccaggccacgaaccagtatctgtggcccaggggctgcagacccctgctctaccacattaaatgctattaactcagcctattttcttggagcgcacacttctcttagcatctgtgattttcctatcctgctacttcttccgttattcctcctctatctcctttcctggctccatttcaccttgctgccatctactcatgaatgtaccttgaactttagcttcagctgtgtactttcctcattggtaacacagtctacctgcatggctctaacttttatctctgctgagaattctccatctgactcttgctgtctcctgggtttaaacccaatctaccctatccaagtcaatgtgtccagaacaggattgataacttgagtcattcctgattctctcttcaggcctccacttccagtctctcactcaagttaatcatgttttcctttacatttatcgcacctttgcctcttccttttcattatcagttgtaaccctatagatcagggtcttgtctccccttgtgagaccagaagtctccacacttttaatcttatagccccttgtttaacatttctgagttcagattctcaatgtatgtatatgtatttacaaattatatacatattctacttctctaatatatttgtgtacatgatttaaaaagagaggaacagacattgaaatgtgagtgaagaatttgaaataaatattttaatgattttaattgtatacattaaatgggtacaaaatgcctttttgctcttcctacatgtattataaataatatcttttaatgagaataatgtgattgaatatgcccagtcatgtttgaaatgttggtttacactttgtaatacagctatttaaagatctagttcgatgtttggttcattttgatactcgtttttgatgtcttacttagtgggaaaagatacgtctcaaaacatgtagatccaaaacaaagagagtattggttgactataccaactaaatcatgataatcatttttaagttttgtccagaattatgctaaagttttttttaaatgtaatatgtctttttagtatagctgaagttttattctcctgttttagttttcacttgtctgtttgttggttggttttatggctttttgtttcctcttgggtaatatgactcagaggacatattgaggaagtgtggtagaggagggttttatgagcatatatttctctaccatctttcccaggaattgaatatcatattttcaaaaatctagtaagttacctggaaaaatgtttaggacatagctttaagagaatagaaaagcagcatataaaactaaaataggatattatccagttttttaaaaaaaagtgaatttacaagaaaagtcacaatattttaatattatctctgggagacatgataatggatgattttcgttcttttactcatgcttttctttattctccaaggcttaaataaataacatttattaattttagattacaaaaagacttttaaaacaaggtgacatcaaatacttttaaaaagaaacaggttgccgatgatgtttgtgtttcagcccccgaattacctatgctcttacactatgtgcaggtatagctagagctataatatagcacagtcattgatgtttggtttggaacaaaagagggttcttttgctaaattagaaatctaaaaatgcttggacttatgctcactacattgggaagggaatggggcaaatgcaggtggcaaggggcagaaaatgtaaactgtctatattttaaaagatgtttccctgtaaatatgtacttcttctacccacactcctctgaaagacaaaatgttagcacagagcaaaacagagaaggcagaagaaatgaacccgtatcataatctggaaagtgggatggccaatcttctcaagccaatagatgacttctgcacaaagttctttgtgggaacagaggtaaattgggattatctgcttttaaaattaatacttatttatactaaaatatgttattacaatatctactgtacatttttgctgtgtaaagacataaaagttataccattttcatattttagtatgcttgtttgcattaaacatttttaactctgatacctcatagtttcacctttaaaatgttcctgaacgtatgtggacaaatctgtaaaattgcatactttttaactaataatatattgttcaatctacaaatattcatcaaatacctttatcatttggaagaaaccatactaagtgttagagatttactaagaaactatagtgttttgttgggctaacacaatctagtagaagagacagaaaaaactcactcatttcaaaagataaataacaattggatataataatgataatggctgccattttctaaggacatactgtaataataaccaaagcgagttcacatttactggacattttctatgtatcagtgtctgtgccaagttattttccaaattatatcccatttaatcccagtaatcctgtaaggttggtattattattgccattttataaatgaagaaatgaggctcagaactttatctacagtcatacagaggcagagatgctcttttcactcatgactctcattccctgaaatacagagtatttttcccaggccaagtcaccatgagaagaggccatagctcagtctcaccagaatgcaatcttcatccacactttggtatgaagaggaaagcaatcaattccacaagctctggagaacatgactgtgtctcaggcacagcactgggtgctgggatcagaagtgaatagcatggtccctctctcctcaaggcactttctgcctagtcgaggagcagacacatgataaacaccaacaccagtccagaggccattccgataggaagaaggaggttggggaaggtgacccacaggctgcttggatgttggaggttgagaaggaatctcaaaggtcaggttgagagtagaattccaagcagaagtaacagcctgaacaatatttggagttatgaaagcccagtatttgtctggagttagtgaaatagtttggtgtaagagggaaaggtatgtctagaatgcctggttggaatccaatactgaagagcctttcctgctgtgttaggtaatttgagtttcatttagtaagcaatgcaacactaccaaataaatatgtgctttataacttgggtttcacagcaaagtttaaaaaatttttttaattgtggtaaaatatatgtaacataaaattaatcatcttagccatttttaaatgtacaattcagtggtattaagaaactcctttcccaaaggagttcaataatctgttggaaaagtacattcatattgtacaaccatcaccaccatccatgtccagaacttttcctcatcccaaactgggcgtctgtacgcactaaacactaactccctcttcctttctttccctacccacttgtaaccaccatctactttctgtatctacgaatgtgactattctagatacctcacgtaagtggaattatacaatatttgtccttttgtgcaccaaagtttataaagcaggggaatgacaccatcagaccagatttagaaaaatcagtgactgcaagatcttaaagcagaaattaaagcatgacaccccctgctcaaactcttcagtgacaactcagtacaacatgaataaaatccagactcttcacaccatggcctataagattcgtcccctgcctatctctctgccttatctgcaccaacctccctctcactctggcagctctgttttttccttttttcttttttcttttttttttgagatggaatctcattctgtcacccaggctggagtgtagtggcacgatctcggcttattgcaacctccacctcccaggttcaagcaattcccctgcctcagcctcctgagtagctggaattacaggcgtgtgccaccatgcccagctaatttttttgtatttttagtaaagacagtgtttcaccatgttagccaggctggtcttgaactcctgacctcaggtgatccgctcgccttggactcccaaagtgctgggattacaggcgtgagccactgtgcccggccttttttctcatcctcctaatacaaactcttgcctgcctttggaggccttgccctacttggaatttctttactcatccctcaacagatactcactgcacatttaatatatgccaggcattgctcttggccctgtagatatagcactgaacaaacagacaaaattccctggcctcatggtgttggcagtccattggaaggttctaccaacttgtgacacagctgatccatctactttggatagagatgttcagggaggcatcactgggatctcgactggctggcgtgggctgagggaagggagtggaaccctggagggagagaagacaggcaggcggtgatttcaggtgggccagcccagaaatgaaaagggcctgagcagtggggccaagaatgtcaacacaggggtcagagaagtggagttgggtaacagaattacagaagtggctagagaagggtatagaggtttccagctaggtgactgatgatacgatgagccttcaacacacatttattagattggttccaactagtcctcgttgacttggttcaatttcattgtttcatgtactggctatgagacccaggagatattaataactctcttacaggactttggtgagggctaagggtcacatccataaaactcctaagaacgctggcaaggactgagtgctcaagaagtggtatccgtgagggtgatgtgcaacatggccatagattagcaaaacatgtacccatctgtctgcttccttagactgtgaggatcgtgagtagagagagggcttgtccttggatttggaatttccagcaccaaatacagtccttgtttgttaaatgaattaacacagatgaataaaagctcaggtgggtgaatgagtgaccttgtccccagtgagtttatccttccctttgcataaatcaaatgtgctcttatctccccttcctggctacagatcccaatccatccccattttatacaaactcctgtgtttttctcttctcatccagtgaagaaacaatggaattaggagatcgcatggggtgatctagagcaagtcatttaacctctctcagttttctcatccatccaatgacagcgagggactaattattttctgtaaacttctcccacctctgtaattcatcggttctctctgtctttcccctttgcatgactgtttcttcctcttcttacatcaggtccatttgccttcccctctccttaaaacggccataagacagaataagaatacatatcgcttgctattttatttagattgaactttatgtttcctgttctcaacctgaaaagtagtaattactaccatgtatgcattcatagtccctcattcttgcttattccacaaatatttattaacaattgactttctaatgggctgaaaagtaatcactgaataagatggcctgatccctccctttacggatcaacaacaaaaactttggatgcccagcggttgggactattgtcccagatggagtatctgcagaactatcatgttctccacatcattatatgtggataaaaacacaacaaactcattgtttcttcaatataaaattgagtactcattttgaggctttccctctcccccactggatcaaattacttgattaaattgacttgttgttttgcatttgttttgcttaacagtcaatcttagcacatgagtgtgaagtcttttgtctcttaagttgtcattgtactcatcaggaacctgtaatatttttaggaaggcgaagtgatatacacagattggaaaatggaaaaagaccctgaaactggccgacttatgtgtaagttttgtgattgccctgttattaataagatgttccttttaatttaaactacccaaaggaatctcatgcagtacagagtcaccctggtcttgctaatgggagggaaggctcctaaggtactgactaataaagtgaaggccttgaataagcagcatagtcatcacctgggaacttgctgaaaatacacataaaaatcttagatcctacgccaggccttctgaattggaatctggattttaataacattttccagggtatttgttttcacaccaaaatttgaggagcactgacctatatgttgcttaaatgacggagaaacttgagtgatttaatttaaaaataaaatactgtttcaataattcaataacctggtagttcatctatgtggaaaatctgagtcaatgtgagattataagcaaaatgtaagataatctagaagaccccagcagagtatgggaaaagggactgcaggaccctcctttggggctaggacaggtcgtgtctttatgtctgctgctcccaggacctgggcctctggaaagctgagcagaagcatgtgggtcacatccaggcgggagaaggaactgcagtcaggaatacaggcaccccaataagcaaagctccctatctctagcaggctcagagccttggggttcactacaattataactgctcattttaaacctttgaattttgtcatagtgtgaaaatatattttaatgcatttcacagtttgggataaccataagcaaacgaagaggcagctcctgggactgctaggcccacaaaggcttgcaagaagtcttcagaacaccatgagggagcagtgtggtagagcagctggattctttgcagaagggtatctagtcaatcatgcgagtggaagtgtgagtgactgacaggggagcagggccctctaagaacatagcaattaatatgataaaattcagaaaacattagtataaagtggctggacattgtggtgtggccttgacagccatatgtttttgtggtcatgcctggggcatagggttgtgggcaacaagaaattaggaggattcagttctgcagccaactctcagggagaggaaacccaagcagaatcctcctgttacctgagtaaagagaccagagaagcaggaagaccctgggacctggggcagaggctaaagtgaactcttgatcttagcattagaacctgtaaggcttcccactggcaacaaatggaaggactgtggctcttgtcagaaacctggctgtcattctcagcatttcatctctgtcttcctattcaagttgtctccaagtcctgtcaattctagctcacaaatatttcttgattatcccttcttctcccttgcatcttagaccacgccaccatcctctctcaccagaactgccactgcagcctcctctgcttttaccttcccctaatccattctccccacaacagccagagactctttcagaaatgtcaatcaaattgtctcacttggagacctaaaggactcattacaacacacaacacttagagtgtaatctgaactcctttcttacaaggcccagcatggcctagaccctcctagtccccatttgtttcatgtctcactctaaaatgaccagattgctgtcgggggtgccttcctcaagtgtgtaaaagcactaaacacttctctccttaggactttggtgtgtgttgtttccactgtctggaatgttccttcacaccaaaatcttcccatgttgagctgctattcaggcctacatgatgcatctccacagaagcctttcctgacccttcagtctaaattacaaatcctcttgttattcttacttgtaatattttttccttcacaacacttttcacaatttttacattgtatactttgggatgtgtttattgaaattctatctttcccactggactgtaagctccttgggggcaaaatcatgtttatttactaaccattgtctacccagccagctacagtacctgctattacatattggcaatctataaatatttattgactaattgagtgaattaatgaatgagtaaatgaataacacaaagtattcatttaagcttgaaaaatggccttgatgggatgttccctggacattccataataacagaaggagccatcccttgacagatctattcatcccagctagcctctggttctccactccccgaccccattcatggggccctgtctgtccattggaggtctgtccattcctcactgcaggaatgcaaacagtgttattaaagatgagatggtcttctttcactccaatagcaaagaagccagtgagccaccacaccattcacgacggaactgtccacactattcagagatcacctttctacaacgacattattctcacggttggaggttggaacgtggccatatggaaagaaggtgttatggtaagttgcctgcaaaatggaagcatgagtgtgtgatcttttgttattcagaaagacaagaggaactgttatgttctgacataatagtgcctttgggacactttttagagaaattagaacagatggcagggacaccagcttgtcagcagaaccactgtaatccttttgaaaacacattcatttgtttttccttcctgaggggagaaaacagtttacaagttccttgttctctgaaacttaacagtcttggaatatctactgtgggcagttgacttcactggcattttttgggggtgggggccaaggtctcactgtgtggtccaggctggaatgcagtggcgtgatctctgctcactgcagcctcgacttcccaggctcagttgattctcccatctcagcctcctgagtagctgggacgacaggtgtacgccaccaagcccagcttttttgtgtgtgttttttgtagaaatggggatttcaccatgttgcccaggctggtctcaaacttctgggctcaagtgattcacctgcctcggcctcccgaagtgctgggattacaggtgtgacaccacacctgaacttgacttgcatttttcctcccttggaaatacaagatgggatgcctaattctgattgaagtgcaaggagaaacactgggtttgtcatctttccctctgcaccaggaatatcttggcaggtgcagaaagtgggagtgaataagctgagggtatgtcagcaggcagacccttgcctgtccagggacatacagtagttaaagggaggcagcaagagtgtggtcaggattaggagaggggctggatctaggcagataggagctaaactgccaaaaactagaatgattgataaaatccagtgaagcaagggtgtgggggaatcagtacttttggtgggattgtaagttgacatgtctctttgatgagcaatttgagattatcaaagcctgaaactatatatatatgtgtatatgcatataatatatatgtatatatgcatatgtgtataccaactttgaaatacatgtgtgtatgtacataggcatataatgtggatatatatacacacacatatatatatttcaaagttggtatacatatatacatatataaatgtatatatatttaacctaacagttccacttctgaaactctaacatatacaaatactcaaaaactgtatatttatcattgaaaataatttagaaactacttaaatggtcatcaacaaagaactctgctttatgccaatgtacttctgtatgtttgattttttttttttttacaattagcaagttttgtagttaaagaaaaagaaaaaggaaattcaggcatgattgtccaaagactatgccagggtcaggaatttggttatagaaactcaaggtgctgggagaagtagacaaggagaacaagtttgaaatgtcacctccacagagtccatgaatctgcgacatgctttcttcacaggaaaatctcttatgcatatattggagggtgggagacagctccatgatttagtttagtccctgcagatgtaagtaggcgaaggagcacccctggtcagtagatgaagcctgaagtgggtagaaagcacattctattcttacttttgaaaacctcccaaagaaggcagactaccccatggtagagaaaagagaagatgattgcatgatgctttgatggtctaaaatctcttcctagtgtatttataggtgatcaactgcttccagctgaagtcactttatatgagaatttgccaattctgatgttgattttcaacatgcagtacacagctggaactggcagacttttcatttgttttactctctactgtttactgagctgtttccatgggaagcagatatctgatagcaaaataaaggcataagcagaatgtccttataatctttacttgtctaatgtccaccaatttccacagaaatagtcgtaaggttagaagcagtagtgggtttagaagttggattattagaaacttcaacaacttaattggaatgtttaatattttctgaaaagcaactaaaaatggcttatgaaaacaagaaagaaaagctggtgttatataaaaaccctacaacaaagagaagtaagacttcctgtgggcataattttgttgttatatgatcatagctagcttgagttgtacttaatgaacagcatggtgaatttccctcagataataacaaaatcttctttatttgtctttttaaaaatttgtttaaagactggaccgctccttcagtcatgctgtgcaccaaaaaggtacacctcaggccactggtccctgactcggcccggagttttctacatcggccgagaagatggatacattgatatctgggaccttctggagaaaacccatgaaccagcccagtctcaaaacatttgcataactatgatcacctacatcaaaccctggatcttttcttgtatgttaattctaactaaataagctaagtcattttgggtaactcgggaacatcttgacattcatctgaaaagcctccaatgtttatttcttagttttttgtttttcttcctgctcatcccttcttatcccttcccttctcttcctttccttttcattcttctctcttccctttccttcccatctttcctcttccttttccttctctcttggtctcaaactttggacacaacctgagctcttctcactgttgcctcatcaagaatgatttctgagacacgtgtcaggcagaggctggttttgaactgcacgatgggaacatccttctcttctccgggtcagacaggatgacccggatctttgttatcttttgctgattttttttcccagatagaataaattttgtttctttaattttcattacaaatcatatttttaaatattatatcacttttgtggttctcccctggctaatatcaagcaattctcttcataagataaaatgattatctggagttatatatgtatttaagctttaacctttgaaccaactatgaggaaaaactactatataacaaaacaagcataaattcaatgatgtgtctatagaaacatgatgtatgtcctttgtctccattttttttctgtttcgcccaagtagtaatttctatgtaaatccagtatgtttgcctttttttattttatttttttgcagtgacgtcttgctctgttgcccaggctgaagtgcagtggtgtgatcaatcctcctgcttcagcctcccaaagttctgggattataggggtgaaccactgtaacccacctgccttttttaaaagaagaagtttccctttgtttccaaaggtgtacagcatgaaattctctttctatccatttctcagaaacattagatttggaaactcagtcttcagcatcttgagtgtcacagtcagactactgcttagccatatgtgccacccaagtatcttttcccactttggtgtaaaacattgctttgtacgcctacagggattatgaatccaggattttgcaatttgaagcagacctactaaaaaggaaaagaacacacacacagtgagatagaaaattacaattctcaggccgggcatggtggcttacacctctaatcccagcactttgggaggctgagtgaggtggggagatcacttgagtccaggagttcaaggccaacctgagcaacatggccaagaccctgtctctacaaaaaatacaaaacaaaaattagccgggcatggtgctatgtgcctgtagtcccagctactcaggaagctgaggtgggatgattgattcagcctgggaggttgaggctgcagtgagccatgatcataccactgcattctagcctgggccacagcggggagaccctgtctcaaaaaaaaaaaaaaaaaaaaaaaaagaagaagaagaaggagaagaaaaagattaaaaatctcaaatactttgcatattatacccattttaaatgttcaaaggcagctacttgtttttacaataagacctgtgattctggctacatctttgaaattcttctggatgatggtaccctttagccctttctgtgttcagtgaaaatgaacttcataacttttctttgaaaatctttccatgtgttctccttgctttcttctcaagtatgcccagtgggcccagccacagagagagtcaacttcagccaggagccacattccttatacagtcaccagaaatacaagttttgaggcagcaggggaaccgacaaaggctcagtcttagctttcatttcatcagctggaaaaaatgacttgtacatgtttacatggtccagccatgaacatctgatgaaaatgccaagatcactggaaccacagcaggtcctttgggagaacacaaaacaaaaacatacttcatgtttaactgcttaagatggttttctgtttgctgattttttcctcccatttattttaaaattttcagctaaacagcaatttatagccacagctgattattatggaacactgcatatattagaaattccttggacattaagtcgcccttccaccaatgaggttagtaactaacttatgactttgagaattaatgtgaccagatattgctgagatatgtctttaaaaaaatgttagaaatgacagcatttttgctctgtaagggaacaaaagactcatacagtaaataagaggatgtatttctgttgtatgagttaaatagtttgaagctttaaaaaaaagccccaaacatgacatgggagggaaaccaagtcaatgaagtccagattctgagagaataatgacttggggattcataatcagaaaatgtcatttttcccattgtaaccgaagtgtggggtgctgatttcagtgatacccttccctgagggcccagttgacatgttcatgcatctctccatcacccaccccctccggctcccaacccaacttggagtatagcaggcagcacagctgaactggcggtattctgcaccccccacactgtacccaccacccaagtgtttcaaacaatgttaataatgaggctttaaaaagatcaatgaatagaaatatataaatgtatatacaatgaacattaaacatatagattgcagtctgctgcaagtccaaacatcagcctagttactggcaggcaaaaggctgtctctgccctggttgccttccccaaggtctctgctgactttcctgcttctattctatgcctacactcgaagccctccagggaccaggaattcagctctgcttccagtccctctaggatctacattgatactctcatctgggttttctaagtttgattgatgatatgaaacttcccccagatttagaaggaagaaggaagaaatggggaaaaagcaacccctgaatatttctactacaaaattgcacatttttgcagctctctccttccaaccctactttggaaacctccaagtcacagagccctaaatgttagcacagtagcccctgaattgtaccagctcctctggtagtgggcctgtgaatacaatttccaaattatattcacctaaaagatttaaagtatcacaaaatagataatctacataatgattaggtagatgatcattagataatgatcaagtagattagggaggtagattaggtaggtcgtctacctaattacaagcagcagaaattctaacagagccttgtaaaggtcatgggggcttcctgcctgtcaccctctcatggacttctgtttctaacagatggcaagtgtcaaccactattttgaaagagaagtcaagcatctggaatacgtagaacagcgcaaaaaaattcgtgagcaagaaaagaaagaaatggaactagaaatggcaaagaaaaaagttgtaagttaaatttcagaaatgaaagatgttttcctcgaacaccagtggaaatatatttgtttggcttaatccacagtttccatagaaaagttatactttttcacattcttctcttgttctcatgagagtcaagagggcattcctttgatttcctagctcactgccagttagacacgtagtgagattctgtccaatttaagtttctgaaattttctataatttcaaagtcctttagtacagataccttaattcaaaatttgaatgctttcattatagaattttaatatctggtgaataatgcattaaagaaggtggtgcaaaaagagttgaatatggaatcaagacacgtgggctcaaatcccaactctgccactgactagctgtgagatttggagcaaggctgtcacctttgctgagcttcaggtctcttatcttgaaaatgggaatactaataactaggattactgtaaggctgtcagttaaagaaagtgacaaatagactttcagtaaatagtgctattataattataatgatagatgatagattagatagatgatagatagatagatagatagatagatagatagatagatagatagatagataaatagatatgagggggtagagagaaagaggtgaattttactgtatatgatatgctgaagatatgaaacttgaaatagaggagaatttggtacagggcacatccatcttaaactctgccaaaaaagaacctaagctctaaagcaccccatgctccctttctcagcttctccctgtttgatacgaattctgtgactctgctggtcttcccttgcccactggaattttgggcttctaaatactttgtgaattaggcttttctctctttctcacttgagatcacctcagtctcaatttctgtttccctcttgctccctctctcctttgctcttttgttaccagcatttcatcattgatctcatctgtaggttccgtatagccaaatacatacatcctcaaacacagttactcacatgaggccttcagtctcaaaagcattagcatgtggcactgggcgccgtggctcacacctgtaatcccagcactttgagaggctgaggcaggcagatcacgaggtcaggagttcgagaccagcttgacccacatggagaaaccctgtctctactaaaaatacaaaataagccgggcatggtggcacatacctgtaatcccagctactcgggaggctgaggcaggagaatcacttgaacctgggaggcggaggttatggtgagccgagattgtgccattgcactccatcctgggcaacaagagcgaaactccatctcaaaaaaaaaaaaaaaaaaataaagcattagcatgtggaaatattgtaatgtgctgcattagcaaataaattaacattatcactcattgataaatactaattagtgcaataaaagcagaggatctcatttcaaaacatgtttggtgacaaagtgtaaaagaatgccaattaattaaactttcattgcattccactgctacaaacaaattgatcttagttttgttcttttgcacttaacaaatgttgatttgttgagattctattgtgggagagaatctgccacccttccccttccccagcaattatccacgattattatgagtgtttaaataccatagcaacagctcctaattatctacatcagtgggagcgagtagaattgtggataatccaaaaataatttgcatgtgaaatactttttaaacacctgaatattataataataatatcttaaattgtattatacttttcaatttccaaaacgttcccaacttcttgtaactttatttccatttgatatggtgccctcttttaagtaaagccaccacttctcaaattttctctgcaactatgaatagattgtgggtatgtgaatgaatttgaaagggttcctctgttacattgagaacataaaaaaagtcactaaggaaaaacaactaatgttagtcagaaatgtctccttctaagcaacggctgataaagggggaaatggcaacagtaacaacctcagaagattgcaatggagcttaaatgagttaaaatatttacagcacttagccaataactggcacatagaaagtgttcacatgttcgtccagcaaggctggcctgtgtgagtgctcaccaggtgccaggttgaggctgtacagttcaacacagatttcaggaaaatcatgcacctgtctctttgcaaacataaaatctggaaacagctcactcctcaatggacaataataatcactgctctagttgcatatgaaatgggaattttcctaaccagaatttcagctggagactcagcctgggacagtagtcattgccgtgtgatccacaagctatgccatccatatggactcagaagagggggatttcaaaagaattctgcaacctctaggctattagtcaccctccagtctacataagggaaacaagagttatagggaagaaggccggaaaaagggacttttttttgagagacagtggttggggaccatgtttccccccactccctcctttcccagcacatctgactgcctcctgcccacctgccctcctgccttcctgccctccatccagccctttccagaaaacagcagccaggtcaactattcacaaacagccccttctcatcctttggtatttttagatatcagtgttttatagggatgtcttgtttttcttccccccccagaaaacatatcagaagtcaaaagaacaaatgcaggctgaattaaaaatggactatgagagttatctggaactggaaaagactgttcttatcaaccttggcctaatcaaagtcacagagaaggggtcatacatggaggtgatgtaaaaaagcttcctgaaggggtgttttggggacttcttccctctatttatttttatgtcaggtgaactggcatgctgaacatatatatatataggctcatttatagacttttatttccctgctattaaaacttttgaattttagcaatgagatctatttcagtttttgtaccatgtatgtaccaaattttgtactgaatatgaaagtgttcttttttaatgaatgttttcaataacaaaatttgtattttcctataataatagagaactttggatgtcccttccatcccaatccttgctgtccacacagaggccctcattccaggcagaaggggaaatcaaactgctcctacttatcagcttgcttttggccacctttccaaaaaaagtgcttccccttggccactgtacaaactgtagggccatgtgctaaacaaaatattagcaaatcaaatccagaaatatatatatatatatattttaaagaggttaacacatgaagacaaagttgggtttatccaaggaagataaggttaatttaagagtagaaaataaatcagtgattaatcaaaagagagaaattatgatgccaagtcgatgcagaaaaacatttcataaaagttgacatcaattcatgataataatgatacattcttggcatctacagaaagaattcctgtaatgtgatgaagggcgtgtaaaacaatactacaccaaacatggtacttcatggtgacaagcagaaagctttcccctgagatgtggaacaagacacagctcacaccatcaggtgcctgacatcatgtactgcagttgcctttttgttcccatgctgtttaagcctagcataggcaccaaaaagcaacaacagtatgtgaaactgagacacaaaagagcttggagccagattgtgaaggctcctgtttaccaagctaaggagctggattagaatttatggggaatgaatggaaggtctaaacaggaagttgacccaatcagctttatttttaggaaacaaggaatgaactagagcaggggagagtctcatggcaagaaatcctattaggaggcaggaggaattgttcagggcaaaggattaggatgccctgtactaaagcttaatgtgaagatagaaatcaaaggctggttggatggggaagggaagacaaaggataataccaaggtttataagttagattgctagaggaaagaaaactttgtcggatagattttagctcttaaccacctgtgtgcccttgaacagatgacccagctctgtgaaacagattccccttccatcaagtcaggttgagagaacttaacttgcagcatttatgtaaggggcaaatgagcccctgcagataaggggcctgtgcctggcacatattattgtcatcatgattgaaatatcccagggctcatccttacacttgaacttcttttattctttcttttttctgcactcactttctaggtgcatgcatccactctcaaggctttagatactacctctgtccctgacctggccttctctctaaaatcaagagatgtgtatctatttgaccttttgtatctccacttggatgtttaataggcatctcaaacttaaacatgtccaaaattgagtgcttgatgtttcccttcaaaaaccattcctccagcagtcctcccagccatgatgctgcttggggcaaaagccttaaggtcatccttcatctcctttctttcacaatccacatccaatctgtcagcaagtcctgttgactacacgttcagtatgcatgtgaaacctgatcgcttctcttctccctcactgctaccaccatggtccaagctgcatcatcatcagcttggattttgcagcagcctcctgttctccctgtttctatgttgtcattttcagtcactttcagccacagccagatggtagttttaaatggatgctgtcagatgctgtcatccttctgcccagaatccttcctcaacctcatagtatgatcactcagagtatgttcccaatgcctgtctgtgccctgcaagcccttgtacaggcaggccttccactgtcacctggtcccatccctccttcctctcccctccatcacacccatcccagtcatgctggcctcctgttcaccaaacatgccaggcatcttcctctccctgggcatctgtgcttgctgttcagtactttctccagagatttttctaattttattttcacgagttcactctaaaaaatggtttgtttgtttttaaagacagggcctcactcagttgcacaggctggagtgcagtgatgcaatcatagctcactgcagcctcaagctgttgggcttaagcaatcctcttgcctcaggctcctgagtagctaggactacagacacataccaccacacctgactttaaaaaaatatattgaatgccttctatgtgccagggtctaccattttaaacaggatggtcagggaaggtgacacttgaacaaggcctgaaagaggtgaggggtttcacctgtagtcttctagaagtgtgttccataacccagtctccctctcttcaatgaaaagaagctgggactacagagaacaggtgtgtcataactgagtgtcataaaccatgactggaggctgagcacattgttgtctcaaataaaagcagggtgttgttagcataaaggactggagtaatggatattgaataagtgtctgccttagggttagcaaatataaagcttagtatagtggctagcatacggcaagcagtaaatatgttttgcctgatttacaaatacaaaatggttgtaacattcttgctatagaaactaaacatggggctccttatggttatgatagcagttattattagttcagtgtgatttttgtctttattctttttcttttttcttttttttttttttttttgagatagagtctcactctgttgcccaggctggagtgcagtggctcgttgttggctcactgcaacctctacctcccaggttcaagtgattcccctgcctcagcctcctgagtagctggtattacaggcatgtgccactattcccagctaatttttgtatttttagcagagacagggtttcacatgttggccaggcagatcttgaactcctgacctcaagtgatccacctgcctcggcttcccaaagtgctgggattacaggcatgagctactgctcccagacctggtgtggtgttttcattgtgtgtttataacctcagttttcctgagtctcatcacctgtggccaccgagaggacacataagcagccatagcccaggtttcatgggaccttggcccacttgcttctcaggtatgctagccttctgcagagtgcccccaagtgtgtccagtggccactgggatgaagatggagtcacatatgttcaagcccacaaccaccaggcactcagggatcccttctctcaaaatgctagagctgcctaatggcctgtaacgtgggggaaggtgctgggacaatgcttctgggttagttcaagttcagcgagaagcaaacaccaaggcagtagcagaggtgcaagaagcaaggcagagccttcagagctcatgcaggtctggtacctatggaagaaaagaggaaaggacagaagatgatacgattcatctcagaccactcagcgtggtttaattattcatgatacctctcttggacactaagactttgaaacagacaaactcatagtgatgtctcttccttctctgggatgagttttctctgaggctcttcaaccccttaagctaaggtccttttgtttggcccagaacttccatttggcagacaaggccaggcatgctgaatcccagtaaagaacacagctgagcctcaagcgaggatgctaaccacctgtactgaagatgtaggaatatcaggtgtgaatgcaaatagaattaactggtatgcctccttccaatccccacagctccaaccctttcccctaccacccattgtgagtcgatctgatcttctgaccttaagtcatttggtctggtctacagtgtagtgaaaagacaggggtctttaggtcctggcagacctgagtccaaatcccatcttcatcaccttgggcaaactgcactatcccctaagtcttagatgccttgtctgtaaatggggataataataatacctagcctaccccatacaaagacaatgtatataaagcacctggaatatagttggcgcttaatgaatgttgttgcctgttcttgcttggtcacaggtgtatgtgcacacacagacacacacacacacacacaccagagaaacgtagtgtttcctctttgttctatgtagtaatctctgattttaactttttgttgccactaataataacaggaatgtttcccagactcaaatgcaacttaagcagtgactgtccatgcctggtttaatattagcctttgatcatcttaatatgagaccacaagtgttggacatactatttaacataaaatttaaataaatttgaacagctttcctttttgcagaactgataatgctactcagaaaattgatcattctaatatttgattaatttcaattaaatttaatgatcattcagctttacaaattgctttttatccgccaagaaacatgtaattaaaccagcatattttcaggtcctcagataagcacatcgtgtgtgtgcacttcagatgaaaaggcaattaactccagttggatggtggcctaggtgctcttcacggcttcactaatccagcactgtaaataattaacatctccctgcacccttctaccttggagtgctgcccagggtcggcgctgctccaccgggttgctaagttgccattgccagggcagatctgtgcaactgagcaaggtcctcacaacggaaattaaatatctcagtgaagggctgatgaacccctgtgtggtcaatttcctcctgccatggctgatcagctctctgcgggcacgggctcatgtgaaacagcacacactgtcagagcagaaccctgcacaccagcaaaaccagccttgggagcttattgggaaacgatggatttttaaaagttgtgtaattgcttttaaatgctttcttgttaacaaatatgacataaaaagcatagacggtgagtatgacagataatataggttgtgtttttctacaatgccaatgctccaaacttaaaaagacagaaaataagctttcccaaactcatctgtatatgtgatattctgagatgtttttattcttttttttcttaagaaaaggaagaaagttgtaaaatagaagatttcacattcttccctgtcaactagagatgcattttccagtactttttaggaaccatatttttaagaataataattccctttagagaaaaaaaaaactttagaaaataatgctaagtaaaatctaaaatacagaaagtgtctgctttggctgagaatggtggctcacacctataatcccagcacgttgggaagccgaggcaggtggatcacctgaggtcaggagttcaagaccagcctgcccaatatggtgaaaccctgtctctactaaaaatacaaaaaattagctgggcctggtggtgagcacctgtaatctcagctactcaggaagctgaggcaggagaatcacttgaacctgggaggcggaggttggagtgggccgagattgcaccactgcattccagcctaggcgatgagagcaaaactctgtctcaaaaaaaaaaaaaaaaaaaaaaaagaaaagaaagtgtctactttatttcagcctttgtaaaaaagctaaattaacaattgaattgataccaattgttcatttatagtgaagtttgtatggatctaaatataacaaatataaaacagaggccagtcatggttgctcactcctgtaaccccaagactagcccaggcaacttggcaaaagcccatctctactaaaaatacaaaaaaattagccaggtgtggtggtgtgtgcctgtaatcccatctactccggaggctgaggcacaagagtcgcttgaaccagagaaggagaggttgcagtgagctgagatcgtgccactgtacttcagcctggatgacagagtgagactgtctcaaaaacaaaacaaaacagaataaactcccaattatccagaatcctaacaaccaatagctagaacttcattattttctagttctgcaatgaacatttatgacaacaaaagacaaataagcaactttttattaaggagttatcatcatgtgtagaaccaaattcaaggtccatccaaatgtcagaattcatgtctgcaggactgacagtaatgactgatggtcatcagtataaagacagctcatctcaagctttgtaatgttgggtaaataacctttctgattcatttcttcatccaacaaatggggataataactcccactgcatggaattataaagattaaataagataaaacatatgaaagcactttgtaaagtctaagtggtttaaaaaaatatgtaaaatatatattaaaatattttacatagatgctgaactcctttgggattctgaggtcacttttgaattatcaaaggaagtttaattatatttattgtagtatatttttattacattgtaattcctgatagtgtttaattaacagtcagcttggcctggcttggtggctcatgcctgtaatcccagcactttgggtggccgaggcaggcagatcacctgaagtcaggagttcaacactagcctggccaacatggtgaaaacttgtacctactaaaaaaacagctaaccaagatatccattctcttaccctactagatgaataatttacatgtatttgtagctaattagtttaatagttatgtgggtcctctcagcagatgagaataggaaaaaaataaaaaataaaaacaaatggatcttaaagtctgaaacttagaaaaagggaaaaatattagacctggtcgtatgaaagccacttgtttaaaaggcaggatgacattctgtatgttcctttcaacccatccatgtcaagtagggaaccatgtagccattactcaatcatacattttattttttaagactgttggaattttgtctgcatttctctaacaggcaccttagcatcaggagagggcaaactccagaaaaacacctgggctataagtagggagtacttgtgaggtgtctagttctcagaaatgatatgctgtagacagaatttgaaattaaaaaactgcatcagttcattatgagaatctcaattttaattgattgagagtaacagaaaatctggacagggaggaagatggcagaaaccacttgtgctggtcaaatatccacgtgtacctctgcatttaccagcctcctttgcagtcagattggagcctttaaccgaatcctagccaacaggatgtaggtggaagtgacggaagccactccaggcctgactttaactcatctcatgaaaccttccaacttcatctccccatgctatgtgttccagaggccataatttacaaagtagagaaaagtttctcattctgtatcagacttttcacaagcaggtgataaccctttatcatattaaaccaccgagacttcagggtttatttgttatgccattagctaagcccatcctgatgaacccgggcagactagagagcacgccgtcttactagaacaggtgtgcccaactctcagttggaacccaggatttgaacttaaatctatgcactgttaataagacaccaggaaaattaaaaagccaaagacatcaaaaggaaaaaaacctttcctgaattgaaaatacctgcgtctacagattgaacgagcataaaatattctaagcaaattccaaattatgcagtaagtgggtgaattgagatttacatatcactccaaatcctatgcttttaaattctcagcactgaagccgaagtggtcatttaaaaatcaggcctgaaatccttcacttccctgctcacaacatttcaatggctcctccttgcctcggggattgggtctaatctctttgccttcctgtggcatggccctacttgcttgtaaactcatctcttacagccttgctctcccctacttctgctctagccatttcactccatgctgttctccacacatgctatatcctctcacctctgcttccttgaaaatgatattccctttccctggataaaaagctaccaaaaattcaaaaatggtctatgaattagtatgttatgcagcacaacagcatctatacacatttgaaaaagtattcacatatagtcctcctatggaaaaatgaacagtgctccaggcaaccaaagtaaatatagactaaatgggattacatcaagctaaaaagcttcacagagcgaaggaagcagtcagcaaagtgaagagacaacccacagaatgggagaaaatatttgcaaattaccaatctgacaaaagattaataaccagcatatataaggagctcaaactactgaatagcaaaagaacaatcggattaaaaaatgggcaaaatatctgaataggcatttctcaaaagatgacaaatccaacaggtatatgaaaaaatgatcaacatcactaatcatcagagtaatgcaaatcaaaaccacaatgaaatagcatttcaccccagttaatgtggcttttatcaaaaagacaggcaataatgaatgctggcaaagatgtagagaaagaagaactacgctgctggtgggaatgtaaattagtacaaccactgtggagaacagtttggaggttcctcaaaagactgaaaatagaactaccatatgatccagcaattccaccactgggtagatcctgaaaaggaaggaaatcaatatatcaaagagacatctgcactcccatgtttattgcagccgtattcacaacagccaaaacatggaatcaacctaagtgcctatcgacagatgactggataaagaaaatgtggtacacacagtggaatattatttagccataaaagagaatgaaatcttgccacttgcatcaacatggatggaacttgaggttatgttaaatgaaataaaacaagcacagaaaaatatcacatgtactagttcatttgtgggggctaaaaacgtggatctcatgaagatggagaacagattggttgttaccagagtccaggaaggtgagggggtggtatgggtgaagagaagttgattaatgggtacaaatatatggtttgatagaaaaaataagacctagtgttcaatagattagtggggtgactatagtcaataaaatctatcgtagatttcaaaatagctggaagagaataatgtttctggcataaagaaaagacaaatatttaaggtgatggatattccacgtgtactgattaatctttacaaactacataaatgtattaaatgatcatatgtaccctgaaactacgtacatctatgtgcatcagtagaaatttttgtttaaaaataataaagagtgcttataagaatttgtttagagattataaaaggaattgatcatgtgatattaatagctttaaaagtcacatagagaaatatctgaatcatagtctgggctttggagtcagaattttgagcactcagccacttacagcttcaatcatttaaccatgatgagcttctgctgcagcagaaggaattctcaaaagtggagcaatatttcccattccaccggttcttgccacatcccatcaagagacagactccatttcccctcctctagaaactgggtggcactttgtgatttcctcgaacaacagaatgctgtggaaatgacactgcatctcacctgaagccaggtcatcaagggtgagacagcttccacctggctctctctcactgggcactcaccctgggaacccagccaccattgtgaggcagctcacggagagggagcatggaggtgttccagtcaacagctccaaataaggtttcggcccatggccagtgtcagccaccaggcatgtgagtgaatgaaccttcagatgattccaaccctgagccttcgagctaccccagctgacgcagagcagagcagagatgagctttccctgccttgacctgtccaaatgcacattggtgagtaaagcaaatgctgtcatttattattattattattattattattattttcgaactggagccttgctctgtcacccaggctggagtgcagcagcgtgatctcggctcactgcaacctctgcctcctgggttcaagtgattctcctgcctcagcctcctgagtagctgggattataggctcccgccaccacacccggctaatttttgtattttttgcattctttttttttttttttttttcagtagagacaggctttcaccatgttgggcaggctggtctcaaagtcctgacctcaggttatctgcccacctcagcctcccaaagtgctgggattataagcgtgagccacagcacccggccaatgctgtcatcattttaagccactaggttttgggacggtttattatgtagcagtggataactggaaaaaccacttcacatggctcttgtgaggataaactgagacagaatatataaaatgcccattacatcgtctgaaacatagtagatcctcagtaaatattagttattatacctataatgtgtcaataaccgcttccatctgcacattgccttttcctcttctatagtcaaatctccatttgcctctctttcagcagaatccctgtgactaaatttagggctcatctagataatccgggacaatctccccctcaatatccttagcttaattaaatctatcaaatcctttttgctctataaggtaacattcacaggttccagagattagggcatgaatctctttggggccattatttgggaaattacctcccaaatagtcggtttatttctttctactttgttccaggaaagatgataaggaagtatagtgtatccttgcctttaatacatacaatccagtagacacaataagctgtgtactcaaatacctagaacagaaaacaggaaataagtgctatgtgtcttaaaaattgataaaggtgaaaaaaaaaaaagcctataaatagcagaaacctctagagagtgggattgcagattcaggaccgtatcaaagcaaggccctaggagtttggtgcagctagagtgccggcggggagggcaaaaagcaggtgagttgagttaaaccagcccctacttatataatgaaaggctattagaaactcattgtttatcaccagttttacatatataactttgttttgatgtctgcaaactactgggaagaaaagcaattaaaaagaacaataacaagcaacaaattgaaaaaaaaaaagcaaaattaattacagaacattgtgaatagagctctgtattcatttcctgacagactaccatgaactctgtaccttaaaacaagagaaatttgttctctcacagttctagagaccagaagtttgaaaccagcaaaaccagcagggctagttccatctggaagctccaatggagagagaccccttccttgcctcctccaacttactgtgggcatttgctggctcgtagctgcatcactctaatctctgcttccacctacacattgccttctcctcttctttagtcaaatctccccttgcctccctttcagaagaactcctgtgactacatttaggccccatctagataatccaggaaaatctccccatctcaaaatccttaacttaatctgtcaaatcctttttgccgcataaggtaacattcacaggttccagggattagggcatggacggctttgggaccattattcaggctcctacaacctcataaaaagattccaaagttggagagaaattctaataaagattttacttactagtttattactttatgtggaaaataaaggacaaaacattaataacgggacacataaaggtctgcctccaagggaattgtgtgacttagtaaacagaaaagaaaaaatgttgagtttgtggattaaaaagcaaacttgaaagtgtgcctccttcactttctgctggcaaggaaaaaaaaaaaagagaaaagaaagaacaagaaaaaaataaggttttaaagaaaagaatttaaaaaaaaagaatttaaaaaacacttgacatactttctcaggaaagcaaaagcagcctgcactgtgacttaaacataacagtagtagaaattcactttcattgttatttctctctctattttttggcctataaaggtcaggctcatagaataaggaattcattggtcttcagagcattcaaggaatcagtgggtggggagtgctaaccgagaagctgacaaaagtgttgacttctggtactaaagagagaaaatagataaatgaaaaatgaagcagatgataaaaaaagaaatagaaaaaagagagagaaaatattggccagaacaaaattgtaatgtgcggaagggatctacatgtccatcggtaggaaaatggcaaaatatgttcatcagacaaggacccttcagctgtgatgaggaacattcttcattccaacaagaaaggaagtttacaaattatcaagggaaaaatcaagttgcaaaacaatgtatccaatatgaccccacttgtgtaaaactgtgtatgtgtatttgtactaacattcacatttctctgtatgtatagaaaagtctggaagtgtagccatcaatgtgttcattatgtttacttctgagggatggaatgggagaagggacaagtgtgcaaggcaaagaggggacttttaccagccccagcgtttataaagatcagtacatgactaatctttaacctacactcctcactccatattattttgaagcaaagataaaaattttaatagatctctgttgcttgaatatttttataataggtctttattatttgataatggttgtgtttactgctggaaactgttaatagatgccgtactcctaatagcaatagctgtcatttcctattacagtgtgaggcactgttctttttttaaattcatgtcttacttagattttgtaggtatgtttaataaatttaatacccattaaatttaaatagatgcatctagataatatactttttttttctttttcttattatactttaagttctgggatacatgtgcagaacatgcaggtttgttacataggtatatgcgtgtcctggtggtttgctgcacccatcaacccgtcatctacgttaggtatttctgctaatgctatctgtccccttagcccccaggcccctggcaggccctggtgtataatgctcccctccctgtgtccatgtgttctcattgttcaactcctacttatgagtgagaacaggcagtgtttggttttctgttcctgtgttagtttgctgagaatgatggtttccagcttcatgtccttgcaaagacatgaacccctccttttttatggctgcgcagtattccatggtgtatatgtgccacattttctttacccagtctatgggcatttgggttggttccaagtctgctattgtgaatagtgctgcaataaacatacatgtgcatgtgtctttatagtagaatgatttataatcctttgggtatatacccagtaatggaattgctgggtcaactggtatttctggttctagatccttgaggaattgctacactgtctttcacagtggttgaactaatttacattcccaccaacagtgtaaaagcgttcctatttctccacgtcctctccagcatctgttgtttcctcaccttttaatgatcgccattctaactggtgtgagatggtatctcattgtggttttgatttgcatttctctgacgaccagtgatgatgatgagctttttttcatgtttgttggctgcatagatgtcttcttttgaggagtgtctgttcatatcctttgcccacttttcgatggggttgttttttttcttgtaaaattgtttaaattccttgtggattctggatattagacctttgtcagatgagtatcttgctattacaaattagtctgctatgataacttctgtacaagttttccttacagacatatgcattcatttcttttggataaatatctaggaatggaatgtctggattctgtggtatgtatatgttgactttttaaagataatactaaataaaagtggttgtgccattttacattcccacctgcagtatatgagagtctcatttcttccacattcttgccagtagggtcactgttttcaaatttagccattctaattgctgtgtggtggtatctttttgtggttttaatttgcatttcctaatgactaatgatagtggttaattttcatgtcttcatttgccattcatatatactctttcatgaagtgtttgttcatgtattttgctcattgcagggagcaaggggagtgtttttttaattattattgaggttttggaattttttatacatcccagatgccagccattatcagatatatgcaaatatatactcccaatgtggttcatcttcttattctctcaacagggtctttcaaagtgcagaagtttgtaaatttgatgaagttcagtttattaaaaaaaaaaaattttatgtatcatgtttttggtgaccaatctgagaaatctgtgcataatccaaggttttcttctagaagttttatacttttaggctttacatttaggtctattatgtattttgagttcacttttacatatggtatgagatgtggatcaaagcatttttttcatgcaaatattttattgttgcagcaccatttgttgaaaagactattctttcttcactgaattgtctcatcaaaaatcagttgtccgtatatgtatgaatctatttctgaacttttattctattgatttgtctattttgatgccattactataccatcttgattactgtcactttataagtcaccttaaaatcagataatgttggtcctccaactctgttctttttcaaagttgttttggttagtccttcgtatgtgtatgtatattttaaaaatttacatatgcaattctgactttcataaaatttccactaggtgatttgttagaagcccaacaacctccttgtgacctaggccctgtttaaatgcattaaggatatggctgataatggcttaagtactgttccctactggctgaagctgaaagtagacctgagaagttgagatggctaatacaaaagccaacagtctttcagaagtgaacataacatggaactgtagcaggagcatcgagggaccccacagttagcaaaaagaaccaacagaacctaaggaatacttccagtactttcttaggcatagtttaatatgctcccattttaaaataaagtacaaataaaccctatccatcattaacactttagcatttgaatcaggtgatgagagcacattcttccaggcaagattgtaaaaccaaatggaaggcaagatttccctggaggtagagaaggaggagacagattctgttgggcacaggaaggaaaggcaagactgcttgggatatctgaggcccaaggcagccagaggtggcacatggccactggggcctgaggggaaaggatttaccaaaagaggtgagaatatgctgctttgaccactttgcaaattaactgggtgccccatggcagcaattgcctagtgattacctggaaaatctttatgtgtgtgtgtggttttttttttttttttttgactgcctatgtgcagttcagcatttccacttcctgctccatttacaaaagggtcccaaagtttatcttgtgacatttggtcctttattaagaggaagcaataggtggtcatttttagaggataacatcctgtgcttttaccatttccataaaagggaggggatttagctacttctcaagagaaaagagtatgagagaatcacttccagcttctctttaaacccctaatttactgttccccaagtcacaaagaatgactcatctgagtagtgaattgagaagaacttgagcatgcttggctaggggccttctgcattctctcaccacacaccagcctgttggtaatacatacttttatggtgctgacagcctctgcccatgccaggagaggtcttttttcattaactccaccagtgactaggtggggatgatcagatcacagaggatatatgaagaagcccacttggccatagacccaagtcatattctccagcttacctttgtcaaaagtaaatttggtattttgatctctatgtctggctcctatgccctggttctaatcttaggaaggaaagatacatttttggtggtttcctaccaaccctatgttggtagttcaggcgaaaatatgctggtaggaaagggttaaaagtgtgagaggaaacaaaatgaaaaaaaaaaaaatgtgttcagggaaacagcactgagaagtcctcaaggcagaaatgcaggctgtaagaattgggctttagctctgttcctgccagtgtggaacctacagggttcatgaagaatgggccccatttgggacacaatctcagactgcagacagaccctccccaaccctgctataggagacctttcactctctctatcgccagctccgggtgggaattagtcaagtgtcttacctagacatggtgcttttgttccttaaaaagaaaacagactggtgttatctgtgtgttcaactttcaatgcagctttgacttttcttgtgtcccaacatttgtgatagaaaagatggagattgtcttagtccactttgtgttgctataaaggaaaacctgaggctaagcaatttataaaggaaaaaggtttatttgactcatgattctggtggccagaaagttcaagattgggtgagggctgctggctgcttccattcacaggagaaggtgaaggagagacagtgtatgcacaggtcacgtggcgaggaaggggtggtggtggagggagagtgtgcaaggaagtgctaggctatttttaacaactggctgtattggaatgaatacagtgagaattcactccttactccacctcccagggagggcattaatctattcatgaggaatctgcctccatgacccaaacaactttcacctcccaagacaccacactgaggactaaattttgacaagagatttggtggagacaaacaaaccatatccagaccatagcagagactaaactcagtatttcccaaagtgtggtatgcatgttaaggtgtacataactgtacatagagctcacaccttaattatctcaatagttgtgaattcattttagtgtatagaaaaaactgtttaactcgttaatgacaagtgatactggttttccatatatggcagcagtgtgaagttttacatttcaatttttttcaattgaaaaaataattttagataaaataaagtaatattacacacagtatttaaatatggtagaaattgtgcaggttgtctgtgaatgatgggagtctaggatagctaaaagtaatttggtaagaattacaagatatacctaaggtcaggagttcacgaccagtctggccgacatggtgaaaccccagctgtactaaaaatacaaaaattagctgggtgtggtggcacgtgcctgtaatcccagctactcaggaggctgagacagaattgcttgaacccgggaagcagaggttgcagtgagccgagatcacaccgctacactccagcctgggtgacagaacaggactccatctcaaaaaaaagaaataattacaagatattcattacttgtatacaaatgaatacaaaatattcattactttttagaagctattaatagcaatgttggttctaacagtgatgaattctaagatttgtgatgaactaataccacaaatcttttagaggttaattataatcacacaaagttcaccaacaattgaatctttttttttggcttccaaaatgacacttactgtgaaatatcctgatttacccacccactgacttgtagtcactaattttcccaagaccactttaactataaaaaaaagacaagtcgttttttaaaaagagataaaacattactctcttaaccacaaataattactcaggagtgaatatttttaaaattatgtagacattgcgattatagtacttagtcttttcctaatgtcctgatgcctgcaacttactttgaaatgcacaaaaaaatatgacaaataatggatagatatgtgattgagcaaatataacaaaaagcttataaattatagaatctggatgctagatatatgggtattcaccataaaattttcaatttttctataaagttgaaagtgttcataaacgttgagggaaaagacactggtatggcttcttttatgtatatttccttggctttataggtgaatttgatatagagtacagatcaaatgtagatttataaccttggacagatggcactttatgctctgacatttcttatctaccagcctagacaagtagttttcacttacctaacgattcaaacttgctcttaggttaaagagtgggttttacaatggccacagggggagaaaaggcaaaaacagacgcaaacaggctggcaacctgcatctcgtttcttgaacaaaggtcaagaacaaggggtcaccgttcaatatctgcagctgtgaaaaaaatgtgagctgcaggcatgctgtttcataactttcacacaaaaaagtcttgaatgtgaggggctttcctgtttcttcattaaatgtgtactgcacttttctaaagttgaaattttaaactctctttggaaaattattttgaagagtggaatttccaaagtatatagaatatagagggcaacaccaagtttctactacatctatacctccattaagcaagaaagccagattaacccaaataacttaaaagcatgtcaagtggccttatgaaacaaataagaatgaagttaacccaacccaagggcaatgtttacgcattttctcattgcttaaaacaagcacttgacattgaggaaaataaaaacattaaatgtagtgcctgtccctcaaagtggtttctctgctattttttctaataaggaagagttctacttatagggttcattcaagtttatgaaaatgttttaacaaaatgaaaaatagttttttccagttctagagaaagtgcatatgaagtaaattaggtcaaaattaagaggatatattttgctctttatgatttctataaagaaatgatgcattttaacaaaatatttcttaaagatgtttctttgtcatggtgagatgtgcattttcatacacatatcacataaataattgtttcgactgtgttctgcagcaaagaaatgctacaaaaaatcaccccaaatttacccaccgacttgtagtcattaattttcccaagaccactttaactataaaaaagacaagccatttttaaaaaagagataacattactctcttaaccacaaataatttattactcaggagtgaatatttttaaaattatgtagacattgcgattatagtacttagtcttttcctaacaaaaagacaaccattctcaagtatcttattacagttattcattgattaacaattaattgaacagcttctatgttatagtccctaggcatatggcaatgaactagattgttatacaaagtccctgctgccatggagattacattctacaggagtggacatagacaataaatgaataaacaaataaataaatgagataatttcagataatgataaagccttgaagcccaggtgatagacaaaaagtgacaatggatgtgggtgtagttttttaaacatttttcttcttaaatttggtttaaatgtaaacatttaccaaagtgataaatatctgcagtttagtcagatagtaccataagtatttattaatagcatttattacaaaaaaacccagaaatctccatctgcttcttccccttattctcagagcaggctgttcagaagcaggctctttgaagtgacatttgagcagagaagcgaatgacaaaaaggaactgcttaagtaacatctggataaagagctttccagacaggggcaatggcaagagcagagagcctcagacagcaatgagggtccccagtgttgctagagccagggagcaagggagaaggcctaggaaatgatgcagtatatctttttcatagtagcttccatgaatagactggatcgtgggtgtagagaggggagagtgatagcagagaggaaatatgagattgagggatgatggtggcttggactagggtattagcagtgacaaactccaatgcagtttaagacacacagcacttagacctgttgatggctgggatatacaggggggacagggtaagaaagactccaattttggagcaacagggttcagatgattaggaaagtgttgtgtatatttgtcactgttttgcctgctcggcatccaaatctccttctgcgatcatagaatctacttactatgtaaattctaagaaaggatgcaagctaattcctctctgcctcctggaagctggagtacaatctcatgcttctgtctgggactgtgaatcaggagtaatggagaatgaggatgttttctaactaactccagtggggagtacatgaggctgcttagtgacagtgacagcaacagcagtgtcataaccaggtatggccttgattgctgtcattctgacgacctagcctctcttagtttctgtttcttttccaagtctatttctcaagcttgcccattaaaaaaaatttaaaaagaggtatgacatataaagggcacaaatcttaagtatgcaacctgatatgtaaacacctatgaaaccaccacctagaccaaaatataaaagactttcagcaccctcaaagtcttccctttgatacactattttctcaacaaattcaatttctgcctgagttagcaagtccatttcaggctgaggcagaatgcaatcaagaaatctgacttgtggcacttcagtgtttatcacatatgacccttttgcattcagagtgaaaattggtcaggaaaaacagcaaaagagcatttttgtaccaaagtcctcaagtgagtaagcctcaaattaagacttgttattattaatcataatacaactttatcataccaaagtacctaaaaattgatatatttaatttataaaatcttaaccatcaaactcaatctgtggtctggaaactaaattcttttcagggaccctaccagtactcaaccttgtttctttagggtccctaacatgtaaagctacataatctaaaattttccagacagttatttatttttcattttttattttttgagacggagtctcgctctgtcgcccaggctggagtgcagtggcgcaatctcggctcactgcaacctcttctggccttcttattctagtagtaactctatgagcaccatcaccaagtacagaggcattagtactaatcgttaacaggacattataagacattttaataactactatattaacaacaccaacgtccaatagaaggaactcactgaaaaaacatggagtcatttcaatctcatttgatggcgctccatcattcagctgctcaggccctactcctttcatagtccactggcagattcttttagctcctgcttcaaaatatatccagaatccaaccatatctcaccatctctattgtttctatccttgtccgaatctttctagcctggactactgcaaaactggatgcttgaaggtaatagtgaaatgtcttcaaaattctaaagaaaaatgagtttgaacatagaactgcaggcccaataaaaataaagtgtgaggaaaaaataaaggccttgtcaaacacacaaggactcctagtttctctcccatgcaccctttctgggggaaaaaaaggcacctgtaaatatacttcagcaaacagaaaagacaaattcaagaaagaatgcagcaaaaaaaaaaaaaaaagaaaagaaaaagaaaaaagaaaagaaagaaaagaaagaaaaaaaaaataggagtacaaagaaaatacatcccaagatgatagctaaaaatcactttgtcctaatttgatgaagctgattaagaagcataaaatgatctcggggttagagtgaagaacatacttccttccttcctgtcaattctgtcaaagaaaaataaagacaagaatatagttccagaatcccaagatgagagctaaaagcactctgaacaaatctggtaattcaatagtatgattaaaagaagagctacagtaaagcaagtgtttttcttctgtcgagaaataaaagcaggctggaagcagtggctcatactgtaatcccagcactttgggagactgaggcggaaaggatcgcttgagcctacaaatttgagaccagtcctggcaacataacaataccccgtctctattgaaagattttttttaaaaaaaaagaaataaaagcaattacttactccaggaaccattaaagtatgcaaaagccatgacccaattacgtagcaaatgacacatggcatgatttggggaagttgacgactggctataaaagaatccatttggcctttatgtatgaagcattctgcttaaatcagcacagacttaaggatataagatagatacatagaaggagataaatcacctggtttacctgtgcatacttttgcatagtgtgactgctagttactgatttgcagtgtttagaataaatatacagtatacagtatatacaatatacaaataaatatacagtataaagggaaaactatacatctattaaaactgattatataaactaatagtataacttaagagaagttaggaggtaaaggacagtaatggaagggaagtacaaggttggtcatttcctcaatgttatggaaatatatttaaagtcaatggatcaaaaaaattattaactacagttataaaggagaacaaatgaactaaaaacataacaaaaatggtgagaaggaatgaagtgagataaactgtttatcattcatagaataacaaatttggcttaaatgataagaaacagcagcaagaaacgtgctgttaacctctaagaggtgaaattggtgtggatggcagacagaaacacttgtacttttattttctatccatctgaattgtttagaatttttattcaggtacatgctctaaaattaaaattgtttttaatcctaaaaaacattaggggctgggcatagtggctcacgcctgtaatccttgcactttgggaggctgaggcgggtggatcgcttgagcccaggaatttgagaccagcctgggcaatatactgagatcttgtctctattaaaaaaaaaaaagaaaagaaaaagaaaaattaaagctggcagcctcagaaaggagcaacagttgacactacagaaagatcctaggaaattataaaaagcaggtataaaaactcgcaaaaaatatttgaagtaaaatgccatttaaagtaaagacatctaaacttatccaacacttctggtacagcagagtcaataaaagcagtttatagctataactcggtgatgagacaacaaaaaaatgatagaattctctaagagggcagagatcaactttaaaactattctcatccaaaataatatagtaatatagtaatacaagcatggcccttaaaagtatttcagattctggaaaattctggacaaataaatgttatttacatatattgatggataatacatgatggtccaaaattttaacacctttgcttaaaaagaatattaaaataagtgatccttaaaaccattataatagcataacacgaagattataatattttaataaaatttttacatttctagagcaatttattcaattcatacatgatatagcaacaaaaggaaggaaactgagacagctttcctataaaacattcaagagtactttcctttgactgtttactcaatatatatgttctcttggtattcttctgaattgttaacacaaagttttaaaaaatgaaaatttcatataaaaatatttatcttttttaacaatgggttttcaaattaaataatgtctgtttatcaatatttattgcatagaaatattttaagtactttaatatttagaaaaacatcaggaagccagtttttcaatggctgccatgtcttaaaagttggtaacttaaagtctatttataattttaaaattacatattctgtagatataaaagttaaaaaaatacattttgatttaatacaaaagccttctaaatttacattttcaaacattactgtgattctataacattgtatatatacttagccaaaataagttaatttttaaaaatcagtaacatgtaatatgctggcaagactatttagaaacaaatgggggtaattataaagtcaatgttataaatgtactactacaaataaataattaaaacaaagcagaatataaaaatgcatagaacaggagcagatttattaaatctaagtcaccagtgcagaaatctgggtacttaatcccttaaggagttagaggatttcaaatttaaaagatgacttttcccaggggacattgtgactttctgtgaataaaggaaagaaagtctattatttctattcagatgcttctagagtattattgttcaagtgtttttatgtaattcctcctttaatttaaatgttctttccctgaaaaaaatactttaagataataattttggcctcatgacatatatactttaaaaatacatgtgattctacaataacccctcccccatcctgatatctatacatatatgcatttataaatatatacagtttcaggattataaaaatatttaatttttataagcttaaataattactgttaatacagaaaacattaatacttgtataatttcacttttatttataaaaagattttcttatagcagcatttgcattacaaataaaatttgaccaaaggatgttgcagtgtaccaggaccagtactgcaaatcagactgagcagctgtgatgttcctctaaaagaacatctagaggccaggcgcagtggctcacgcctgtaatcccagcactttgggaggccaaggtgggcggatcatctgagatcaggagttcgagaccagcctggccaacatggtgaaaccccatctttactaaaaatacaataattagctgggcatggtggtgggccccgtcatcacagctactcgggaggctgtggcaggagaatcacttgaaccagggaggtggaggttgcagtgacctgagatcgcaccagtgcactccagcctgggcgacagagtgagactctgtctcaaaaaacaacaaaaaaaaggacatctgtctcagctacagaagagtggttcccataaagcagaaaaaccttgaggggctaataacttatgtgaaccttcttaagtgcatttgaaagttatctccatagagttggcaagatttagtaaaatatcccaagaagtccaagttttattgatccccagaaaagttttctagtgagataagtaaaaattgtattaatgaatagtgtttttaattgaatcagataaacttattaaaaattaattaaagatttcaagagtaaaaaaatgaaaacatcgctgtgggtggtataagaaaataaaacaaaaacagatttgaaactttaagacattacaaaaaaaaaccctcaatctcaaaaactcatattaagcttgtttttgttgagctcacgttccagatttccaatcaaagtatcaatactttcttgtagatctttgagattgttttttcgatccactgtagactcaactgtctgcattgtcaaatatgtctgaaatgtacactctttggacatgggaattggctgttcaatcattacttctggcccatccattttgctataattttctccgatttttctatcttctgaagggacatcatcataatccacatcatttaaattttcttttgtatttaaaaagtagttttccccacagctgctccagtctcctgcataacgattgctaagtggactgtctaatcggttttgccttggcctaagtactcctgatgaatcagtaccactcaaatttaacatatgaggtcgttctttcttctgcctcagataattcagagaagacttctgctctgggaataaattgtctgttgattttttgacagttaaacgctgcactagaaacaaacaataattttgctttagtgacagtaatccaactgaacttaaaaaaaaaacagagctaaagataagccatttaatcatcaactacaaacatgcattaaaacaaaaacatgcactctgtcaaaagaaagcattccataattattttttattaccagaaataatctagattaaggatagaagcagtataacgttccatggtgctaattcatgctacatcataacgtccccaaacaaatcacatttccaatgtcgattaattttctatgcaactttattattatctagctataattcaaacaatagctaagctggtagcttctcctaaattaaaagctacagcaaaaagcaggcaaggcatattggtgtacaaacaaaatataacaagaagttcctttgtctgcaaacatctaaatgaggcaaaggcatctaaagtgatcagcctagtaagttccgacccttgtgggcttttctgcaattctattagcatcagagtcatagtttactaagcagatcaaatttcactttgataaaatgtacaaatactagatttgaccactttgttacctgagtttgattatacagcattatctactatcttcatttattgcctggaaatagtacagatattttattttctcattctggttaggtatttaacaatcccaaataacattttccacattaagactagtttattctgagagtatgcattgtgctagccatatagacgattaccacagagacacacattacttcattacaaaccaaggtttactcttgtgtgttgaacaaaatatttaaggctattctgtatataaaatagacaatttaaaatgctgacacatagctattaaagattacccataatatctttctctttctgcatgaataagtgccccttcctatttccctgcactaagataaagcaacataaatcagtgataacacaccaactttatactctccaatatataatgaatgcttgtttgctgttgtataaaataagacaactgaaaaactataaaaacatatatatggttctagttttccagacttaaagtgatattcataacatttttcatagatctcacacttttttaaatttagattttattgaaatatttgataactgtacacaggtatgtttttaacatttctattgcattttaaagatggttattatgtatcactatagatagccaaaatttcttgatctaaaattttctagaaaataaaagctatttactttaaattgatctttaatgttagtattaatatagaatggtccataccatcaactgatgtaagtgcagaatggataactgatttttccactgtgtaattattcatattctttttcttcctctagctgcttatcaccactatctccttgcttttcccccctcattctttgtgctattccttttctttttagtgcttaactgtcatgcctgttgttttcaccaaccaattacaatattctgctagccttgaggttatctggtctgatctaaccatgtatttttgctttatgtcttaaaattgtcctattgtgcctgcattttcagacatttgcctgcaaaatccagattcattttgttgccagtcgcttagagttactcacctaagaccctactgaaacattgtttctgtgtattatcttggaaaatattaagaaaccaattaaactgatattttatatcttttagactaaaaatttcaatttctgaaaaaccaacatcactgactttttagactactgatgtcagagtggtttacaactaaatatacggtgaaaatggctaattttaacctcaaaagttctggttttcccatcactgttgactacccaccttcagtagaacaaaattaaaaatgcagtctataaggttgctgaaaaagaattcaaaatgtaataagtactaagaaacttaatttttccttatcttgttttctaccagtagatttgtttctaattagtactttattatccttttatctataattaccttatttaacccaaatactctgctaggacctgggaatataaagttaaaaagaatccccaatgtcaccaaacttaaaatcttgtaagaaagatgaaataaaaagaaataagaggaaaactgataccttttccaaaaaacttgccccaaatatatttatcatagaaaatgtggtatagtggccaggtggtggctcacgcctgtaatcccagcactttgggaggccaaggcaggcagatcacttgaagtcaggagttcgagattggcctggccaatatggtgaaaccccatctctactaaaaatacaaaaattagctgggcgcagtggtacacgcctgtaatcccagccactcaagaggctgaggtaggagaactgcttgaacctgagaggcaaaggtttcagtgagtcaagattgcgccagtgcactccaacctgggcgacacagtgagactccatctcaaaaaaaaaaaaaaaaagaaagaaaatgtggtatagcaaggatctaggaattatactctctctaaattgatttatccatctttaaagtgataggggggccaggagtattattttcagtattcttaaaacagaaaatgaatatctaaaagaaacatttttgtgaaaactcaatacataaaacagataaaaaagaaggctgttctggtcaacgggaagtgtgtttccattttgttcccccatcccttgctgatctggcttctaagctgcttccaaagaaccctagagcttagtagaagacaatctaaaaaagtattggcaggacgacttttaccttctaatgctgatacgctgaagttctaaccaattactttgaagacaggatttttcaaatataaatctcaaagcaaattatcttcttgcccaaaaataaaaaacaaaaaataacatgaaacaaaacaaaaagtttagaaaataaaaaataagggggcgactctttttaactctggagttggagaatttccaaatggaaaaataagatatgcatatcaaggaaagctaaaaccttctattgaatgcatggagataggataggcattcactgagttaatatgctgtggcctactagtctttgccacattctctatgtcaccatcaactttctcaggccaagtaaatgcacctcgtctacttgatttctgccttttcttgaattcaacagcaggtgattgacagggtaaaactgttgtttcttctcaactttctgccctgttttttgtctgaggtactacaactaaagaaaaataacaggttatagaaaaaggagcagttatttttaaaaccaccaacacaaatctttggaataaggtgctgtacactaggaatagttgtttaaggctgtctttagaatacggtgaatttgaaatctgaacctgctttttctataacacaagatatacattaagtttcttctctcaaacccaaaactaaggtggctactattacaaaataataaaatgaccttaacctctggcacagaataattaataatcataacaaactcaggcactgacagtaaacttaatggtatctccagggaagcaagttttcatttgtggtaatgacaagatggctttctcccaaattcttggtgtttattagaattaaagctgttctagaaaaaggagacacagttgacactctgaaagatcccttatgttgggcatcaaatgctgaaattagctcaattaccctgagaatcttgattcagggttttaaaatagttaaaataacattctaattcagttaaaacatgaattagaataatttttaagccggcatttaaaagaaagtaaaagctttaactttccaaattttaaagttgaattttttttttttttttgagacggagtctcacgctgtcccccaggctagagtgcacttccgcaatctcggctcactgcaacctccgcctccctagttcaagcgattctcttgcctcagcctcccaagtagctgggactacaggtgcccgccaccatgcccagctaaatttttgtatttttaatggaggcggggtttcactatgttggccaggctggtctcaaactcctgaccttgtgatccacctgcctcggtctcccaaagtgctggaaaatttttattaacttaatttttaattcactttaaacgatgaaatcaagcattctcttgtactttaatctatatatatatatatatatatatatatatatatataacaaaagagtaaccaaagacattgactgagtgctcactttgtgctaaacattttgctcattgccttagatgctttatctcaatctttacaacaaccctgaggcaggcatgatttagagaggagcaaactgggagttgaagaggttaaagtttttgtcgtagcccatcctgctggcaagtgccaccatccagatctgaacccaaacctgaccccggggccaagcacggttactagtgtgctctacactaaacaccaaagtacttcacacttggtcccatgcagtgtggggtgagagtagcaggggttactaaaatctaagaaaattttgaaatttaaatgcagtgtcctttatagaatgtcaaattaaacacatatttcttttaactctgaaattacatcagagataattaggaaaatatttgtcagtctttagttattgattgaaataaggattggataagaaagatggaaaggtcaagggtaattcccaatttaagctgagataatttgactaatgaccatgaatgcagttaaagacgtaaagaagaattgatttaaggggaaaaatgaattctgctttataccggttgaactaaaaatgagaagagtaaataaattagtgtttattgagtctctattacatgtcaagagctacactgagcacattacatacacaatttttaaaaatcctaataaaaatctataaacatattattaaatccatatgacaaaagatgatacaaggctctaagacgttaagaaaccaacccaaggtcagattgctaataagtggtacaaccaggatttaaatctagatctgaccaagtctaacatgtgcacattaatctacatgcctacaatgtcatcagcaaaggcagaaaacatttaaatgaaaaaaatctaaagggcaggtatcaattcacaacattttgaaaaagcaaaatctagaagagtttcttcaatcatatatgagcatatttaatgattagttaattcaaataccctatcattgaaagtgaaaaacatttccatagaatcatttacctggccagagttggagtaagtaatgaagaacttcaatgtgttttttaaaatccaaagcacttgcaagttcttctgaatcagtaaagactctgttgttatgggtggaaggctcttgcctctgacttaataatactggtccaaagcacacagccaaattctggcacgtcatcttattcacttcatgataggaagccaccaatttcaaatgatccaacaacatctttagggttgcctaaattaaattaaatttcaattaatatagtcataaagaggcaaattcaaggacacaatttatagcaggaaatacagataagcatcttgtcacttttaaaaggattttttttaaagatttgcgtataaattggatgtttggaacctagaacatagtttctaatagaaacattatatggggcctaaattatgttccagccgggcacagtggctcatgcctgtaatcctagcactctgggaggctgaggcaggaggatcacctgaggtcaggaattcaagaccagcctggccaacatggtgaaacctcatctctactaaaatagaaaaattagccgggcatgatggcgggtgcctacgatcccggctactcgggaggctgagatgggagaatcgctggaacccaggagatggtggttgcagtcagctgagactatacccctgcactccagcctgggtggctgaacgagaccctgtcaaaaaaaaattatgttccaacaacacaatttaatccattaaatggttaaaatatacattctttataaaatacttatgaatgcattccaaatttcagctggaatccctgggaaaatgcgtccattacctctttctcttctaacatggcaacagcaaaggctgtgatgaaaaggggattagggtaagaatgttcatttttaagtacagataagtcctgtagttgtaagttgtaatcactatcatgcttaaatctaggaagctaaccattccggaacatggccaggttctataatgatttggattatgaaagacatgtttaaaaggccaatatgcttcttaactaatatacatataaataaataaataaatatatatatgtggtaaataaaccttaaaaagaagaatagtacagttagaaatgaaagaaaaaaattaccaaaaaaaatattttttaatccttaaagaaactagtaaggggagttggctcaaaaagtggaatggttatttaggtttcaacagttatggaaagaaatgatgttttttgatgtagtggcataggatcaatcatttaacaaaatgagtaattttttcttcaaaactgtattgaagacattgatgccaattaaaaactttaatttttttttttttttttttttttttggagacagggtctcactctgttgccgaggctggagtacagtagcatgatcacagctcactgcagcaccgaccttcctggctcaagcaatctttccaccccagcctcccaagtagctcgggctacaggcatgcgacaccatacccactaatttttaaaaatttttttgtaggccaggcatgtggctcttgcctgtaatcccagcactttgggaggccaaggcaggtgaatcatctgaggtcagaagttcaagaccagcctggtcaacatgggaaaccccgactctactgaaaatacaaaaaaatagctggtgtggtggtgcacacctgtaatcccagctactcaggaagctgaggcagaaggatcacttattctgggaggcagaggtttcagtgagccaagattgtgccactgtactccagcgtgggtgacagagcaagactccgtctcaaaaaaaaaaaaaatttttttttttttgtagagacagggtcttgctatgttgtctaagctggtaaaaatcttatttaaagaaaaatcaaaataacattatttctggagccaaaagcgacaaatggatttgctggtcagaaggccatttaatagctgtggcaagaacaagtccagcaagatgaggtaggaagccagattacaatgtgctgagtagtaaatgagtgatgaagaagtgataacagctggaataaatagcccttcaatgtttggctatgaagggaaggaatgaagagagaatgaaaactagagaagaatatggcattttaaatcaaaacaagtcaaatatatgaatcatatttcttttttaaattcataattatttcctaacacaactccatatacattggcctcttaagggtatttccagcaataattgtgatcatacacacacacagacacaaacaacacactacacctggttaaatatatgttcaatctcaatagcaagcaaaggaatgcaaattttttttgactactaaataagataagccaaaaaatgtaattgtcatgttccttttgaaaattagtctggctgggcgtggtggttcatgcctataatcccagcactttgggaggtcgaggcgggtagattgcttgagctcaggagttcgagactagcctgggcaacacggtgaaacccagtgtctacaaaacatacaaaaaaaattagttgagggtgacggcacatgcctgaagtcccagctacttggggggctgaggcaggaggatggcgtgagccggggaggttgaggctgcagtgagctgtgtttgcaccaccgcactccagcctgagagacaaagtgagaccctgtctcaaaaaaaaaaaaaaaaaccagaaaaaaaaagaagaaaattagtatgcaaacatataagggccttaaaatgttcatattatttaaataagcaattccacttctgagactctattctaaataattctaaattaaaaataaatctgtgtacaaatatttacaaatcactcaaaatctaaatatacaaaagggaatactgataaattatgttgtcaaatccactcaatggtatatcacacagttattgactgattgactgactgagacaaagtctggctctattgcccaggctggaatgcagtggcatgatctcggctcactgtagccctccctgggctcaagccatccttttacctcagcctcccaagtagctgggaccctaggcacgtgccaccatgcccggctaatttttgtaatttttgtagagacggtttcgccatacagcccaggcttactcagtctttttagaaaggatggtaatagcatgggccttagagtcagaaagacttatagtgtgatagactatttaatattcacagaagtatgtaactttcggcaagtgatttaaattccctaacaggcagttcttcacttataagtggcacttataattttacctagtgctgggcatggtggctcacacctgtaatcacagtactttgagaggccaaggtgggcagatcactggaggtcaggagtttgggaccagcctggccaacatggtgaaaccccgtctctactgaaaatacaaaaataagtcgggcatggtggcgcccacctgtagtctcagctactcaggaggctgaggtaggagaattgcttgaacctgtaaaggtggaggttgcagtgagctgagatcgcaccactgcactcaagcccgggcaacagagtgagactccttcttcaaaaaaaaaaaaaaaattttacctagtgttgggaaaccagtatctctactttttccacccacccccttaaacttcaccccacccttgtgcttctgcactctttagctgttcccttcccctaatccaaaggaggagtaactgttaatccaactggacagagcacaggacattcaggggaccacagtaaactcgcaagtcaagttactggacttacagtttctacccactaattcttgctctttctgccccaacatgataaaaaatgtaggcaaatttagcctcatctagacaagcccagtcatacatttctcctattttcccttctattctaaggaacaacagataaagttaggctaaggctggttctgaagacctacctatccttctctctctctcctacaggcatagctgaggatgctggtctgaagattttggagagggggtgaatggaaaggataaggaggaaaaaacgaggggaggggcttttgtttgtcttaaagttaagccatgtacaccaacacagttgttgtatctaaaaaatactaaaaggagacacaccaaaatgttaattatagctgcctctggatattgatgattgcaattttatattcttcttttctgtatcttttcaatatttctataatgaacaaatattattgtaataatattttaacaatacaattaaaaaaacttcagtgagtattcatgcttgggctaaaatcacatatagaaaagataaaactgttttctagatttattctgtttaagaagcttttacagacttaggctgtttaaaggcagtaatggcagagcttttaaatccatgagtgccacaaatgtcaaatatctaaaattatttgtagctctggaggtaggtatacagttcattaactggctttcaggaaaaatgtatactggtaatgcttaccttctcaatctctggcagacaatccagcaggtcaacagtgtacttagagtcacctgggtcattctcacaaccatttgatgacattttcaaaggactttttgccattgcatctaatacagcctcataaagctgctttgttatcagaggagaagggagttctcttaaataatccttaagaacacctttaaaaaacaaaccgcagacagttggtgattggactgcagagtgaaataaagaactatggtcaattttttaaaatttaagtattatagccaactttcaacattttgaaaacaataaaggcaacaacataaaaagaattataaaatactagcattttgtattcttttaagttgccttggtaattgacttgttttgaaagcatgctaaaaatgtacacataattttcagttaccacacgttaggtttgttaatcataaagtaagctattcttgatacatatacccttattgattctgccccctataaaaagcttctctaaatgcatgtgaaacagaagttaagaaagcaaggcatatttatgttaattatgaattattccaattacacaaattttgagtttctagactttaaattgataatgaaagagtaccaattgtctgaaacccttggaaataaatacatttcctctttaacactggagaaatgtcttaaaccgatatattggatggctggataattgctaatgctacactatcatatgcaagaaaaaatcattcctaaaaccaaacaaataaaaccaaaagctaagaacagaaaacatcagacgtgtcactataatgggaatgaggaaagtcaattgcaaacattccacacgtagttttgaactaagaaatattacttatagtagaggaaactggaaagaatagtggttgttatatataagtaaggtaggtaagatacaagctaaaggctggcatgtgatcacaaaggaaaacaggagatactcctaacaccaaaacctaaatatatacaatattgatccagaacatgctctcagccttgcttagtttgaacttaaacatgattctatacgaagcttcccatctcttttttttttttttttttaattgtgacagggtctcgctccatcacccaggctggagtacactggtaacctcaaactcctaggctcaagcaatcctcccacctcagcctcttaagcagctaggactacaggtggttgcccccacacctggctaattttcttattttttgtagatcagtgtctcactatacttcccaggttagacttgaattgctggcctcaagtgatcctcccaccttattctcccagagtacctggcatgagacactgtgcctggccccaagttttaaatatttaatagtaacatgattcattagtttcttatgcatccttctaatgtttatgcaaatataaatatgatttgtctccctcattgagagttgagtatccttagtttaaaaatccaaaatgctctaaaatccaaaacttttaaaatgccaacatgatgctcaaaggaatgctcattagagcattctggatttttgatttttggattaggcatgctaaactggtacacataatgcaaatattccaaaacccaaagaaatcagaaataagaaacctgcatatgctattttgtttcttgctttttcatttaacatcatatccttgagatcttttcaggccatagagagcttccttaatcacttttatagccacattatagtagttcaatgtaaggatgtcccatagtcttatctattcagtctcttacagatggatactagaattgtttcttatcttttgtttttccaaaacatgctacaattaataaccttgcacacaatcactttgtatatatgcaggtatgtctgtaggataaattcttaaaacaggactgctaagtaaaaaatgcatttgcaattttgaggaaaaaagaggaataagaatgtttctttcctaggcttggaacttgagtatctaggtggatactagtgacactatttcaaatagagaacgcaggaggaaaatcatgttttagggggtaaagagaagagtttcattttgaacatatggagcttaaggtatctatggggcattcaaggctgctggatataaaaatctgagatgaaagagatgactggagacacagatttaagaatgatcaacttaaagataactggatcttgggaatgattatcagggagacatacagagtgattaagagaaggctcagaaaataaccctgaagaacatcaactttccaggggtcatcagggaagaggatcttccagttgtgactaaggaagaatggcaaaagatgtatgtatggtgagaggaggtggggatggggcgagaggagagtggcaaaagtgaggccaagtcgaggaaaaatgtttcaagaaagagtctatgatatctaatgatacccaaacaatagttgggttagataagaatagtgttaaatattgcagagaacagtgttttttcaaaattggctgcacactgaggctttaaaaaaaattagattctggagccccatgccagccatactaaatcataatgtacagaggtcagagctcctgtcccagtatttttaacaaatttgtcttatgtttagacaatggggttttgtaaccaggtatagaaaataatgatctagagacaatttaagaacccaaaaatgtccaccagaaaaggaagtcagcaaccttggcaagcacagtttcaggaaaataaaggacactgaactcaagttgcagttggttaggaagtaaatgggcattaaagaaatagacaaagaaatgcacacaacctgttcaagaaatctggctttgagaaaagtagataaccacagagaagaggggagggcgggggagaaacaagatcaaagtggagatttttctttaaaaacaggagacacctaaacatttcaatggtaatgtaaaggagatagtaaaaaaggttttcaaggttcaggagagaggaaatatgatcaattgagcaaagtccctaagaagaaagaagaaacttctgagtacacatgaaggaattagaatttgtccaagatgtaaggaagatcatttctctattattacagaaaggaagtggaaagaatgtatgccaaagaaggcacattgataggctgggtcacaagaagtagagcaagttcccatctgatggcttctgttttctctgtgaagttaggaggcaaggtcgtctgctaagagtgacatgggtgaaatgaggtttgaggggagtgagaagatattaagtagacactccagagtataagagagctgataggaaaacatacaattattaggcaccattcacagccttctaatgactttgaagtacatggattaatactgataccaaataatattgattttttttttctcattgcaatcagtaacccagatacaggctagaaaggcagaccagtgtttctaggcaagatggagcaatagggactagatttaccttcctgcttgcaacaactgaaaatgccagacaaaatatctgacaatactatgtctaagacattggacatcaggcaaaggacaaggatccctgagagatgggaaccaaatgaagtgtgcccacaacaaccacagcttattgcctggagagactttgcaggtcgcagtaaggaaatgaaaacccaggtaaagcccgacagttgaaggggagctagaaattcaaggaggctaaagctgctagaccttgcaggacagagcacttgagagtaaagggctgcctagacatgactcaggaaatcagcaaggagtcccaagtgttcatctgagtactaatcagcacacgcaggtggggcaactccccaaggctggagaaagaaccagccaaacagattagagagaacaattcttggagttttcatagtgtgggcaatcactctcgttccatgcagccagagtggaaaacttcataattcatgggatatgggtacagcactatgttgaattgtggcccccacccccaaccaaaaataaaacatgttgaagtctgaactcctagtacctcagaataggaccttatttggaaagagtctttacagaggtaatcaagttaaatgaggtcactagggtgggccctactccaatatgacatgttcttataaaatgggggacacagagagagagcagatgatatgaagaaacacagggagaatgccatgtgaagatagagtattggagttatgcatctacaggcaaagaaagggctgtcaaaggttgccagcaaaccaccagaactaggaagatgcaaggaaggattcccctgcaggtatcagggggagcagggccctgctaatgctgattctgaacttccagcctccagaactgtgagaaaatacatttctgttgttttagccaccaagtttgtggtactttgttatggcagccatagaaagctaatataagtacacagtatatagcagagttttgcttcagtagagaatcaaagaaatagacaaagaagagccttatttaaaagcagttcacattctgcctaataaagcttaaaagcaagactaaaaaaactctttgcaagtaacgtacttgcataccaaacaacagaaatatccagcacccaagaaggtaaaatttacatttgatgtccagtaaaaaattacgaggcatataaaggaggaggcaaatataacctataatgaggagtaaaatcaatggaaaccaacccagaaaagacatacacaatagaattagtagacaagaacatgaaaacacttattataactgtatttcatatgttcaagaagctagaataaagactgaacatattaagtagagacatggaaaatactgaaaaacccatatcgaacttctagtagtgaaaattagggtgtctgaaactaaaaatgcaatgaatgaaattaatatcagaagacaagactaatataacttgaagatacagcaatagaaacaatctaaaatgaaacgaagtatggaaaaagctgaaaaaaaaatacattatcagtgagctgtcacataacgtaaaatggcctaagacatgcttaattgtaatcttcaaaggcaaagtagtggcagtgggtaggtggggtggaaacaaaaacagtttgaagaaaaaatagagaaaaactacaattatagttgaagatttcaacacgcctctcagtgagtagaaagaaaacaaagatgtagaagacagggacattattaattaacttgactttattgatagttacagcacaatttattaattaacttgactttattgatagttacagcacaatctgtccaaaaccaccagaatatacattcttttcaagagctcaaatggaacatttaccacaaaagaccatattctgggcttcaaaataagcctaaataaatacaaaagcatttaggacctatgaatcagaagactgaatatgcacatatacaaaatgagaatcattctctcacatacaaaacttatataggtagtaaagatacagttgattaggtagatttgaatgttgaatcactgacatttcctgaaggtagagctacaaattacttttttaaatccactaacccacccccaccttacctcacttactctttttggccttaccacctactttagtcataccctatacatgttactcagaccaaatggctctcataaacaatctcagtatatgtgggttgctaagtctatgaccattcctcaacatttagcattccttggtgcttgcacagttttgacatctacatgcaatctaggtaaaggaaaacggaaacaatttgtgagttaatgttccagaggtcagagaacatataatatgtatggtaagaaaatgtatagtatgtacaaaaaagataaatattaatgttttcaagatcatttacttatattctgataaagttttccgtgaatggcaaataggacaaaaatgactatggtaggattaaaatcataaaaaggcatggtcaaatgaactttcaggtactgaacctagatactgattatgtagcactgacatgaaatctattttacagtagttagatacatgtaatcctcatcagaagacttatttttaataatcactaaacaatagatgacttttaaaaagccttctgttctttggtaataagccctataaagaattatgaataggctgggcgcagtggctcacgcctgtaatcccagcactttgggaggctgagacgggaggatctcctgagttcaggaattcgagaccaccctgggcaacacggtgaaaccctgtttctactaaaatacaaaaaactagctgggcgtagtggcgtgtgcctgtagtcccagctattcgggaggctgaggcacaagaattgcttgagccccagaggtggaggttgcaccactgcactccagcttgggctacagagtgagactctttctcaaaaagcaaacaaacaaaaaagaattacgaatggattttatacctaaaattttgcacttgatttaaaaaaaaactggttcgtctggagtatttcattccatgctccagacaaaccaactactaaaaacacattaaactgtgaacaaaatctgtcactcatttcattaatttctcattttttagacctactgaactattaatcatatttcaaagtttactcagaaatgtgagttcatgaggaacaaacacattaagcatcactgtcactggctaactcctcaaatcaacaataccctttatttttagccatgaaaaccttgtgtcatgcaattattttgcagacaaatcttaaatcatttcattgcctttttatcaagaaaaaaatagttctaaattcttctgaaaaacagctttacccaaatggaatagtacaaagaattgagccaagaaatatccaatttataaattacagaaactctcaattttaggaaagaatgctgtaaatccaatattcattgacctattgttcatatcttctgcatatgctgccaatttccaaaactaggaaccctttcttcacttcatattttaaaattatacatgtttaacataatttttatttataagacaaagcttcaccaagaccaaatctatttttatttatagagtgtacttgctggaaatttgtatttataaaacttctctttcatggattcataaaatgagtcttttgctgattttgttaattacacattaacaaggaaagaacattcttcaggtatctcaattttttgtagaaatatgcctcttcctatataaaaattaaaaggaaccattatttctgatttgttaaaatatgtaagaaaaaagtgacagtttgttttatcttactaaaatgcttggaatcaaagttttgattatccaagagttatatattaaatacttgatgaaaatacagtcattcagcactcaaagggtgggaagctcaattattcagaaagcctcaatcctaaaagtaagctttaaggattttcaccaacaaaattctcttaaatacgtacaagatgaaccttcctcaaattttaacccaaacaattaattttgagtaaaaataagaaagcaagttataagagaaaaattaacacattacagcaagaaaaaaatggcagttgtcagtagagaggagaaagaactaccaaaatacacagaagatctggagatacacactgaagcatctataaatgaaaggatacgtctgagattttctcaaaataatcaagggttgagaagaagcaaatggggggatgaatgagacaagtctgttcatgtgttgatattatggaaaccaggtgacagagaggatttttcatagtattctctctactttcgcatatgcttgaaaatttcaataattaaaaaattaaaacgacaaaaacaaatatggaattattataaaccagtagctcctgaaggttaccaataaggttatgagccatttcttaatggccaaattcaaaggcccttttcttttctcatataatctctccatagaatgactgtatcacacctttgcttaatctctgttgtctcttatttcccaaacattctgactcctttcctctcaatctctttaggtgtttcttctttctttgccagcctccaaagtttggagacccccaaagttctttcttttcaaactttatggacaattgcaacactttactacacatatatgccaatgactctctttccactcttatctttcaggggtaatagaagtatatttccaatgccatacattgaattacagtcaccacttgggtaaataagagatccctcaaattctactgcatcctcttcttagctgcagatgagcagtttcaactttgcttgatctacccatttagatctcctactagcacttcaaattctatatatccaaagcccaattcataatctttcttgacacttccccaccaaaagcagtagctctccctgaagctctctttttctgctaatggtacccaatcaaccatgtctcaaagtcatatctgtctgggctccttctttctccacctcctttcaattctacttcttcctatttctactgctacaagcccctttagctcttactacctctttgcctggactacggccaaggctttctaattggttttccttcctctggtctcttctaatttcaatccatcacatagagttgccagattaatattcctgaaaataatctctatgatatcactcccccactcaaaaaatcttaatggatcccctctggctagtaaataaatttaaattctctaaccagatagtcaatacgctctatatcacctaagtaccagtcaaactcaacttccaaagcattttatttatccctctatgaaggtacctttttctttctgctagctactatagctaacttaaagtaggtcttacttcccttcatcatgtcagctgtttgtgggcaagggaccatagcttaataccttcccatagaaaataacacagtaagtaatgtttgtgaaggaagaaaagacttcagaataaaaacaaattaaatttcagctacaaacgtatttcagttatctttcttgcagatgtagtctttccagaaagagtacataaaataaaatctatttattacctgttattacatttatatctgggtactggttttcacacagaccaacagctttgctatctctctcaaaagcctctcgcagttctttcttgactgctgccgaaccacataatcgatacaggcctactacctaggaataaaattatggccacattacagtaaatttgataaagggaaaatataattgcattatagatcacatgaactttgcaatcaaatatgttctgatgtcatttaattttaaatacctcaaatatagcttttgaagtctcattatatactatgttgattagtttaataaaaatatcctattctttcatttaaattcaaacaatacactatcagttcggtaatgctggctacctatcttaagcaaaacacaatcccttcttttcagttttatatgctcaataaagatctccatgccccaggaatgtgcgccctttcacatcttttgttctagactgaagtagtacagcacagacactgaacaagggttttggagtcataaagccccactgcttgcttcatgaatttgggcaagttatttaatctctttaaaactcagtttcttttatccttaaaataagtatatagttgaaataaggttctagtatactatataaaactttttaagaaaaaagattctcaggaagacccagaagcaaacctagggtgttttttttttaagttgtcaaattaattgattataaagtgatggaggaaatttaaaataatatattaaaggtaaaataaaacctctatttcaaaatttatataagatgcacagacactacccatcccaccaacctacattgaaaagatttgtctttaaacactgtcatacaggttctaaaatattaagtcttaagttattcactataaatttacttagaataaacatgatctctgtaaagagaaaacacgcctgattaagctatcaaagttctttgaaagaataaaacttcaaaaaaacttgaggagagaataagtgattgtcagccatacttccacatctaagactatttagaaagctcagtcactttgaactgaaggaaaaattttggagaaataaactatttaaagacagaaataaagtaaaagtaatcttccaggatttgaattaggaatcactgtaaaatgcaataaatgatctagaggaagaagtatacaaatgaaatttccagggttacttatgatactaatctcttctgactcattaaaaaactgatagaatacactataaggtgggtctcaatatgagaaagtgtcaatagatacagggaaatattatctaaaatatttgagatgataagctataggtattaattgaaagatagtaaagaacctaaaactatttccaagaggtgataatgcaaggtgctgctacattcaaaaggatcaagataatatgggaaaccaagaaataggaaaaaaattcaaatttcctaccctgatccacattcatgatgcattcacattgagaatggaatgagttatgctgatcacatcatctcaagaaagacacagtagaaatgtagacagttcagaaaatgaaactaaaatattaaacaggatcaaaggaaatgctaccacaacagaagaaacgaacttgattatagccctgctggtgtgagcacatttaagtgtcataaagtaccatacaaacgatgtatccccttaaacttgagaagaagatgagcctagaacaacttaaaggaagtactacttaactagtacacaataaattaatgggatattttacccccaaaagttgaaatcacaaatataattttttaaaagatgaaataaaggaaggaagatctactacaggtacttcaaggaaaagatattttaggatatatccctactttctgatgatgatatcttgaatcaaacccttgaagtacatgctcgatgcctctatgaaagacagaccataagtatgatctccatagcaatttttcccgttttaagcaggagatgggtggtagtagcactcaaagcatttggaagatgcaaagacccatgccacaaactctttgtatatgactatcaaagcctattttcatgtttacaataaaaacccaataatacaagaataattcctgactaaaagggtaaacaaaatttaagcagtatgccagtctgtaaaatacaagcacaataagcctctctctactgggggtggggaagaggggagggcaagtgagggagaaagaagcaggggaaacaaaacaaaaatgtctttaaaaagtacagttctaggccggacgcggtggctcacacctgtaatcccagcactttgggaggccgaggcaggcggatcacaaggtcaggagctggagactagcctggctaacatggtgaaaccctgtctctactaaaaaaaatacaaaaattagccaggcatgatggcgtgcacctgtaatcccagctaattgggaggctgaggcagaattgcttgaacccaggaggcggaggctgcagtgagctgagactgcgccattgcactccagcctgggcgacagagcaagaatccgtctcaaaaaaaaaaaaaaatacagttctacataaaaatgaaaagcattgctaaaaatgttttcttggcacttaaagtggtaacagtctatatatacctgctctttctaaatatttcagaaaatagactgtaaaaatatagtgccatttgagttacttaatattcaactataaaagtttgtttaataattagcttttaagtctgcataatttctgaactctaccctcactgcctgaaaaaagataaaagaaaaaaacagaatcttaagaaagaaaaataattaaccaaaagttggattggaaaagtaaaggcctcactcacacaaagacaacacaaactggagacagaatgatgtatctgagttagaagtttcatccaaccccactggggggcctgaagaggggaagtttcaatagttgagatgtgttatctcttagcttcaggaagctactccattttttttttttttttttttttttttttttgcaacggagtctcactctatcgcccaggctagaatgcagtggcacaatctgggctcactgtaatgtccacctcctgggttcaaacaattctcctgcatcagcctcctaagtagctgggattacaggcatgcgccaccatgtcgggctaatttttgtatttttagtagagacagttttcactatgttggccaggctggtcttgaactcctgacctcaggtgatctgcccgccttggcctcccaaagtgctgggattacaggtgtgagcccccatgcccagccactccatctatttttatagatacaagcaagtaagacccacagagattaagtgacttgcccaacatgacacagctaagtaataatggaggagaaaccagaatccaggtattctgtatcttaatgcaaaattccattaacttaggctgtttctatagtttccatgttaagcttaagtttattaaataaatatttcagattttataatatttactcattgtcttttaacttaacttttcaaccaatattataaattcagatagtactaaagcagaaataactcaacgtaatttttagtcttaatatgtatcacaaaaattagtataaagaatcaatatcctttgcctatgttatcagctctgacttttccttttaatgccattttgaagcaatcctgatttctaattataagacccatgaagctctgtgttgcaatataaatttgtggaatcatctagcatgctctcaataatggacaacatgagtcaagttaaaaattataccctaaacagtaatggaataaaaataaagaataggaatggtaaaatatctaaatttgatttttttacattaccttgaatttcttcccccaagacttacaattaatcaatcaataaaggaagtagtagggaaccatagtaagataatacctgacagcctctcttttcaatttccataatacatttctgtatcagaaggggcaccatcagtcctatattttctttctctacaactttttgaatatcaactccaaatattattggttcttggtttatatctagtccatgaagagaattctcccactgttccataagagtcactttcacataaataagacctctaggttcaagtttgacagccaactgatgagtctttgtcactctaaataaggtgggaagaacaacagttccatgacaacaaactcgattttttcttggagtgggttcccaactgaatactactagtttcaaatgttgtgcattttcaatttctatgttgaaagtgtgatccatgtctaaaaatgttgttcggcatgtgagcaaagctgttcttgctttgtttactgaatctacctgaattgcacaaaagacgtcttttgaatctatccgaggtggttttaaatcctcagcaccatagaaatgtacactcatgagcccagatatgtactgtgaacacttaggttgatcagaaaagctataatgcctaaaagcatcaatgtctatttcattcttgctacaactatttgaaattatttcttttccttttccaaatttgttttcagatccatgtttgctagctttagttgtaagttcaggtgagtctccatcactaaggtaaccacctttgcaggaatacttagaactcatagagtttttcttctggtagctctgctgggaggatacactggtatcaagatggtatcggcttataacattcctcttagcagcggtggttgtgttcccagagggcagaatatcagtatgatgaacttctcggcagttatatttagacaaagaaggagtattatctggactgtttatataattcaatgttcccttaacgcttagctttcggctaaattctggcaactttttcattttcatggaaagtttcctcacagttcgtggagattttattttatctggcaatgaccaattaattgaactgccttttttcacagggctaggatttggagaagatggttccataattcccaattcagtactatttgtagcagccaggatcccagaaccttaaaagaaagaaagaaaaatacgttataaagcaatatgttttgatttcttttattcttattttataaaccatcaactaaacaggctttcacataggcagaaattcttctcttatttcatctcaatggggagatttcattagaagttcaggtcaacttccatcatgatattcaagcagaatactgcattatcccaattatttaaaatttaatttaatttttcatactttattccttatagagaaagatctaataacctcacatcaaaagctaatgtatgtaacacaacatttcacaattaaaatgagaaaaagtgtttattcattttaaaaaacaacaaatgacctttctttaaaaagtattaatattctccctccaccccatgtgtcctaatgacaaataagtagtttctttatagagaaaaaaactattttaagtatgcctacagggcttttctattaagaagataatagaaaatggagtgtttgataaactggataaagcatccccttgtactaaaattatagtacaattctactggcttactagtttgaaacattctagagttaatcggggtcctgcttcagtctataaacatcaatctgtctattttatcacagcctagaaaagctatccagtatattaaattgctttagattaaatacattatcacataaaaaaactgactctttttacatactgtaagtaaataatttctactgaagtccttaactaattattaaaatgaaatactgtacatgatagcaacttctactgcagataaaactgaatttattaaagccaaaatgctttgtttttataaaacccaagagtcaaaatattaccaaattccacagtcgcttaaaattaaactacaactatactaatcaaatcacatactatctttaaaaagaaggtacaaaataaaaatctttaaatataaatttatgaactaggctagagtcgagtgaaactggcacactccttcagcacctagaacagtaactggtacatagcaggaactcaatatttagtgaataaatgaataaccaattgttagttgccttgtaaactggcaaactttgtagaaaatgcaacatagaaattaacaataataattaccaggcataaacaccaagtaatgatactggtaattgatctgagtgaagtaaaaaacattatgaagatcactgcaatagcactggaaacaatctatcaacacctaacattaaggaaacagtcaaatagattagggcacatcaacgcagttaaatactgtactacaatgcttgagaaacaatactaccctacatgtaacaatgcaagatgaagataccaagtaaaaacagcaaaaatcaaaaataaagtccactatgattacaactagataaaagatacatatatatcatggtggctcactgttatcccattactttgggaggctgaggcagataggagttcaagaccagcctggacaacatggcaaaaccccatgtctacaaaagatacaaaaaaattagcaggtgtggtggtgtgctatagtcccagctactagggaaaccgaggtgggaagactgcttgagctgggaaggtcgagtgtttctcaggctgggaggctacagtgagccgtgattgtgccacttgcactccaccctgggaaacacagagataccccgtcttaaaaaaaaaaaaaaagatacatatgtatctgggagttaatgaggaaaaaacaagtcataattgcattaggatgaattagctttccaattctctgatcaaaaattattttgaaattcaaccattttctttgccaatttctcaacagctttctgccaatactgctaagaaatagatcactttaggtaacggtttttccaccaaaataaaacaacaaaaaaagatgacttataaataaactgtctaaatatttcctttggtcaatttaggatttttgaccaaaaaatattttaattatatattatcatatattttacaatattaaatgtaaatatttaatatttataatatatatttatattattttataattataaatatattttaattatatatttatgagaagaatgacagtaaaaaaggagatagtaaaaaaagcagatatagcatacttttaagttgtgtttttaaaaaaatgtctgttagtctttccaggttcacaatttgccacaaacattaaaaaaaaaagtttacgatattgattcttcctacccatgagcatggaatgttcttccatttctttgtatcctcttttatttcattgagcagtggtttgtagttctccttgaagaggtccttcacatcccttgtaagttggattcctaggtattttattctctttgaggcaattgtgaatgggagttcactcatgatttggctgtttgtctgttattggtgtataagaatgcttgtgattctgtacattgattttgtatcctgagactttgctgaagttgcttatcagcttaaggagattttgggctgagacaatggggttttctagatatacaatcatgtcgtctgcaaacagggacaatttgacttcctcttttcctaattgaataccctttatttccttctcctgcctaattgccctggccagaacttccaacactgttgaataggagtggtgagagagggcatccctgtcttgtgccagttttcaaagggaatgcttccagtttttgcccattcagtatgatattggctgtgggtttgtcatagagctcttattattttgagatacgtcccatcaatacctaatttattgagagtttttagcatgaagggttgttgaattttgtcaaaggccttttctgcatctattgagataatcatgtggtttttgtctttggttctgtttatatgctggattacatttattgatttgcgtatattgaaccagccttgcatcccagggatgaagcccacttgatcttggtggataagctttttgatgtgctgctggattcggtttgccagtattttattgagcatttttgcatcaatgttcatcaaggatattggtctaaaattctcttttttggttgtgtctctgcctggctttggtatcaggatgatgctggtctcataaaatgagttagggaggattccctctttttctattgattggaatagtttcagaaggaatggtaccagttcctccttgtacctctggtagaatctggctgtgaatccatcgtgaaaatggccatactgcccaaggtaattaatagattcaatgccatccccatcaagctaccaatgactttcttcatggaattggaaaaaactactttaaagttcatatggaaccaaaaaagagcccgcatcgccaagttaatcctaagccaaaagaacaaagctggaggcatcacgctacctgacttcaaactatactacaaggctacagtaaccaaaacagcatggtactggtaccaaaacagagatatagatcaatggaacagaacagagccctcagaaataatgccacatatctacaactatctgatctttgacaaacctgagaaaaacaagcaatggggaaaggattccctatttaataaatggtgctgggaaaactggctagccatatgtagaaagctgaaactggatcccttccttataccttctacaaaaattaattcaagatggattaaagacttaaacgttagacctaaaaccataaaaaccctagaagaaaacctaggtattaccattcaggacacaggcatgggcaaggacttcatgtctaaaacaccaaaagcaatggcaacaaaagccaaaattgacaaatgggatctaattaaactcaagagcttctgcacagcaaaagaaactaccatcagagtgaacaggcaacctacaaaatgggagaaaattttcgcaacctactcatctgacaaagggctgatatccagaatctacaatgaactcaaacaaatttacaagaaaaaaacaaacaaccccaccaaaaagtgggcgaaggacatgaacagacaattctcaaaagaagacatttatgcagccaaaaaacacatgaaaaaatgctcaccatcactggccatcagagaaatgcaaatcaaaaccacaatgagataccatctcataccagttcgaatggcaatcattaaaaagtcaggaaacaacaggtgctggagaggatgtggagaaataggaacacttttacactgctggtgggactgtaaactagttcaaccattgtggaagtcagtgtggtgattcctcagggatctagaactagaaataccatttgacccagccatcccattactgggtatatacccaaaggactataaatcatgctgctataaagacacatgcacacgtatgtttattgcggcactattcacaatagcaaagacttggaaccaacccaaatgtccaacaatgatagactggattaagaaaatgtggcacatatacaccatggaatactatgcagccataaaaaaggatgagttcatttcctttgtagggacatggatgaaattggaaatcatcattctcagtaaactatctcaaggacaaaaaaccaaacaccgcatgttctcactcataggtgggaattgaacaatgagaacacatggacacaggaaggggaacatcacactctggggactgttgtggggtgggggaggggggagggatagcattaggagatatagctaatgctaaatgatgagtgaatgggtgcagcacatcagcatggcacaagtatacatatgtaacctgtacattgtgcacatgtaccctaaaacttaaagtataataataattaaattaaattaaaaaaaaagtttaaggatagtcacttaaatcaaggtgtgtgtcacttcatgaacaccaactttctatctttgctcttatccttacactctcttgccttctctgaactattctatatccgtcgctatctgtgatactatagccttccctatcactccaccctgatcacaatctgcattccaaattactattctatatagtatttatttctttccccatccagattacaaaagcagcacacatttgctctggagaattagcctataattagaaatgcacaaagaaaaaaatttaattaccttcaatctcaacacccagaaaaaaataaaaacaaataaaaaaacacaacatttccaggacatctttcagcttttctttcaaaattgccatcatacagtacacattgttttggaacttcctttttctcttaatatacatttactccaccttcctatgtccctgagaaaaggtttgtccctgagaaaaggttttaaatgtaagtagtttatttgcaaagtacagaaacatcagcgagggagctgagaaaattcaggggaaaattcaagctgaattatcaagcctgctatcactacgggcaactggagcttgacctcatgagaaaactctgggaaacaacatagaatataaactcagaattattctgcccaagggttgagggagatgacgtagttctataccagctcttgtgagtcactggttgagaggcacgccgaggctgccctgcagagattctctaagacttcagagaaagtccttaagcagaggtgaagatgttggtggctggaaataggcttctcccatttaaatagtaataaaacccaggggatataagacaaagcactgacagcatctcctataccccacatctttaaatattctgcatcatttgaaattctgtaaattaaaatgacttgatataaaacagaactgctttctattctacatttgatatttgcaagcaaatgtgccttatgttctgtttcctgggtagtgtgtctgggactaaaagaagcacatcagaaaattaaaggcaatttttgtacatcaaaaacttttgaatattcacaatttcaaatgggtcaacctaatatacataaaacttcaattatttcatttttaggttccataactactgtagcacttattttcaaatgggtcaacctaatctacataaaacttcaattacttcatttttcagttccataactactgtagcacgtatttgcaagggacttacttctacttctcatttctttctctcttctttcttttgctcatgaggaaacttacacataaaaaacacaaactaatgaccactggtacactaaaaacaaaacttttcagctgtggccaggccaggtgtgaatgaatgaatgaatgaagcaaaataagacttactttttcttcaactccctatgatttcttgcttccaactaataggcaagcaattactgtctcaaaggattgacatattaaagcacaccagattataaagtcaagtctgtggccaggcacaatggctcacacttataatcccagcactttgggaggccaaagtaggcagatggtttgaggtcaggagttcaagaccagcctggtcaacaaagcaaaaccctgtctctacaaaaaatacaaaaattggctgggcatggtggcacgcacctgtagtcctagctactcaggaagctatggtgggaggatcacctgagcctggaggtcaaggctgcggtgcgccatgattgtgccactgcactctagcctgggtgacagagtgagaccctttctcaaaaaaataaaataaaaatcaagtctgtgatagtaataattaaaccagcgtgtacgttaaaatgtttataaaactttttgagttttattttcatgaaaatatattcacttcacaagaaaaagtacatgaatataacaaacatcttttatatttagttttagctattatcaaataattcaaaaatggaagaagaaagaaagacacatatatgatcatttttacctgcaaaaggagatttcaacatgggactgtcctccaccattataccttcttgtgtcttgtgtcctagcttttgcttgtactgctgcacaaattctgtggaatgggcaggatgtataggattcattccatttgaccgtgtggtctgaatatcacctgcatgttcggaagagcacagtgagtcttcagtatgccgctctgctttcatcaggtcactgccagacaacatgctcaaattgacagcagggagcttcagaacagcagagtcggcctcaccaaaactcaaggcacttgatataccaaggtcatcatcctcaggaatgggattgtaccatatttctccttcatcatctgcatcattttcctcattaaaatctaaagcacagtttttcgataatgaagagtttgtagcgttacataccacatatgtacagtactctttagatgatttgaggaaagactgtgatagctgatgtttaggtagagacacaggtgagatggataaatgacttctatcttggcatttcttattttcttcttccagattaagaggcctcagagtactctgatatagccaattgcgtttctttgaaacagtgatgctgttaagtggcttatgacctctgaattcaatattatccttcagctcttcaagttctcttcccttcattgaagacccataggcattttcaaataaatctgttgcaaagatagaatagaaggtagaatataatggctggtatatcagaaagacatgtcacttcagaccagttatttaaaaaaatttttttaaacaaaaagtaacaacaatcacattcagagactaaaattgaactagaaaaaatttgaattttacatataaatatgatttatattatttagaaatcaaactgctagtacaagtgtcaaagaattctaagaaaaaggatatacaaactctgagcctgcctttataaaaactatagtgctaacaaagccttaccctaagcaaaacataccttataaaaagtttatctagaatgctttattcatagtatacctctaatcaatatttgaataagtttcaattcattattacaaggaccagaagtccttagaaatataatattcctcctacccttttcacacaaagattaactttcaaacctaacaagaaactatgccttactaatattaaaatgtcaacataacattggcttcctatccacataacacaatggcaccttatgtagggtttaagttctaaatatctagggcagaactaaaaacaaaaatcccttcagaaggccccagattagaagcaggtatgctgtctcacagtatgcactacacagctattattttttttggccaggcacaaacttaagcagcagagaaataagaatgaacaaaacaatcccttcccttaagaaattcatagtccaggccctgcgcagtggctaatgcctgtaatcccagcactttgggaggccgaggcaggaggatcacgaggtcaggagtttgagaccagcctggccaacatagtgaaaccccgtctctattaaaaatacaaaaattagccgggcatggtggcacgtgcctgcagtcccagctattcaggaggctgaggcaggtgaatagcttgaacccaggaggtggaggttgtggtgagccgagatcgtgccactgcactccagcctgggtaacagagcgagattccgtctcaaaaaaaaaaaaaaaaaattaatagtccaatgggagacctcaaatgcttagatatatgcacatcttaatataagtaagactctacaaatgtatacataacattaatttcatctaaagaggaaaatattttgtgtttccagagttgtaaagcaggcttcaatgacagtccataagctaagtatataactatcattataataaaaattcaccgtacataattaaaaccacattttaaaaatctaagatcatctcaggtttctaaattatggaattatatggtcaactcatcttattggcacagcaagtaaaaaataatggtctaaaaatagagtgataaaacacactaagccacaaggagcttaaaacaaccaaaaaatcagatttatgcagaatcaaggttttcagtaacctcccttctactgaaaagaaaatcctttaaaaaatccaaatgtccagcctgggcaacatggcaagaccctatctctacaaaaaatttaaaaattagccaggtgtggtggcacacacctgtcatcctagctactttgtaggctaagctgggaagattgcctgagcccaggaatgtgaggctgcagtgagctatgattgtgccactgcactctagcctgggcaacagagtgagaccctgtctcttaaaaataaatgaataaatatatttttccttttacaaaatcctaaacatgtacccaaccaagcagattaataataaataaataaataaacaaaccttaaacacaaattgcaagtcacattcaattccagatgcaggaattagactagaaatcagaaggcaaggaagctcccatgaatacctactatgccaggcatttatttactccacaaatgagtgactattatgtggcaggcatgagagataaagaagtaaggaggcccccaacctcatttaacctctagaacaatcctatgaaacaggtatgattaccatcatgagcctcaaagagtttgagaaatatggtcaagtcgctagccctaggattcaaatttaagcctgtctaaccttaaaacccatgctctactcaccatgctacccacaaaccacacgatgctacccataccatgctactcacaaacagtacagaagtaggcaaccctttctgaacatggggatattcatcccaatttatcttataaattaaagtggctgctggtaagaactaagtgaaataatgttcaaaatacttgaaaaactattaagttctactcaaaaacgccaagtaacttgttcaagagtaccttgttggtaaatggaaaaggcagcactcaaacttattctgactccaaagtttgtggtgatatatctaggctactataagggaaattcaaaagtctttctctggttctatctccattacacttaaaattaacaactgaaaattaaaacatactcagcaatcactggggtttctgggttttcagtgatcacatgattttgccaggtgcactgaagtctaaatctatttcacatttaagttcaaatccagtattacttaacagtatttcagaccttcacaggatattatagtttgacccaatttaaatttgaagcaaacagtataaaattacattactcatgatggctatgagccacatcttattttatctttttctcagacatctcttagaaattccaaatttttatatagctagacacattcattattttaaatctttttggagttttctgacatacactataaatgagtctttgaacatgtttctactacattgcaaggaactacagtgagaaaaataaagctaccagtatcccatatttaagcaagttgatacttccattgatataatcatttaatgaaagtataatattaaaaggaatttttttttactagatagggtctcactcttgtcacccaggctggagcacagtggcaccattatggctcacggcaacctcaacctcccaggcgcaagtgatcctcccgcctcagtctcccaagaagctaggactacaggcttgcaccaccacacctggctaatttcttttttttcttttggtagagacagggtctcactatgttgcctaggctggtctggaactcccaggcttaagtgatcttcctgtttccccctcccaaagtgctggaattacggtgtgagccaccatgtctagccactattttcaatgaaattacaaactacaaaagcttgaatccattcactctgattgctattgccgaatattttaaaatacatgatgctgaactttaaacttatagataaatggcacattattataatttatattgtgtattataaatatataatattacaaaggccaaatttatttattaaactgaattaatcaacacattattcaagataataaacttgagcaattatttataattaaaacatttttatctcacttaaattaaatggatccacatgaatgtaaattcatagatatggaaagctatttgcaatctgccctcccatttaatgcaacaatgtttaaccatattagcataaatttaagagttttagcttcatatatatgaaatatgttattcataaattataaatatttttgtagagaaagggtctcattgttgcctatatattgcctataaattataaatttttttgtagagacagggtctcactgttgcctatatattaaattatatattatatataaaaatacatacaatatataataaaatatatttcatatataatataaaaatatgttatatatacacacacacatattgaaagaaggtccaactaaaaatataaaaataagtatgcaaagttacaaggcaaaaaaagtccttagtctcttgcaactatacatgttatgggataattttcagattctaattaaagtaattttactttgaatctgtaagagaagaaagaaatggcaattaaaagtttttcactcagaaaaatattccacacagtggtgaactacccaagtcaattctgttttctcaactattatttcataataaatctagattacttactgaacatttaactagtgcccccagctcaaatgccatcagcaaattttccaagaaattatatatttcaaccctcattgaaaatctgtagtaccggctgggcgcggtggctcacgcctgtaatcccagcactttgggaggccaaggcgggcggatcacgaggtcaggagatcgagaccatcctggctaacacggtgaaaccctgtctctactaaaaatccaaaaaattagccgagcatggtggcgggcgcctgtagtcccagctactcgggaggctgaggcaggagaatggcgtgaacccgcgaggcagagcttgcattgagccgagatcacgccactgcactccaggctgggcaacagagctagactccatctaaaaaaaaaaaaaaatgtgtagtatctagagagacatcttttcatcattttaaaaattctgcagaaataaactctcttgcttttccttacttctctttaaaaatcccaaataaaagtatcttatgaacactgtattagatgtttaaatctgttttaaaagcattaaacattttaatatttattaaaatcctgtttctaaataagtacaagtatcccctgcttagagtcaaacttggcagtccagatgaaattactagaataaacttaagtcttaagtttctgtgtgtgtatatgtgtgtgtgtatctttatctttcctagacaaatctaaaaggaggagagggatggaatgaaaaggaaagaagcaccttttttattttcattcccttgtggctagcaataaaaaccctaaagaaaaaaaaaagctgtgtgttagcttttgagacgggaaagtagagaagaaaactctgagaccgttttcagttccacaaaagtaacagggagcagcaaaagaaaggagcacaaaagatgagcagaataaataaataccccaaaaaggtgtcctctagctcaattcccagtgctcctcaaggcagtactcctcaacttcgaccttttcactctccatctagaatcctaatgatctgaggcaaagcagtattctcacaaagcctgcttgccttccccttgataataacaagtaagtgctaggcacagcaccaaatggattatctcttttcatcctcacagcaacctgaggactgaggctacacaaggttgagtaacttatccaaggtcacaagcctggtaagtggtagagtctgaccagaaacccagaatctctattctgttaaccattgtcctatacggcctcctctcttgcatttccaaaatctcactaatacttgttagttaagcaagatgaggccaatatagagggaactgctcaaatgtgtaatatataagtagtaagtatattaattcatatacataaaactgaagcaaaaagagcccaagtgctttgctctaataggggtagtttaagtaccaagtatcagaataaggtagaattttttgtaaaacttcggggatgtgagagctctagaagcttactattcaaaagtacggtacaccagacagcagcatctacactgggagcagaatctcaggtcccaccccacacctatagaatctgcatttcaacaaaatttccagggaattcatatggacattaagtttgaaaagcactgctctaaaacattgaaccacattttgagtggcaaaggtctagcaaacagccttcttaaacacagcatttcttgggagccactggtctagaaatgtaggactttcaaatcaacacaacactgttttctgctgaatttgtaattcttgaagttttccagccaccagcaactccaatgttccatgacactcttccagaaaaagaaaaaaaaaaaaagcaactgcacttgctttctagcaccacaatagcagaatctctcaggaagagatttaaaattagaagactgtcaaaaactatataactattgctactcaccttgaaaagggcaaatacagaaaaaaattgttggaaaaattcataaagattatgcaattcataaagataaaaaatcagagttacaaatacttgagaaaagtagatgggaatcaagtcatagtgtcaacttcactttaagatggttaaagatcataccaaactaattaatactaccttaaaataattgtctaaaaattttagacaaaatactaagttatacagtctaaagttttttctttcccagaccatgtagcaggaaaagtggagtcaaagtaggctaattattttttaaagcaataaaaggtgcttttgaatttgtttctgaaaactatatgctaattaaaacttatttataaagatttataatgatgtatagttggcaaacacattaagattcctttgtaatcttaaggcttgcagaaacttgacaatttttattatgtgtaatgactttagatttctgaaataatcatctcaattaggaacaattcggccaatctgcgaacactacatacttaactgcatcaaatcatttgtcattataatactatcaaaagttcttagtaggagccagaaatcaaaatagaaaatcatttgtgtttccatttgtcatatagtctcaaaaattttcacaatacctatatgaagtatctccattccactgaataattattctgtattacaaattctaaatgtaattttgacaaaatatcttatgaataatactgtacagaaaaatgtgctataaaccttttaggatatttaacatctttacataaacaagaatgtactggttcatctagaccgctccaaataagttttgcagaaaacatgatttaaaagtagaagtcaagtgacatcaatttcaagtaagtaaatatttaaaggtaaaagtttaaaatgaatacagcaaatgcttttttaaattttatttatttatttatttatttttttgagacggagtctcactctgtctcccaggctagagtgcagtgacacgatcttggctcactgcaagctccgcctcccaggttcacgccattctcctgcctcagcctcccgagtagctgggactacaggcacccaccaccacgcccggctaattttttgtattcttagtagagacggggtttcacagtattagccaggatggtctcgatctcctgacctcgtgatccgcccgcctcggcctcccaaagtgctgggattacaggcatgagccactgcgcccggcccagcaattactttttaaaatgtctttaaacccggcctaagattctcccatcttctttgcaactttgaggaagttacttaccccgctatgccttgttgaaattcacccatatcctcaatccaagcaatttaatagaattaattggatcagacctttaaagaactctagagtctctgatcttatgtaaacaggggcttttttcaaactcatgacgccttgggtttgaatccacatagtagtttgaatccatacacaggtaccaactgagtgatcttgggcaaactgcttaatccctctgttctttttcttgtagctgttgttaaatgacagcatatctccattttgggggctataaaaattgtatgagaaccacctaatgtatccagaatggacttagtaagaccaactaaacttcatgaaaaataatttttttaaaaagctctccaaatctatactagatatgtaaacactgcacaaattattttcatctctcctgaaaaatgaattagtggtttaaaaggaagtaacatctgagagttgtttaaaccagagattatggtagctttggcttagatttctcataaaatatctaaaatattatcacataataattgtttcattttaatttctaagttagcagtttcatttaattagttgcttaatgcaaaaatcaaattcattcttaaaggaactatatttattactttaaaaatccttgaatgtttactactgagggcattaaaagccatcacatggtaagtgttttagctctgtgacaaaagggtgaaaaatatttgactattttttgttatggctgaaattcaactatggtaccaagagttaaaactaagccaaagggggggaggtaaaaatattgtggcaataaaatataataaatgattacaaattactcctggaaatgcatgtttaatatgaacttagtataaagtacacctctcaacaaagaatttacattctattatccttttgttcaagtgaaatggaatatttaaccttgagaataaaatttgacaggtgtgtattagagccgtatagacaggaaaaaactttgcaagttggcacacactttgaatgaatcatttgatttgtcttcattgtttgataagaagttttgtgaactttgtttctccccactgttgtgtgtttattggttaaacaaagttaatgtgtataaatccagtcctgtaggatttataattactaccagagaaaccgccaagtactgtgaataccttttacatttcaggatttaatgttttccaaattattcctgacttataagtctttatgatcactaaaaatttttatatgtaagagtattcaaaagaccatgttgttttggctcactttgaagatattatactcctttcaggaaagatattttgatatttacaacataattgactggtttctagaattgataacctaaaccttcagtgatagttaaaaatcatgcacatacaaaatagggagcttaatcctattataaggatcaatatactttttaaaaaactaatttacttctcttataaataggatttaagtttgcaaatgactgctttaaaaacaaaactacctgaggaacatttttcttttgattaaaatgttagtgtccttgatttttcacaataaaaagattactttgttgaggtttctttgtcggggggaggcaggtggagagatggtgtatgtgaaatactacctgactaaaaaattctacttatggtagggttttttttgtttgatttgtttgggtttttggttgtgtgtatgtatgcatgtgtgtgcgtgcctgggagaggcaaaaaaaaaaagttgtaatgagtaaaatgacagtttatgaagcctataaaatctaccttgaatcaaattcaaatttacaaactccacaaaagtctacggatttgcctagagctacaaagaataaaaatcaagacagtgccgcccatctgtaaacctactaaaagtgtgttatacttaacctttactcctttaggtaatacttagggaatagacacactggtttttcgagaagaaatcacaacctcaattcttcatgccattgtctgattaaaaagaaaaaaaaaagcaaaacgagtaaatgcattacattaagtaaccccgaaattactttaagctgccacttacatgacacttactttcgcccggtaacgtacctgtcgcaaaaacataactttttcttggctcttaagacagaagcccagtcggtaaacagtaaggctcgcggtgctagcattttcatcgcaaagtatcctacctgtcagcgtaattctttggtctggaggcaccgacaggacacggttttcacgcactttcaaagcgcccacatttggggaggctgcctgcgttcctgtgactttgggagccgtcccacgggcacgacccttcattcccagggacagcagacgccctttgtacatccacttctgcagcttcttgactgtcactgccggcggcctgaggaaggaggggccttcctggcggtctcctttgccactgcgtatcacagaggaccccgctggatccctgaaagggcttcccgaggagcagccgtggtccttgcagcctggaggctggaggccggtgggtgcagccgcccgggcgcggtccccactccagccgtccatcctgcctccacgtggcgggggctcgtcccagtcccggtgcgcgccgcacctgatccagctgtcgctcggccaccgctggaagggaggcggcttggcacccacccggaggctctcgaggcttctgctgcaggacggccgcatccgaggagtccgcagctggcctccccgcggctccctctgaggcgaccggggcggggacacctgctgccgagggcgtccgccgcctccccgctccccgtcccgggggcaggctcggcggtacgcggcgccgcgggaaggcggctggcccggagcccgggctcccgcggggaagctgtgatccgccaagcccctgccgccccgccgcgcgcccgagtcagggggcaggtcgtgcatggcctggatcagcagataataggcctctcgcaactgggtccgcagcctgcctgtctccaggcggccgccctccgcccccagggaggagcccgccgctgggggaggcgggggacgccgttccgcctccgccccctcaggctcgggcgcagactgcgagccgccgggcaggttttcgtagtagtcggcgtcgtagtcgtcttcgtccttgtcgtcttcctcctcctctccgctgtcctcggagccctccggggagtgcggaggggcgtgagcgagcccatggctctggggggcggcctcctgcccgccgcgcggccgaggcccgagcgcccccaactgctccgggtgccctccggggacccgcgccccgggaccccacgcctcaggtgacggcgagggctgctgtaggctccgcccgtgtcccccggcgtgctcacgtgggagggtgtctgcggcaccccaggcgtctcccgcggctgccgaagaggccgccaccgcagctgcggctgccgcccggagccctagccccccggtgccgcggggaccccgccttccccggagcctggacagcgtcctcctcagagggtccgccatcccctctgccttagccgcgaggctcacccccgccagggggagaggtcggagccccgctggggagaaaaccgcgctcgcggaggcggaggcggaggcggcggcggctccccatgaccggcgctggccctcgccggctcctcacatacttggcataactctgccgcgggaaggcgtgggggagggcggtggcgccgcaacgcgcatgccccggagccccgggccgcgacggggcgcgcgggccgggggcggcagaggtgggttctcggggtgggcgagtggtgcaggtggaggcggagggcgcgggccggtaggttgagtagtaggtcggctgaagctgaccgacggaagcaggggtgggcgcacagagcgcgaagggtgcggggagagttgaggcaggggaaagaagaacgagcaggaacgtgagtttgggctggtggctgcaaagttttggttagggagcccgagaaagggaaagtgccctcctggctgtcaccccagcaccttcaccgccaccgctgcacgaggtgtgtcttaggcacagcaagtcctagcttgagagaaaacaaagattgttttgacggacaaagtacgagtgcaggtgtatctcggtgcatgtgttctagaaatgtatcaatcattttaatcgcccagagagctagctagctaaaagaaatttgcagcgattccttttctataagagttcttttatcaaaaacaaaacaaaacccacccaccgatgtctcttttaagtctgtttttccttctttatttcagttaatgcatgctaacaaaattattacatcagccaaaacttgtaaaatggagccacaaatattatgtccctcatcaccctacctacaagattatcatacaggtttgcagctttctaatataaaaaagttaacacttcattttaatttaaatagtgagttgagaagcaattgaattgaagttgagacacagtgtaatctagaaataccggctgtctcccaaaaacgttaaattccaggttctgggcagcagttgcaaactcaagtacccctcgttgccagagattaattgattcagtgactgataagaatcagtcgtgctatcatccctgatttgagttactttttttagtgtttacatagtagaaagggcctttttctgagttactcataaatatgctgacacctagcacagtgcgtgcacttagtagatactcaaatacttaagaaaatatttgttgaataaataaatgtttgcattactgaataaaatgaaataattttgccctaatttaccttatttgcaactgcagtatattttcctatgtcagttgttttcttgttgtccagtggctccaatctctgaatgtgctttgactatactacctttattagtacctagtctctgctttctggaataattgttacctgcatctgagatttgcagataagagagaatatttgcagaaatcttacccactctctaaaactctgctctaggccaggcggggtggctcatgcctgtaatcttagcactttgagaggctgagatgggcagattgcttgagcccaggagttcaagaccagcctggacaacatggcacaacctggtctctacgaggaacaaaaacaaacaaaaaaaaaaacacaaaaaaaattggctagatgtggtggtgtgcacctgtagtcctagctactctagaggccgcggtgggaggatcacttgagcctgtgaggctgaagctgcaatgaaccgagatcatgacacttcattccaacctggatgactgagggagattctgtctcaaaataataagaataaaataataaaactcagctcaactgccttcttgtttatgaagtcatctctgatctcccagacgggaactcaagttctaaacttcaatattactttattcccacccatagtatagttactgttttttgttttatacagtttgtatacatgtcctttctcctttacaagaaaattcataaactccctaagggcagaaactgtttataattgacctttatattctccacaggagtataactttagcatcttatatattgtgcatgatgaataaacatttttgaattaatatcaattttaatttagagagaacaagtggctttaattccagtctattgcctaactctccactagaccatgctatattagtgttgttttaaaattctttctgcgatgagtaagagacacagtttgttaaataatcttaattcgtatctaagaaaatgcaatgaaatgtgatgaaatattacactataatttgcatatattgatatttgtagttctacaatattttcattccatgggccccaggctatttaatgaatagtcaaggcataaaactatgtcccagtgaaatattcccacaggaaatgactgatagcaaagttgccaataatggttctataaacacaatttgatctctatctcagaaattgtttccattccaactctgttgcaaaatctttttatgctttgtagttaacatagctgttaagaacactataagctgcatatatatctatatgcagatagatatatatgagtagaaaaatataaccttgaagatctggattgaacttcatcccgaattcagtttatccacttgttcaggagttataaaacattggttattggccaatataaaatactatgcattgttctaggcgttactcagaactaagtttgatgcagcataccacgactgaacttaatgcttctttaaagttgagaatgttctaactcatgaattcacaattttaatcattttgtgtcacaacagaaattaataaggcagtcatggccatatgacactatttaaagaccttaataatgtaaattccacttttctgtatgtgcattacacatcaataaaaagttggtaaaaatgtaattctaaagagacaatgcccacaaaacttatattatgcctaatataattaagataatgacaagatatgaacataaactatactttgtaaaatctttttttacaatttgtatcctattccctcacttatctcaattttcatatctttctaatccatagattcccatgaaaattaggggatgggaatcatttttcagtgtttatacttgtttctcagtgactgggaaataattttgatgccccatctattactaactatgtgttggcactgtcacaaaagatataacaactacgggataacagggctccagtaaggcagggatccaaactagggatggagtagcactgactcaatctgggaggagggggagaaaagcagggcaagttgaggcagagggctaggtttaacagtaatagaagggaagtgtttaggtatgttatggttattttctagtcaatttagagtgcatttctgtctcactgatgttcagtcttccattatactcttagtggaaccaaaggcaaatttagctctaccatttgtccagtattgtctccctaaactgccttacagggatgtcctggagtagacctccctcgtctgccatgcaactccgttagtatggagtaaaatatacttcagcctaaagctgaccacgctaacactgcactgagaatcaaagatggcatattctcagtacagcaatttgtactatttcataattaatatctggcaatttgcaatattgcttaacccatccccacccccatcaaagtaataaaaaagataggctgggcctggtgactcacgcctgtaatcccagcactttgggaggctaaggtgggcagatcacttgaagctgggggttcaagaccatccgggccaacatagaaactgtatctctactacaaatacaaaaattagctgggtgtgatggctcacgcctgtaatcccagctacttgggaggctgaggcatgagattcacttgagcccaggaagtagaggttgcagtgagcctagatggtgccactgcactgcagcctgggtgacagaacaacactctgcctcaaaatgcaaacaaaggccgggtgcagcggctcacgcctgtaattccagcactttgggaggcccaggcgggcggatcacgaggtcaggagatcgagaccatcctggttaatacggtgaaaccctgtctttactaaaaatacaaaaacaattagctgagcatggtggcgggtgcctgtagtcccagctagttgggaggctgaggcaggagaatggcgtgaacctgggaggcagagtttgcagccgagatcgtgccactgcactccagcctgggtgacagagcgagactctgtctcaacaaaaaaaaaaaaaaaaaagggaaacaaaaacaaagtagtaaaaaagaacttttgttaagtgcatgtgtattttgtgatgttttagaaatgtatgctttagaatagtcactgatatttcagaatctcttattatattaatatacttgggatatatagaacaacttgcccaagctcagcgtaataagaagaattcaaatcccatctgtctgattccataggcactacactcctgtgttatttctttgaatagaaaaagagactagacagttgatgtaataatccttgcactggcttgaacctttgtttttataaattatttagttggtcacctttcagaaaagagtttaatagtttatgaacttttgtgaaatgcatctgaacgttgggaagctgcttgttaaacatttgaatgcttctcagtacagtccaactcaagggtgttagaactaaatcctatatttccatttagtgataaatctattcatattacaccacaatgcaaaagtgcatcctgaaatgtactctggtttcaaacgtaggacgagctttaaatacataaaagacaaaatatacactcagataagcctgtttcaaaagtaaataggcagtgagaaaagggaaagtgtaggctgcctttcctaaaccacatcattggacttcagggtcacaaattagttcatgaagggaacttgctctgtttcaaagttgtcaatctaataaatgaagaaaaattgatacaatgttgccattttgaaataatggatctaggcaaaaatcaccagtggcttctaacatcagtgacagacaaacggacctacagcctctgatcaagtatacaccaccacctatgattttattcatgttagagttcttagaaaaataaaacctgtgtctgaccagcctcaagatttgattgccaatttccaggaattatagaaaacaaagaagcatgttaaataacaccatggggatgcaatcaacaaaatccagactgtgggaagctacaggacaaaggccccagtttcttcaacatattagccaattgtagtgaatggactttatttggagtctgatctgaacaaacatctgtttaaaaaaaataatgagccaatcaggaagatttgaacactgactagatatttgatgatattgaagaattattgtaattttagatgcgattttttgacaaatagcgctttatctcttagaggtaaatattgaaatatggatgacaagatgtaaagccagggatttttctcaaagtaattgcagaggaaagagactgaggatgtggaagaatgaggatgagttttgggctggtaagtgttgaaattgggtgatggctacatgggggattgttagactagtatctctgtttctgtacatgtttgaaattttccagaatatatttttaaaatcttaacatgaatcagacttttataatagatcctggcaactgtttaaagcaacacaactttgagggcagccaaatgcagaggtggtaagagaatattgaaatctaggtccaagaactataattccaatccagacctgaggtggtataatggaaatgactggaaatcagacagaactagtttaaatcctaactttatcagtcatataccccaaaaccactgatcatggaagtgaactcttgttcatctttgctaattccagaccattattccccctttctaaaaatctgcggctcttttgaaatatatgacattaaatgatactactgctttttgctgtttatagtcatctgctttttgtagttatccactaacttccctccattcattctagtgtctccctcattatttccttttcttcaccatttttcttgtcatcctcttggtgatttcattattcacaaaaagggtccatccaataccctggtctcttattttcttgagtttctctttaataatcttaacctccacccacctcagccacacagtcctagagtcttacattacactttgtcataaccaataactacaaactctcaaaatatcacttcctattttccagctcactccctctggcagtcagactccattaactccatcccactaacctacagtctctatcattcccccttctgtcctttcctccctgctttctctgttgagattgtatggtccttgtagaatcactcccttgcacatatcaccatgctctgttgtccctcttgatataagtctttgttttgtcttttttgtagagatggggtctcactatatatcccaggttggtctcgaacttctggcctcaagtgatcctcttctgcctcccaaagtgctggaattacaggcgtgagccactgcacccagcctattgtctctctttcccattgtcctccttacttggcaaaacctcagccctggttgaaactgattttccttcatactctgcattggcacttggaaggcttaatgtggctggagaaaatcacatcacagagagtccccaggtgttgctagataacttcaccaaaatatccctggtccattcactctcttctccactttctgacaccatcaacctctcctcactctcagttatcacttttcttcttgttacactgagataacaaacactcaggagtttcctcatccttccactaccggctataccagcctgttttatctgtactctgatactctgccatgtgcccgctgccctgttacaatagggttgcccctgcccctaactgaggccaaatctcttgcctcctctacctctgtcctcacccccctcctctcactaccatccattcatgctggctaccttgttgcacactaaatgcactcctgcctcaggacctttgcatctgctctttcctctgcctgaaatgatttcttcatgacctcctccctcctttcattcaggtctcacttcaaatgttatctcctcagagagaccttccctgactcccccaccatctaaaataataccctctgcatttcctatccacttaatttttctttatttttctttattatacttactactatttaccattatattggatgtccatttatttgtggtatcaccaccttctaaatgccagaacctcactttgcagaagatttctgtcaggcataggtgccccatacatgtttgttgaatgaaagtgtgattgttgtgcccaagagcaagttaatatatgtttccatttcctccatggtaaaattggtttgccattgtttcacagggcgttgttaagagaattaaaagagtaacagtcaaggtagatgaaccttgaaaacattatgttccagccgagcctggtggctcatgcctgtaatctcagcatttttcgaggccaaggcaagtgaagttcgagaccagccttggcaacacagtgagattctgtctctataaaaaatacaaagaattagctagagataatggcctgtgcctgtagtcccagctactcgggaggctgaggtgggaggatcacttgagtcccggtggttgaggctgcagtgaggctagattgcgccactgcactccagcctggatgacagagcaagaccctgtctcaaaaaaataaaaaacaaaaaacaacattacactaagtgaaagaggccagacacaaaagatctcatagtatgattccatttatatgaactgtccagataggcacatccatagaggcagaaagtagattagtagctgctcgaggctgggggaagaaggaaataaatgaatgatttctaaaggacatatgttttcttcctagcatgatgaaaatgctctggaactacattgtgataatgattgcacaaacttgtcaatatactagactttaacatggtgaattttatagtatgcaaattttatctcaatttttaaaaagaggactcttttctctccttatttttattattattattattttttttttgagatggagtctcgctctcttacccaagctggagtgcagtggcacaatgtcagctcactgcaacctctgcctctgggattcaagaaactcccctgcttcaacctcttgcgtagctgggactacaggcgcctgccaccacgcccagccgatttttgtatttttctagtagagacggggtttcgccacattggccaggctggtcttgaactccctgcctttttatcattagctatcctcccaactaatattcatggaaaatcttaaaagaaaacgttttattggaacttttaagaaaggattggagatacaaatagcttgaaagctacttcattgggtaattgttgtcagaaatactgtcacattcccaaatgctagtttttcaataaaacctttgattctatagagttttcattcactaccctcagtggattggttctagaatcccgctcagataccaaaattcacagatgctcaagtcccttatataaaatggcatagcaattgcatgtaacctaggcacatcctcctgtctactgtaaatcatttccagattccttataatacctaatacaatgcctacatatcatttcattcaagtggattcaacacagtactcagtggatggcaaaatcaagttttgctttttggaactttgtggaatttttttttcaaaatatttttaatctgaggttggttgaattcatggatgcagaacccacagacatggaagaccaactgtctactcaacaaataaatacaaatggcttcttaaagttcacttttctctatcaactaccaaagaactcaaatacagaactacaaaattaaacaagacttctggccccctcaatctctcacttccaccaagaaaacaaaaacattttccagcatttagaaataacagcctactttcatttcctgctggaaagtcatggttctttcatgtaaacaaaaccaaaggacattacccttatagcaaaaaaactacctggaaaaaccataattacactgaaaaagataggtaagtaaacatatctttagccttttgtattcttttactggataattttctctaaggtagagggtgaggagctatatattatgtaacattttagaaatagcagaaaaccaattagggggaagaacacaaaccaaaactacccgataacttctttcctgattaaaattatcttccaacaattcaattatatgtaaagagggaaccgtggctacacacgtatttattaactgtttctggcggtccagaggaagctggattatttttaccataacaaaatcagttattttcagccgggcgcggtggctcaagcctgtaatcccagcactttgggaggccgaggcaggcggatcacgaggtcaggagatggagaccatcctggctaacacggtgaaaccccgtgtcttctaaaaatacaaaaaaattctccgggcgtgatggcgggcgcctgtagtcccagctactcgggagagtgaggcaggagaatggcgggaacccgggaggcagagcttgcagtgagccgagatcgcgccactgcactccagcctgggcgacagagcgagactccgtctcaaaaataaataaataataaaaatcagttattttcctcccagcctcattttcataagcgcacatacaactattaatgactctttaattttactgtttaattttaattttactgtttaattttactgtttaattgaggtgtttagaaacacctcaattttatctcagttgctgttttttgcgtttttttgtttttgtttttgtttttgttttcagacggagtctggctctgtagcccaggctggtgtgcagtggctcaatctcggctcactgcaagctggttcacaccattctcctgcctcagcctcccaagcagctgggactacgggcgcccgccaccacgcccagctaattttctgtatttttagtagagacagggtttcaccgtgttaggcaggtcttgacctcctgacctcgtgatcggcccgcctcagcctcccaaagtgctggggtcacaggtgtgagccaccgcgtccggccctcagttgctgttttaaagggtggtgcatgcatgcaattatggcacacacaagaaagtgagacatagtatatataaggccagatatgtccattcagtgtagaaatgatacgttccaagaaacatatttcaagtgaattcttaggtcaggagttcaagaccagcctggctaacctggtgaaaccccgtctctattaaaaatacaaaaaaattagctgggctggtggcaggcacctgtaatcccagctacttgggaggctgaggcaagagaatcacttgaacccaggaggcagagtttgcagtgagtcagaattgtgccattgcactccagcctgggtgacagagcgagactctgtctcaaaaaaaaaaaaaaaaaaaagaaagtatattctttcaaaacaagaaagtttttaaagtaacatgtttttaaaaggttatcaaagcagtgaaagattttgcttttttgtatatttgagataaatactgataaatcacatcaggaatttaggatagtttctttgctctgaagagttctctctccaattattcatcacaagacaagatagtaattgtcaaagaaattcttttctgcattattatactttccttgaaggctgagatcatatgttatttattgaatccattgggcccagcactgcacgcctctacctatcttctgaagtctggacatcagtctcaagtcacattcctgtcaccttctcagcatttttactacacaagtcatccaagagttaacaaagttatttcacacactaacactgaacccaagatgaagaatagaactatctattttgtcatcagagtagacaaaatcaccatctctgactcatttaagatgaagcatagcccaggtacagtggcttatgcctgtaatcccagcactttgggaggccaaggcaggacagcttgagaccaggagttcaagaccagcctgggcaacatggcaagactctgtctttacacaacattaaaaaaaaaaaaattagccgggcattgtggtgtgcacctgcagtcccagctacttgggaggctgcggctggaggatcactacttgagcccaggtgttcttggatgcactggcaccactgcactccagcctgggcaacagagcaagactctgtctcaaggaaaaaaaaaaagaaagaaacatgacaattttccaagagaagagcagcttgaaagctatgtttcattgcataatcactgtcagaaatgctttcacatactatattctagttttttgatagagtcctgaagtctacatattaaacaaataaatacagtggcttcttattttttttttttttttttttttttgaggcggagtctcgctctgtcgcccaggctggagtgcagtggtgcatctcggctcactgcaagctccgcctcccaggttcacgccattctcctgcctcagcctcccaagtagctgggactacaggcgcccgccaccacgcctggctaattttttgtatttttagtagagacgggatttcaccatgttagccaggatggtcttgatctcctgaccttgtgatccgccagcctcggcctcccaaaatgctgggattacaggcgtgagccaccgtgccctgccacaaataaataaaatacagtggcttcttaattaaaagacaagaggagactacagagtcatcagcaacactgtgatggtcactggagaggtcagtaccctatggaagctcagtaattgctctgaaaataaaaacctaacgtagaattcatgcaaagacaacttgattttacacatctacaacaggattctaaactcagtgcctactggggccaggcaggtcctgtcaatgagtgttcaagtccaaacataaccagaggacttagtaaaaaaaagtacgttctcagctgaaagaatggagaactacaaagaatcattccctcacccttttcccatgttcctttcttccaccctttggctaaggaagtgagtttcacattttaaaatatactacataggctaactctgggtgggtcaaccaaatacatgtgctagttgctagtttttgacctctgatcttcagggaacaacacacaaaaattttttccagaagaaaggaatgcataatatcataattttaaataatttaccattagcctcatgactgaaagggttaaggtctatggtaatgataaaaattccctctcttgccttatttttcatcattataatctcagtatcagcaggagcctcataattgcacagaatttatgagtagtaaactgtttttactttacctcttagtctgattctcaccaaaaacctttgggaataaataagcagaacagagatgattgtaaccacattcagatgagatagctgagacccagaagggacaagccatttaatcacgcttattcaggtttgaggatgatgcatccctagttttccaagcttctagtacaagtatcctcatttgtaaagcatgtttaatctgatgaaagtgatgctttctttaaaatcatagatagcttaaaaacatggaaaagcaaagataaacaaaaagaaaaatctcatgtaaccactcccacagtcataattattaaaatggaattcagttttcaacttcacgtgaagagtagttgctggaaaccgtgtttttcaatatttcaacctcataagtagtactaaagtaatattctggtaatacagaacaattatcttagagtgtgatattttattgtaaacagcattggtacttgctagtatattggatgcaacatgtgtgaggaaggaaaaagttaaaaacttattttacaatgagaacatcaaattacccagtaggaatgtcatttctaccaggatctctgtgaaattgctttggtggtaaatgtttttctttaaatgtagaagaggttcactaacctgaaaacttttttttttcaccatgcacgccagtcagcaacctcataattaagtgcctgaagattgttcaaataaaaagggaacaaagctcgcaacagagttcaatgcctaagtcaagactgccctgaggcatgagaagttttatgtctctgtttaccctagaagtaaattaaataaatgcgtatttaatatatgaatcacagttatatttggttcacatattatagacaaggagaaacgagaattctttttcagataaaatttcttaataaaaagcgaacgtacacccacgagtctggatacttctccccagaatgcagtcataacaaatgcagtataaaataactgcaaagccgaaaagcaaaccagcgttttgggtgttctggttttgggtttcgagtgttacatttctaattataaaatgtggacagaatgcacatgcagcaccacacctatttgaagactctgaaagtgaatagtagaaggtggattgtggaagatcagcattcaatggatgaccaaaatcatgatgagtttacttttttttttctttttcttccagtatctcttgacctgaatgcaatgcagccttaaacctggaagtgggcactggggcccaaaaagggagagctccaggagaaaccctctaggtttctgttacagagctgggtaggaactcctaacgctcagagaaagtacagaagtcctcagagttttttcttctctctgctgtcttggattccaactctcaagcagtctcgtaggggtgatggtggggaccacaataggaacctgcaggagccaacactctgtgagaaggaaactttctctctgaatggtggaactgtggccccaagagagtggggcaagcccccattgcctttttctctctctctccatccttctgctacttggccctgtatgcaagcacagttatagaagggtgcagcagagatgggtaactaaagcctcagcttggtagccgaagaacaaaaacagggagcaccaggggactggaaagaactatagaaactggggagatggattatgaactcctgaactcatcagtgagctctgcatacatgaatctgattctaatcagcacaccaaagactttgaaaaccaaactaacaaatgtgccaccatccagggcccaaaatggccaccagatgacctatatatgggacagatctgaatagcacaacagaggcttaaaaagctgagctgacgttagaaccacagctcacagaaagtgggttgaaacttgcagccttaacctaaccgggtcaactgtctgctgaaaaaacaaaccaaaaaaatcaacattcactgtagaatgtaaataagacccagagtttcagaatatgatattcaatatgtccaagagacaatccagaattacttggaggtagtcaggcatgatggcttatgcctgtaatcccagcactttggaagacttaagtgggaggatcacttgaggtcaggagttcaagaccagcctgggcaccgtagcaagacctcatctctacaaataatagtaatttaaaatttacttggtgtacaaggaaccaggaaaatcttagcttgcctaggaaatgataacagacactaatacaaacttaacacagatgttggaattatctgacaaagactttaaaacagctattatataaatgctttaccaaacacttgcaaacactcttaaaacaaatggaaaaatagaaagtctcagaaaaaaagaagatatgaagaagaaccaaatgaaaatattagaattgaaaaatacaatggccaaaaaaaaccacttttactcaataggctcaaaaaaaagatggagatgacagaggaaagaatcaatgaacttaaagatatgtcaatataaattttccaatctgggccaggcacagtggctcacatctgtaattccagcactttggaagactgaagtgggaggctcatttaagctcaggagcttgagaccatcctgggcaacataatgagaactttgtcaaaaaaaaaaaaaaaaaaagaatgagaaaagaaaggaaaagaaagagagaaagaaagaaagacagagaaagaaaaagaaaagaaggaaagcttttaatctgaaaaacagagaaaaaaaattccttttagaaaatgaatgcagtgttaggggcctgtgagttactaacaaaaagtataactttcccagcctgggcaacatggaaaaacctcatctctagaaaaattacaaatatttgctagatatagtggtgtatgcctgtagtcccagctgttcaggaggcaggaggaccacttgagcctgggaggttgaggctgcagtgagctgtgatcataccactgtactccagcctgagtgacagaatgagaacctgtctcaaaaaacaacaacagcaacaacaacaaaacaaaaaacaaaggctaacttatgtaattagagttccagaaggaaaaagagtatggtgctggaaaaatatttgaagatgtaatgactgaaaacttcacaagtgtagcaaaagacataaacatagagatttttaaaaattcagtgaactctgaagaaaataaagccaaagaaatccatgcccagaaattataatcaacctcctaaaaactaaagacaaagaaaaataatcttaaaagcagctagagaaaaatgatgcatacctataagagggacagtgatttcaatgactgcagatttgagccttgcagatcagaaggaaatgttgaaagaaaagagctagaaactcagaattatatacccccatagcactctttcaggaataaagtgaaataaaaatagtctcagaggaaggaaaactaagataattcattgccagtagaccagctctaaaataattttaaataaagttcttcagataaaagagaaatgacactagaaataaatttgattggagtgttcaatctgcaaaaatttagtaaaattattgatatgtttcagctagggtagtggctcacgcctgtaattccaacactttgagagacagaggcaggtggatcacttgagcccaggagtttgagaccagcgtgggcaacatggtgaaactctgtctctacaaaaaatacaaaacttagctgggtgttgtggcatgtgcctgttgccccagttactcaggaggctgaggtgggaggatcacttcagcccaggaggcagaggctgcagtgagctgtgatcacgccactgcactccagcctgggcagcagagcaagattctgtctcaaaaaaaataaaaaatgaaaattattcatatgtttggatttaggtccacccttttattatttgttttctgtgtgttctctctgttattgtttcccattttctctattctttggggtttttgaataatttttcatactccattttgatgtatggcaatttggactctatctctttgtatagtttttttttttaattagttcatctggggaataatatacacacttaactttccacagtccacttaaaatcaatattttaccacttcaagtggaatatagaaacctcccaacatacaggtcctcttgccctccctgctttataatagtcttatctcttatatctacatatgttgaaaccccatcagagaatgttaaaattttgctttatttttatttttatttttttattttttgaggtggagcttctctcttgctgcccaggctggagtgcaatggcacattctcagctcactgcaacctccacctcctgggttcaagtgattctcctgcctcagcctcccgagtacctgggattacaggcgcccaccatcaccccagctaatttttgtatttttagtagagattgggtttcaccatgttggccaggcaggtctcgaactcctgacttcaggtgatctgcccgcctcggcctcccaaagtgctgggattacaggcatgagccaccgcacccagcctcaaaagttttcctttcaaccatcaaatatattttgaagaacttaaaaggtaaatactagtctactatgttaacctaaatatttaccacttccattgctcctccttcatttcttcaatgaaattatttggtagaatgaagtgcatgtttttcttcttaacaagactgacctggttaacaactgctgagagtctaatctgccatcagcctagtccacactgagtctgtagaacagcaaccttcatctggaggagcctagcaccttggtagcaggctgatggtgctggatcccttccaacatggagagaatttgttctccctggactagaaacatattcataatataaatttgcatttccttcctacaacacatctgccagtaccatcatctgtggactttacagaatgccttattctctgtcataactttgattctgttcaaggagttcaataaaagacagatagcataggatacgtgctcagatttcatggtcttaacacttatcccatcacccagaagcagataacctactagaaatggtggaaagtacctgggtgcagtggtgtgcgcctgtggtcccagctactcgggaggctggggaggaaggatcacttaagcctgggaggcagaggctgcagtgagccaagattgctccactgcactccagcctgggtaacagcgcgagaccttgtctcaaaagaaaaaaagagaaagaaagaaatggttgaatgacctcctgaaggcttagttttggtgccaactgggagacaacctcctgtgaaagggtgatgttctttctattttacaaaatggagtatgtgctttgtatcagcaaccaatataggatattgtttataccgtagtaacaatataggagtcccagaatcaaagcgtagcaggagggggtagaggttcttctcactattatgtctcaactctctcacagaatttgtgcttcctgtccctgaaactttgtgctctgttggcttagaggccttagtccccgtgaaaggaatgcatccatcaagggacacaaaaatatctcattgaattgtaattcaggtgtaattcaggtgtaaactatcacctggtaattttgggctcctcatgccattgaactaacagataagaagagaggtgaattagctattggtgcaataataacggtataataaaaacaaccacaaaatataaggggcatacaacaatgaatatttacttttggctgatgggtctgcagatcagttggggcagctctgctatcagactacaggtcagcttggctacacatgcctcactctgctgcctggctgaaggagcagtggctacctgtggcatgcctctaaaggcataggcttggaactgacatgtcatttctgctgccttctattggccaatgaaagccacaataccaaggctaaggatacacatattcaacttttctaatccctgtgctttgaatttctaactagttcctatgggctgactttagtcttctgcaaacctactatttatacttgatactacctggcatcccacttctttggatagctgcagactggggtccctccctgatctcttcccatatagaatctagtgaggcaaaactaacatttctggagatccaaacccgtgacaagcactaagtcatatatcatctcatttatcctcataactctgagaaataggacttgctatctcaacttcacaggctcagggagggaaagtaagtcatccagggtcacagaagtggtaactgacttttagaattcacatgaaaaaaaaaatctgatttgaaagctaaagctttccttctatatcttactaattccccaaatacctagttcttttaccccccactctagccacaggcttatccctttgtttactgaatcttgagttctagctgttgtcttcggaaaatctgatcaggtcatttcatagtcttaggaaaaatgctcattgagaaatcaaacaaagacttttgattaaagggttccaaaaagattcagtgaaggaggcacgacccagatgttggctggtagagatgagtgggaaggtatccacccttgtggaacagcatgaacaaaggcagagaggtgggaaagtacaccgtgtacttgggaatagcaaggggtctgcttcaaaagaacgtgagatcaactcctaagtaagacttggaagagggagaggtttaacatcccattcggggaaatgactgcggtgaggtcgtgtgtgaaagaggagtgagtgctttttccccaaaaggaaatcacaatgaagtagcagttactgccaagacctgtcaaggctgaaggaaagcaaggatttcattccatagcattatgttaacaaatgaataagccaaactataaactaattctccatgtaaacattccagaactactgctggagaaacacagagtatttggtatgctaaagaaaacgcgtgaatgaggtcaattacaggccaagacagaaaggcaaagagggaccagaaagattagttataactggaaagcttatcaatggaagagcctgccagaaatctccctttgggaagacatggagaagatggccatcagtataagcaagaaatgcaaaggctgaaattgaattcataatttaatgaaaggttttttagaaactcataatggatttctgcccaaacacaaacatcctattaatataaaattccatcctgttaatgtaattcttattcatggaaatagacactttcaccataaatgatctccctgcaccctttagagaggcagtgatttctgaaccaataaaaataagaatcaccaatgatttctaattacctatggccagagaaaaggaaggagaaaatgatactgttctgtgtcctttgaaagacaaccagtgggtcaaagttgctcacttagttcatttaatgtgtcctcagaacatgataaatccatttagaaaacatgcttaatttcactggcatagtgaaatgttctaaagctttggactttaggggctgtcatttaacttttgactactgacaaaattttagtgcagaaaactgctcaagttagttaccatatccatttccattcaaaattctaaacaaggagctctttcctaaattttaacaatttttccatagtttttatttctttctctttttagagatagggtcttgctctgtcacccaggctggagtgcagtggtgtgatcttggctcactgcagccttaacctcgggctcaagcagtactcctgccccagcctcacgagtagctgagactacagctgtgtgccaccatgtgtgactaaattttatcctatttttttaacagtgaggtctcactatattgcccaggctggtctcaaacttctgggctcaagcgatcctcctgccttggtcttccaaagtgctgggattacaggtgtgagccaccactcccagccatgctttttcatatctccacatttttgcatgtgacacacttgatcctgaacacttgtccccttcacatccccaactctctgctgcttaagcccttcagggccttattgcttatagaatacattccaaacccccttcctcagcctacgagggcctgcacaatgcggcttctacctgcctttgtatcttcagtgtcttagtctgttccagctgctacaacaaaataccataaactggtggcatataaacaacagaaatttatttattacagttctggaggctgggcagtccaacatcaaggtggtagtagatttggtgtctggtgaaggcccactttctggttcatagatggcaccttctcactgtgtcctcacatggtagatggggcaagagacctctcttgggcctcctttataagggcactaatcccattcaaaggtctcacctcttaataccatcacttcgggagttaggatttcaacatatggtgggttggcagtggacacaaatattcaaatcatagtattcacttcataccactctccccctccccctcccactacgctggtcacctttttgtttcccaaacctgccaaagatttcctgctcagggactttgcacaatagttcctttttgcagataattcatggctcttgttcagccctctggtctaagcttaaatgtccttgtaacaaagagtttctggtcataacatatatcacaaactgtaattatcttctttgttgatatattttacttatttactgtctgtctctcccactaggatgtaaactccatgagggcagaaaacaagcacaggtacaacccaacttatccttcaagtgtcagctcaaatattgttcttcatatacgtagggcctggcacatagtagttggtggatagatgaatgaatgaatgaatgaatgaatgaatgaatgaatggaaaaggagtgaggcaaaaggcagcggccttaaaacagacatataaatcagactgaggttgtgcaaaaaaagtatttctgaaactgagatactccacaaaatccatggtgtcaataatatagtatcatttatagaccttgtaattatttgttttaggttaaataaacagtgtcaatttgatactagcgggataggtgaggtcctgaaatgctggtgggacctcgaccctggccagtgtccaggttcttgacaacatggtaagaaggaattcaacgatgaatcagaaagtagtgaaagtacgaagatttactgcaaagcaaaaaatacacactcaagaaaagggagtgcaggcgtacataagagagagtcacgtgcatgggggtttgaggtagctacctttagggttttctttaactaaggggtggaatattcatgaaaattcctagaaaaaggtagagatttctcagaactgttgtgtcaaccattaactatgggtgtccctggaactgtcatggcactgatgggtgatttagcatgttaatgagtatataataaggtcctaggtgaaacttagatcaaatctagcaccatgttgggtccagttgggtcttagccagcgtgatctacatcctggttttggggatcttataagcccctagcttctgtgggtatttcaacagtttccttttcctagtcatgtgaaactgctgcctggaattttctattctcctgcagccacccctgtattatttctgtctcacattagttcaggttgttacaaaataaattgcctcaaagttgttcatttaatatcaaaattgtggcaatattttaaattggaaaacctggcaattcttgtcactttcatatcacagagctaattatggaagcaaataaagttgaaaagttcttcagacttgaatatatgctacaaaatgataccttcaaaatgactgtcctaactaaaaaagaaaaggtaaaataagtcattgtttaacattggctatttaactattgtctaccaccatggagccagttctattaaagtatatctctcaagaaaagagtaccttgccatatatattaaatgctaaatatgctttaaataactggtagttatgaatagatttaaataattggtatatatagcttccgttttgctttatagaatactaacattgaaaagttaattaatgaaatgcacattaaggaagatagtgttttaatagtctatatcattcccaataacaagctttgacttgctactgtagaacagaatgaccaggtgttattcttccccacttcaaaagaagaatgctattctgataaggatttttgttattattaagtgctaactgcctgagatattttaaatatttacattctttggtgagtggaagtcctactctctcttctaattacatttttctgcaagcatcctgccaaacagccttcaaaacaacttacatttaaagagctctttgcattttttttacccaatctgtcccaatttttaggaataaaacagcaaatcttagctaggaatttacttttcaactgtgaatgtcaaagattacaccaattttaaggaggttttttttttaacttttacaaattgaaaatagttctctgaactatcaagaaaaaactaaaaattgaaatctgtttcttaatagaagcattaagatcataaatcatggcaggcagaggggagaagtcatctcaaaagggtaaagtgcaatcccctaagaacagaacacttgagctcagcctaaagggcatatcttcaaattgcacatgttggtttgttattttagaactgctcttgagagctggggttataggaaaggccttgtttccattggctgctataaataaaatgtgaaccattatatcatctcttaagagagttttatagaaacaccaggcatagcttcaagtatagcaatttatacaagtacctctctaaatatatgtcttggaatcgttgctaaaccaggtaataagggacattaccacttttgctaaggcatatttgtgtgacagattagaccctgtttaggcacctatttacaggtcaaagcctgcaggccttgaaaagagaaagcagggagttcaccccgcctggcctccagctccaaggcagctgtgtaatcccactgaacctgtttggcagctcatgcagtaactgctgcagcttgcagataagaccctcttggaaagcctgatagcccttgtcaataatgaagcctcaagagcaactggaattttctaaaacatcaaaacacattatctgatttgtgctgatacccagtcattacagagagccagttgagtaagatttttgttaaggaaagatagatgtctttgcttctttaaaggtgtcatatgtaaatctcaaatcttaccttgatcataagcaaccattgtttgcttacctgttgcatcactgaagcaaaataagtcatactagccacaaaaacaagactaacattggatttccacagctctttcggcagtgggctggaaagtgctattaaaacatggctgtttcataatttccctattgggtaggtattacaagatctcattttttacatgatcatgaattttattgcctctagaaaagcagaactggtctaggttagggggcaaatgagtgccctacctgcaacccataacaaagtgaggcttttagccagaggaggaatgaagctgtttagcactctggatccagggctacgtactaaggcgtctcactcagggaatatggaatgttcctgaaattctgctgggtctatcctttttgcttttcaaaaacctggtcactgaagagagaatatatttattaaatctagataccaataaacctctcattgtgaaataaaagaaaagttgctggaatacaatactcaaaaagaccatgaagatgtttcagtcagagaaagaagaaaaagactgcgtgggtagacaatgacaagagggctggaatgtagaagcccaggggagtcagaaaagagaaaaatgtgtttatgtgtctggcgaagctgtttgaaacagtgccctatctctccgtgtctaatcagtcacagtttatgctgatagagctttcactgctgtcttttccctttaataccacttcatagtgtaacaggtagagttcctttcacagttatgacttagcttttcttttgtaaacagcttttcacttatttaaaagaagttgtacatacatatgaatggactcacaaggaaataatgagaaacactataaattctgtgttgaggctgtagaaagccaaagtgctctaataataagtttgttatagtatagttgataaccgaaaagttcaatcagatttaaagaagcagagtgagggaataaaccatgaaatagcaggtctcagaatatgaggttgtgggccattgaagaaaaaaaattaaaggaattcataaaaagtattaaaagaaaataaaccttttaacaaattttgttcttttgaatcacagtgaaaagtttctctctcaataacaaaatcttagtcagacgtaactgactaagtttgctacgttttattacctaaggtagcaaactggaaagaaacacttaaaagtacttaaatatttttattgttttaaatcaagtttaaataaaggaagagacgattcaatattgcctaagtattttcatgacatttcaagtttcttcctaaattaatatctaatttaacaagaagtttattgaggattttcattcacttatttatttccccaataatgaaaacggctttatgcttttctgactatataagtaatgaattttgaaaaaattcaaaaacaagttatagacagaaagaaagtaaaaatgtcctgaaacctcatcaccctgtgataaccacgttaacattttggcacctgtcctttcacacatcacacatctccgtatacacatttatataaagagagtaacatgcatgctattcttattatggcccttaatttttaaaatattgcttggttggttgttttcttcatctttgggaatcaatatcaaaatatggtatacatatgttcttttccttccccatgcttatgaaatcagatacatatataccctgtgtgtctgtgggtaataggcattctatgcattttgcctctctcatctaaactgtcatggattcccctccaaaaaccctggatagttctaaatcattctttttaatagctgcataatttttctattgtatgcatgaagcataatttatttaatcgtttttctacctaacacttaatttttaactttttttatcccagtggcacaccaggatgcagtaaatatctttctgtgtgtagcttttcatactaatgcttttacgtaagtaggaaaattcttcctacgaatagattgctgagaaaaagagtatatatctttttaattttaatttcgctttccaaaatactataacaattcacatttctattagcaatgtgtgaaaatagccttttccacatattcctgaaagcagtagctgttatccctttttcatttttgccaatatgatgtctgtagagagaaagctcacttgtttcttcaatttgcagttccctgactccccgtgagattaatcgttttggcatctttttctatgtttagaggccatcttggatttgctcttacgtgaattgcctgtttacgtcctttgactgtttttttaattatgtgaccttcttagccttttgtgcagtaaaactcttaaccttttatttttcacatgcactggaaatatttttcctaatttattatttgtctttttaatttgtctgtggtatttttttccacactataatatttcttatatttgagtagttctctccttttacttttacagcttctgggtttcctgctaaaaaatccctccaacatcggctgggcgcggtggctcacgcctgtaatcccagctactcaggaggctgaggcaggagaatcacttgaacctgggaggtggaggttgcagtgagccgagatagcaccattgcactccagctgggtgacaagagtgaaactccatctaaaaaataaaatccctccaacatctagggcaaaatttcttttttatattttcttatattgacaaataaaaatggtgtatatttatcacatatgacatgatgttttgaaatatgtatacattgtggaatggctcaattgagctaattgacatatacattatctcacatattttttattttttgtggtcagaatatttaaaatctactgtcttagtgattctcaagaaaataatgcagttatttactatagtcaccatattgtacaatagatttattgaacgtattcctcctatctaactgaaattttatagggctaaattttcatcattaccttttttttttttttttttttttaagagacagagtctcattctgccacccaggagtgcagtggtgtgattgtagctcactgtagactcgagctcctgggctcaagtaatcttctcatctcagcctcctgcgtagctgggactatagttatgcaccaccacacccagctaatttttaaattgtatttttgtagaaatgcggtctcactacgttgcccaggctggtcttgaattcctggtctcaagcagtcctcccacctaagcctcccaaagtgctgggattacaggtatgagccaccacacctggccccattgttacatttttaacatttataactcaagtccatctgaaatttgtttatatagtataaggtaagagtctcactttttagtctaacctatagagagaggcatttatcagctaaatatgtgaagcaaatcattcttaaccactgaatcgaagtataacattttgcatttactaagttaccgtatgtcctgggaccaggggtacatccaaaatataaacaattaaaacagtatgggcacagaccagtcagaacagatgctgtctgtaaaccactgcaacagggatatagtgcaaaccaagaggatagcagtcctgccttgaatctatttctgggttctctattctgtttcaatgacatacttgtctattcctatgccaggatcatattgttctaatttcagtcacctttgaagtattttaacatttgagcaagcatgtcccacacattattttatttcataatttctctggctgttcttggacatttatttgtacacatgaattataagttatgtttatccagctcccaaaaataaactattcttgtgtaaataaactgtgataaagttatatcagttttggaagatgttacagaaactacaatttctcttttactattctcctcttcttccttcccagtaaatgtttcggccagttgcagtggctcatgcctgtaatctcaacactttgagagactgaggcaggaagatcacttgaggccaggagtttgagaccagactgggtaacatagtgagttcccatctcgacaaaagatttcaaaaatagctgggcatggtggtgcatgcctctagtacaagcttttcaagaggccgaggcagaaagattgcttgagcccaggagttcaaggctgcaatgagttataattgcaccactgaactccagcctggatgacagagtgagatcctgtcacttaaaaaaaaaaaaaaaatttcggctgggcacgtagtccactagaataaaggctccatttcctagccttctttgcaggtaccagtatgcatgtgactaagttctagccaatgagatgttagcagaattaatatatgtaactttcaggaagtgctttatagtaatactttagggcagggccacacagcaggagggaagcagtgagcgaacaaagcttcatttgtttttacagctgctccccatcactcacattgccacctgagctccacctcctgtcagatcagcggtggcattagatttttgtaggagtgtgaaccctaatgtgaactgtgcatgtgagggatctaggtgcggctccttatgagaatccaatgcctgatgatctgtcactatctcccatcacccccggatgcggccatctagttgcaagaaaacaagctcagggctcccactgattctacattatggtggtttgtataattatttcattatatattacaatgtaataataataatagaaataaagtgcacaataaatgtaatgtagttgaattattccgaaaccatacccccaccttggttcatggaaaaaccgaggtgcttttggcaccagtgactggtttcttccacaaaaccagtccctgatgtcaaaaaggttggggagtgctgctttagggcactgcccagacaccacttcagagctgctgaactcattccctcagctgttggctctcagctgcatcctgcttcaagaactgctgcagggagccacctcgcctaacattgcttcctcttcccagggctgcccatcaacccacctccaatgactggtcggtccagtccccttgctttaagggaaatcaatgctaaagagctacgacacttccagaactcctcgaggaactggctgaggcctttgttgcaaattttgtggtagctctttgcccaataactcttcccccagatatttatcccaagatcacttcgcagtaaacttcctgctgtcaatctctggctcagagtctattcgcctggaacccaccttagatgtgtcctcaaagggaaagggcatgctctctcctcctgctggctgggtgaagacatggcagagcatcaagggaaaagaagcctgaggctctggcattgcggagcaccttaccagcccttgaagggcctacccagacttttacatagagaaaaataagcttctaggttgtttaaaccactgttagtatgaatatgccctaatatacaataattaactttttttgtgatattaaattctcccatcctagaacacgttgagatctttttttgtacctctcaaaaaaatcttatcattttcttcatatgggtctcatactgttcatgttaaatttatttagaaataatttataattatttcactactgcaaataatcactacttagtgattttttttacttcttatttttgtttttattttcttgagacagggtcttgctctgtcacccaagctgagtgcagtggcatgatcagagctcatggttgttttcagtatagtgaaaagaaattatagtggtttatttgtttttactttttgcttcagtttttattttagatacagggagtacatctggaaatgtgttacatgggtatgttgcactcaagtagtgagcatagtacccaataggtagtttttcaattcagtcccttatcttttgttcccatgtttatgtccatggatgctcgatgtttagctcccacttataagaaagaacaatgcagtatttggttttctgtttctgtgttaattctcttaggcgtatggccaccagctccatccatgctgctgcaaaggacatcatttccttctttcttatgactgcatagtattccatgatgtatatgtaccacattttctttatccagtccatcactgatggacacctacgttgattccatgtctttgatattttgaatagtgcagcaatgaacatataagcgtatgtgtctttttggtaaaatgatctatttccctttgggtatatacccagtaatgggattgctgggtcaaatggatctctgtttaaagttctttgagaaatctccaaactgcttttcacagtggctgaactaatttacatcccaacagtgttaagaattcccttttctctgcagccttgccagcatccattgttttttgtttttgtttgtttgtttgttttgagacagtctcgctctgtcacccaggttggagtgcagtggtgcgatctcagctcatggcaacctccatctcccggtttcaagctattctcctgcctcaggctcctgagtagctgggactacaggcatgtgccaacatgaccggctaatttttttttgtatttttagtaaagatggggtttcaccatgttggtcaggctggtctcaaactcctgacctcaactgatctgcctaccttggcctcccaaagtgctgggattacaggcgtgagccactgcacctgacctgtttttttgactttttaataatggccattctgagtggtgtgaggtgatatctcactgtggctttgatttgcatttctctgatgattaatgatgatgaacatttattcatatgcttgttaaccacatgtatgtcttctactgaaaagtgttcatgtcctttgcctattttttaatagggctgttttttgcttgttgatttaagttccttatagattctggatgttggacctgtgtcacatgcatagtttgcaaatattttctcccattctgtagattgtctgtttacttgttagtttcttttgctgtgcataagctctttagtttcattagttcccactgtcaatttttgattttgtctcaattgcttctggggacttagccaaaaattctttgtccaggctcatgtcaagaagggtatttcctaggttttcttttagggattttatagtttaaagtcttacatttaaatctttaatccatcttgggttaatttttgtatatggtgaaaggtaagggtccggtttcattcgacgtatggctagccagttagcccagtgctatttattaaatagagtgtcctttccccattgcttgtttttgtagacattgtcaaagatcagatgattgtaggtgtgcagctctatttctggactctctattctgttctagtggtctatgtgtctgtctttgtaccagtacaacgctgttttagttactatatccttgtagtatatagttcgaagtcaggtagtgtgatgcctctggctttgttctttttgcttaggattgctttggctattcaggctctgttttttccatgtgaattttagaatagatatttctaatttagtgaagaataacattggtagtttgataagagtagcattgaatctgtaaattgctttgggcagtatggtcattttcatgatactgattcttccaatacatgagcatggaatgtttttccatttatttgtgtcatctctgatttctttcagaagtgttttgtagttcttcttctagacaacatattttacctactaggttagctctgttcgtagatatttcatttcctctgtggctattgtaaatgggattgtgtgttttatttgactcagcctggacattattggtgtatagaaatactactgattttttcatattgattttatatcctaaaatcttactaaaatcatttatcagttctagtagccttttggtggagtgcttaaggttttctaggtatggaatcatatcatcagcaaagagagatagtttgacttcttttcctgtgtggatgccttttctttctttctcttgcttgactgctcttgctaggacttccggtactatgttgaataggaatggtgagaatgggtatttttgtcttgttccagttctcacagggaagcgttccagcttttgcccattttgtatgatgttggctatgggtttgtcaatgatggctcttattattttgaggtatgttcctttgaggcctagttcgttgatggtttttatcatgaagagatgtagaattttactgaaagctttttctgcatctattgagatgactgtatggtttttgtttttaattatatttatgcaatgaatcacatttattgattcacgtatgttgaaccagccttgcatcccagaaatgaagcctatttgattgtcctgtattaattttttttttttgagacgagatcttgctctgtagttcaggggtgcaatttcaactcactacaacttccacctcccaggctcaagtgattctctcacctaagcatccgagtagctgggactacaggcacatgccaccatgcttggctaatttttaaatctgttgtagagatgaggtcttattatattgcccagactggtcttgaactcctggactcaagcaatcctcccaaagtctgggattactggcatgagccaccacttctggcctgtattaactttttgatgggctgctggatttggtttgctagtattttgttaaagatttttgcatctgtgttcattagggatattagcctgaagtttcctttagaaattatagttctttacagagtgtactgagatgatttgtttttctttcttttttttttaagggacagagtctccctatgttgtccaggctgcagtgcagtggctattcacaggcaggatcatagcacactgcagccttgagctcatgggctcaaacaaccctcttgcctcagcctcctgagtagctgggactataggcatgtgccactgtgcctgacaagatgacttttttttgagatggagtctcgctctgtcactccaggctggagtgcagtggtgcaacctcggctcactccacttctggattcaagcaattctcctgccttggcctcccgagtagctgggattacaggtgtgcaccaccatgcccagctaatttttgtatttttagtagagacagggttttgccatgttggtcaggctggtcttgactcctaccctcaagtgatccacctgtctcagccttccaaagtgctgggattacaggcatgagccaccacatccagccaattgtttaattcatatttattgcatagtggttaaagactactctaactctgactctacagtccgactgcctaggtttgaatcctgacttcacttcttactttgggtgagtttcttagtttctctgcccctcagtttcctcatttgcaaaatggtttgatgtacctcacttatagagttgtcacaaggtgttaaaaagataaacttagatacattaaaaatataaagcacttgtttgagcattcaatgattcacgaattgggcagcacaagcagtttagcactccactgggtggggggtggtgagaaaggaaacttttataaggtgttcatgaaagcaaaacaaaatgtatttggggctgtgcacagtggctcacacttgtaatcccagccctctgggaggccgaggtgggaggattgtttaagcccaggagttcaagagcagcctgggcaacataagaagaccttgtctcaacaacaacaacaacaacaactacaacaacaacaacaagtatacatacataaaaatagacatctatgtatatatgtatgtgtatatatgtatttggttaaaatagaatgtctctggttagaggttagttaggggtttctgattagtcaagcttaggttgttgttttgattttttgctttttgttttggagatggagtctcactctgtcacctaggctgatatgcagtggaacgatctcagctcgctccaacctctgcctcccgggttcaagcgattctcctgcctcagcctcaggagcagctgggattacaggcatgcaccaccatgctcagctaatttttgtatttttagtagaagcgggttttcaccatgttggccaggctaatctcgaactcctgactgcaagtaatccacccacctcaaagcttaggttttttatactgtttgcatgggctttggtttgcttatgtagcaacccagggtactggagtcatctcaacctaatggtctcccaattaaatttattttttaaaaaggattaagtgaatttatacatataaagctcttagaacatacctgatacatagtaagtcctatataacattagctattattatgatttttgtcatgaaaatttccagcaagggcccatcataatagacagatggtgagtactttgtccttcaagtcaattcaaaggcttacatattctgaaattatggtaacttagtcattactcattgtattagaaaaggacaggtaatgtgatcgtatattgaatgtcaatacaacaaaggtttatttctcattccacatgtccagtttgaattactgggggttgggaggtggacctgctccagttagtcattcaaggacccaggtgaatgggggctcccagtggcttcaaggggagaaaaatcagggagaattcacatccattctgaaatgctttgcaccagatgtcatctacgtttctttgacttactgtcccttgatgagaactggtcatgaggccttagcttattgcaaaggggctgggaagcatggttttcctgtattcccaggaaagagaggagaaccagatatatgcaaggagtgacgtatctgtcacgtctattccactcttcacggtgatttcaatctgttgtgatgttttttatccagtcattctccaaaatgatgatataaagcatataaacagaattggacaaaagttgtccatacaaagagtattacagttggggatgacatttttgacaaaggtcgtatcaacaataacaatgacagttataaaaataactataacttattgagaacttattgttagtgaaagacttttcctggattatctcatgctgagaaattattcctagtattatttgaatgttatagataaggaaatgaggctcagatagcttaagcaattggcccaaggtcacaggtcgtaaggaacaggggcaggaactgaattcaagagggctgaacccaagatccaggtcttacccactgtggcacagagtagcaaatgtatcacagctgtgaccagtgacatgctgtataaacaagctatgattcgaagcctctctaaccctttacagtgacaatatcatgctttgattcacataagttggtactagaaagcttcttagagatcatctagtacaactctttctattttcttcaaaagaaattatgttaggatgaagttaagtcataccacctggaaaagaagtttctttttcctctatatctcagttttagtgtgaatggtctaggtcttcagggtaaatttgctcctcatgatcactcaaggactgagattccttttaggaaattgctgtgccctctcatagggctttgtcatcaaagcgaggccaccatgtccaagttccagccagcaagaagcgggaagagagcacgcacgaggtacatctaggctcagccttccaaaaccttaatgaaaacagaaggggaaaggagaaagaagccccagagggcaggaataaatggtgaaaagagaacatgacattcctttgtttttgtggtaggaggtgatattatgggctgaaagtagagaattttatcagccgggggttaaaaaatatacaccagagaacaaaactgcttcatgtcttttccctcttttttctttctgtccacctcctcttattacaagtgtacttacgaggaagggaaaggctggtgcatgtcagtgagccagcacctcatccctccaaagaaaaggagcactgaaaagtgggacgtgcttttatcctgaaatggttaacagggatgctgggactgaggtttttctggttaatggaactttcaattaagccattgatcagaaaattattttgcttgttttgtatctttaagtaaatttttaaaagtaagtgatgcagtcacattgtttagaaatgaaaatgatattaaaagatatacacagagatgagtatcagaggaacacacccctgttcccaatcctgttgtgaaaatgcactggtcagttaaggagattattttattctggctactgtaatagtgagaatgtttatcaacaaggaatgtttctaagagaaggcaaggggcagataagcaagggcgtcaccatgcatgggtctcatgggattcctgagaaggacagagttggatcttacctcagacagcaggtgctctttgctggttcctggcacacaaagaattgggtatttcttttttttgattattattttagatggagtctctctctgtcacccaggctggagtgcagtggtgcgatctcggctcactgcaacctccacctcccaggttcaagcaattctcctgcctcagcctcccgagtagctgaaactacaggcgcccaccactacacctggctaatttttggatttttagtagagacagggtttcaccatattggccaggctggtctcgaactcctgatctcaggtgatctgcctgcctcagtctcccaaagtgttgggattacaggtgtaagccaccttgcccagtgggttgggaatttcttaaccttcactgttttctggaagcacagggcttaaagtttgacattgttagtgtctaccccaaactcctcctgccctctatatgtgaatatttttattggtttcttacatggtgacagtatttcctaatacaaatgcaagtaagtatgaatatatattcttatcttcccctttcttccacaaagagtagtataagtaaatatatcttctccaaatttcttatttcattttattgtatatcctggatatctttccacaatcatatggagagttttttattttcctcattttccccactgcgtaatgttccattgtaccacagttatttaaccagttccctatgacacttgaattacttctaacattttgctattataaacaatgtttcagttaataactagtacatatatcgtacatggacaggcatagctccaggatacattcccagaagtgagactggtgggtcaaagagtcaatatatttgtaatttctgtaaatattgtcaaattgctctctatatgggttggactattttgtcttcctacccgcattgtaagggtgtgctgtgttcccgctgccttaccaacagagtgtgttgttaagtggaatttttctaatccccatttgttaagaaataccatttacaagtagttttaatttgcacttctcataaaaatatatatttgattcaactattgtgaaaaataacttagaaactagccaggtgcagtggctcatgcctataagagatccctcaggggatcctcctgccttggcttcccagagtaccaagacaggaggatctcttgaggccaggagttcaagaccagcctgggcaacatagcaagactctgtcagtacaaaaaaaaaaaaaaaaaacaattaggcaggtgtagtggtgcacctgtagtcccagctactctggagactgaggtagtaggatcacttaagcccagaaattcgaggctgtagtgagccatgaccatgccactgaactccaggctgggtgacagagcaacagagtaacacatcgtctctaaaaaaagagagaaagaaagaaaatacactctacagaagacattaaccctttgaataatcaatgatcagtttctcatccccaccagtgcaagcccaagtgagcactgccatgccacaggaaagagtattatcacggtggagagcagcgtgtctcagagttcatgacgcaaattttaccaagtttgagacactgggacactttaccaagaagctaaagaggcttctttatttaatgactcctcaaagcctttaaaacttttcttttttttttttaatggatcgctaggaggggagaattttggactttagtggatcccttttctcagagagtcttccatagtttccttggaacacattttgggaaacattgctggagaaggtttaggaggttgagttgaatttatacccagttaaaggccaaccctgagaagtcattttatttaagataaaatccctactgttttcttataacttctttttttctaataatagagaaaaggggaggatcttggttaatggaaggtttttattagttggattacctgaggtacaggagtcagaatccagccttggttagcgtccctcagggccagcccaaggaaatgaagacattggcaaactgctgtgtcttaggcctctttactccttggctggtttgcttagtgcccccatcacaaacaagctggcagggaaagatctgaaaactcatttgctctaagatggtgtttgttcatttgctcagttgaacaaattgttacttattgaacaatttctaaatttattgctttgtgctgggtccctgaggtggtcccagaagaaatgtaaggctccagtgcactctccagcaggccctgatctccttaggagggtaaaatatgcccagcagtgagctaacaatgtaagtgtgattaagtggcaagatgagacttaggataatgttacttctcccgggtagctcctctcttgggagtctgctttttaaccctctggttaatgctttattgggagctctagttgtggaatttcctaaattccacaagccaagataaggaggtattttccttcttttcttttttggtgagcagttgttctcttgtagttggttctggatgactcccacagtgaggccagccagctgcttttgggcatcagagagggctgcctgctgggccaccatgggtaatgcttctgtagcctttagctccacctaaggtgtatctctgctaattgcaataatcttgtcaataatatacaaatgagggagaaaaggcctagtctactttatttttttgtcccagttctcttttcacctccaaatttgtctttagtacattgtggccacaaattcctttggcagaaggtaaaataagtaggttctcaatttgagcactgatgagtagtttcttggagcagtctaaaaagaaatgtggtttttgacagcagctaaaaagaggacatattagaaatgccaaattgctgttataaagaactggcttctggcaagggactgaacaattcagacttcaaggatatgtagacatgttttgaaagttcttgtttaaatatgatctcaggaagttagaagcaggaagtcaagccaactagataaactttaaatgcatacgacttcatcttgaaatcttactcacaaaaagtagttttataataaaatactgtggccaaatgcttatttacaaagatgtttgtctcaacattatttatagtggtgaaaaatttgaaaaccatttcaatgtccagtggataaatggctgattaaataaactcaaacaggcataaaaattatgaaaaacaaagtctcattctgtcactgatatagtttggatatttatcccccccaaatctcatattgaaatataatccccagtgctggaggtggggcctgatgggaggtgattggatcatgaaggggaatttttcatgaatcgtttagtaccatccccttggtgctgtcctcatgatagtgaatgagttattgtgagatctggttgtttaaaagtgtgcggtaccttcccccactcctctctcttgctcctgctcttgccatgtgacatgcccgctcccactttgccttctgccatgattatgggcttccccaggcctccccaaaagccaggcagatgccagcaccatgcttcctgtaaagcctagagaaccgtgaaccaattaaacctcttctttgtaaattacccaatctcaggtatttctttttttcttttttttttttttttttttgagacggagtctcgctctgtcgcccagactggagtgcagtggcgccatctcggctcactgcaagctccgcctcccgggttcacgccattctcctgcctcagcctcccgagtagctgggactacaggcatgtgccaccatgcccggctaattttttgtatttttcagtagagatggggtttcaccatgttagccaggatggtctcgatctcctgacctcgtgatccactcgcctcggcctcccacagtgctgggattacaggcgtgagccaccgtgcccggccaggtatttctttatagcaacaaaaaaaggcctaacacagtcacccagctggagtgcaatggtacagtcatagctcactgtaccctcgaagtcctaggctcaagtgattctctcacattggcctcctaagtagctgggactacaggcatgcactataacacctggctaattttgtgtgtgtctgtgacggagtctcgctctgtcgccaggctggagtgcggtggcgtgatctcggctcgctgcaacctccgactccctgattcaagctattctgtctcagcctccctagtagctgggattacaggcatgcgccaccatggccggctaattttttgtattttcagtagtgacggggtttcaccatgttggccaacacctggctaattttttcatttttttgtagagatggactctcactatgttgcccaggctggtcttgaactcctggcctcaaggggtcttcttgcctcaacctcccaagtactaggattacaggtgtgagccatcgtggctggccaaaaattgggtttttaaagaattctctcttttttttttttttgaggtggagtctcactctcttgcccaggctgcagtgaaatggcacaatctcggctcactgcaacctccgtctcccaggttcaagtgattcttctgcctcagcctcccgcctagttgggattacaggcacctgccatcatgcccggctaatttttgtacttttgtggagacggggtttcaccatgttggccaggctggtctcgaactcctgacctcaggtgatccgccggcctgggcctcctaaagtgctgggattacaggcgtgagctgccacgcccggccaagaattctttttttttttctttttgagacggagtctcactctgtcgccaggctggagtgcagtggtgcaatctcagctcactgcaatctccgccccctgggttcaagcgattcccctgcctcagcctcccgagtagctaggactacaagcgggtaccaccatgcccggctaattttttgtattttaatagagacagggtttcaccatgttggccaggatggtcttgatttcctgacctcgtgatccacccacctctgcctcccaaagtgccgggattgcagacataagccactgctcctggccaggaattc

SEQ ID NO: 73 - DNA, 152335 bp, Homo sapiens
gaattcatgactacatttttcaatgaagtttatcccccttatagtaaaaaagagattttgagagactttccttatacaaggtacctcttaggaggcagctgcctattaagaaaattaatttcctttatcccagctttcacagcaacaatttaatgctctgagaaaaaaaggtgtgattctgaaaacaactcttctcagatctcattttctatttaccagacattctctggatctgctcagtcatatcattgtaagtcccaagatgctgtatgaattgattaacagaaaaatgcatcctgtggttttaaatagcaattatgttctcatagcttccttcaggaatttgggttacagagtccttccaaaaagaaaaaacatatgtagggtatacttttagttacaaactggcacccctgacttcagatgaaagcaaacataggcacattaaaaaaaaaattgtcttcacctgaccccattctagtccacaaatcactatgtaatatgctttgtccactgaggtctagaccatttctctacatgtcctgacgaacaacaggcaaagcacagctaggcaaggaagagctactggtgtgcacggataagcaagcacttggacagcctcttcgcaaggaagtttcctgctctcatcaagaaagattgcttgtaccacatactgtgaaaagggaaaacacctctgacactcccagagtttcacctctaaaaataagagctttgacctcttacttgggccacttaagagttcagcctcttgactttaaggacataatttatgccttctcttaagagtcttatagtatttctaagagattccaatcacatcgtgtagctttctacataaccctgttttagaagaaataattcatttctaaagccaatttcagtgggaggaaagaaaagaaaggtgaattatttcccatgataagctggtctctgaatgtaatggtaatcttggaggggctctttcttaagacaacagaacagcccatctcaggagcatggagaataaacatgatactgacctcctccgacagcagatgcaggacaggaaggctgaggactctttctgatactcttctttgctactgcattccttcaggaattcctgcaaatccgtttcaggaaacccattctgttggaatttctttagaaagtacacaatgttgttaccttatttataaggcatgagaaattgctcttttgtcaacaaaccaagcccacctttgctaaaataaaactctcccacattgctagctcagatccaagaactgatatttacaatgatgaatcaatctgtcagtcccagaacaccaaggcagggccactgtgggaacagagaacaatccaaagaaaaacttcagaaagaaagcagagaagagccagggagaggttttttttaaaaaaaaaaaaggtaatgaaggaaataatcaaaagtcaaatgtctagtctgggtatgatggctcatgcctgtaatcccagcactttgggaggccaagaagggaggatcgcttgagcccaggagtttgagactggcctgggcaagatggtgagaccccatctctacaaaaaatacaaaaattttctggccatggtggtgtgcacctgtagtcccagctactctggaggctgaggcaggaggatcgactgagccctggagttggaggctataatgaggtaggattataccactgtcctccagcctgggaaacagagcaagaccctctctctttttttaaaaaaaaaaaaagtctaaacttttaatgctaacagcaagactagatgagacctcccactccacacacacattggcaatgtagactctgcttggaaagtaatcattatttcctctacttttatggaagttggtcgcttagtggaacagaagagagatttttttccaagcagacacaaagactccctcccctcatgcttaatgagataacctacttcaacactgaggcttggcccccaccacgcagagacattgccacatcaaagacatgaatctctgtggcaggagtgtgcacctcttccttctccatgcaaaccctgatgcgagaggcaactaccattcccacctgaacacttacttatcttcccacacactcaaaaggtagcggactgggtttcttctgcattattctgagaaagtggttaagcagaaaacagccctgacaaaggcactggcatggcacccctggtttttcagtcactgaccctgaagcagggttttctaagcatgaccatctgctgtgaataaggtaccagcacccaaggaagtgaaattccttcaagccacaaatcagttaaatggcctagtctgaaaggatacagaacccatcaggtagcttaagaaagcaggaagctaaacagtcacaaaagccttagttttcataatttaaaggaagcctgcaccatgccagtagctgtattatccagtgtgagttgtagcaatatctgagagttgtcagggtgccggtcacctctcatccctgaaacttatgactcaatcctaagttccaggcagccacactggcaggtatatctgtcagggctaagaccagcagcctgactacctgacttaccccattcaacccatgcttaccccatttcccttttctttcccaccacccctccaaaccaatccaccctgctgtgggtaacagggacaatgccctaaaattcatctccagcgtctaaaaagtttgtccacaaaacctcaaaatctgaactgtaatattttaagtttttaaaatgtggtattttcctataatctatatagaatttgcagtgattttttggcagcaaattttgataattacttaccttaatggtgtcataagaatctgtaataagtgcaataaaaagactgagaatcatatatataaaaaggctgatgaaggaatataaatacagacgactgaacagccacaccaagatgctcttctgctggatttgggcaaaggttgcaaacatgtcatcaccgttgaccagagaaaacagacactcagcaactgtgttcagattttcaaactgtagggggaaataaaaactagtttctgaaatagagtattctaaaaagcagaggatatctagttagcttgttttgttaacattgtttttgtcattgtagtagtggtaacttacttattttaagatgctagaacaccataagaagtaggaaaacattattcaaaaaccccctctgggccaggcacagtggctcatccctacaatcccagcactttgggaggccaaggttggaggatcacttgagcccaggagtttgagaccagcctgggaaagattacaagaccccatctctacaaaaagtacaaaaattatctgggcatggtgatatgcctgtagtcccagctattcaggaggctggggtgggagaatctcttgcatccaggaggttcagggtacagtgagccaagcttctgccactgcactgcagcctgggggacacagcgagaccctgtctctttaaaacacacacacacacacacacacacccctccatactctcaaagttaatctcttaacaattcccacagtttttccctatgtactttttatatatctaaaaccaggatctaacaagtttagatcctggtttttctcctaattaacataagcatcttcttatgttttctacacttagagagcatttgtaggttttgtttgtttgtttgagacagagtcttactctgccacccaggctggagtgcagtgcaatcccagctcactgcaacctctgcctccagtgttcaagcgattctcatgtgtcggcctcccaaatagatgggattacaggtgcctgccaccaagcccggctaatttttgtatttttttgtagagatggggtttcaccatgttggccaggctggtctcgaactcctggcctcaggtgatccgcccacctcagcctcccaaagtgcttggattacaggcatgagccactgtgctcagctggcatttgttatataacagaccattccttgaaaatgccaacaaaacaaaacttttcaccaccctaaccagaaaaatgaacttttttttctaaattgccctatttctgtcagtgattccaatctcctaccaaagaaacatttactctgaaataattaagtccttaaaactctgtgttgaattgattactcttccccgctttcagtcttctaaggcctgtctgttcctatcacatgtttctccaatccacccttactactctactgtgatgtcaacacaaatttctgaattattaaagaaacttccaaggaagtctcttttactccaatctctttaccctccccagtcaaagctgcagtaaaacctgtactttaagaagaaggctttcaggtcatttctcccttgtgagattatacaaagtttggatgcaaaataaaaatctaaaccaagaaggttgtgataagttcctcctttatgcagcctcatcacatctcctccttgacagtattaatatgctgtgcttatcttctcctccaacaccaggcccatccctacatttttccctcatggaatttattctcctcacctgctctattcttctttctcttctctgtgtccaattaagccaatgttcaagggtcatttcagagtgtacttcaagaccaagtgccctggtagttctagtcctttctctgcactccgtatcggtaagaatcacagaatgaactatggtcttctaattgtttttatacacacttccctgtactccaactagatacaaacaccgtgccttacactaccagccacgtggctggaccaggcaaggtaaagttggtggccaagggagaaggtctacaaacgcaccccaaacaaggatcccacccatggctttgctgcatcagcaaaaactctgatgaactaaagtcctcctccaaaaagacctagaggaaatatccaaatgaacagatcacttaacaatatgtagattatttaacagtaaaacaggcgattgccagagtaaatattttccatacgctacacaagccttaaaacattgaagttaaagctgaaaacattgacattaaagttggtttctatggatgtcaactacaactctgacagcaccattaataattcacatttcttagtttcttttggaatccagtcaactcctttctctagtttcaagaacccctaactccaagcacaactgtctgtgcttcaggtttcaactgcaaatagctagtttgtcagtacatgtcacattcattttttaattttctgtttagttacttaccaggctacacacaatatctgtctcaacattaacattattcataaccattttacctccccctcctcttgtgaacatgagaattattttaacacaccaaagagttaaaacagagacccagtcaattttaggtgtttggtaacaccctgccattttgtacaagaagtggctgtgaaccagagtctatttcagtggccaaattccatagtagaagtgagcttaaaaatactcaaggtcctaatgtgcttccagtctagaaggaccacatttgtaaggcattcctttggatcttgagtgatcataagcccctggaaagcaggtactactctctctctgcttcttgtttgttcaaaacaaactttttgggcacctaccatggtctatgtgctgtgctggacactgggaatgtaaagaggaacaaactacagttccttccctccaagaacttggtctacaagaacctagcaatgttgggtgcacagtagatatttaatacgtattaaatgggtatttccataaagagtccccataggttctctgggcccacgatgagaactcaaccattcatttcacaaatgataagtttgcagttgggccaaaaacctttaatttcaatgaaaccataacctgcaatggcttatgtcagagaacaacataaatatttgctttaagagctggtgccaagaatctcatgcaaactttaggcaaaatgttttagctgaggggtacttggctaaaaccagagggcttggaaggaggaaaatgtaatgcagagtctgctgaactttgacccatggcatcagtgaagtccaacaacttttcaagtcttggtcttctcatttgtaaaatggggacaatgcaaggctatgatttattcctcacaggaaaaaaagtcctctggaaatgtaaaagccgcattagagtaatgtttaataattcaagatgaggtctggaagaacatcaacagtctctcaccctctgtgcccaggcattttgaaagggcactgtgccaaagtccattagtgctgggaatacacatcagcaggaagccttttgcatcttgactccctttccattgagcccctgaaatcagatgcctaacaggaagataggaagctgaagtgttatgggaccccagctatcagtcaaacggttttcctaatgtctcctttttagttgttttgttttaaagaaagaattagctttcacaatcaaggttgctgtgattctaaaaatcccacaaaaatgcccgcttggaatgcctagcttttcaaggcttcaggtaacctgaaagtcctctgattcagatactggcagaacctgaacatgctgacagcttggattaatttgggggaaaggatgcaaggggcaataaaatattctaacttcagattcaaagaggcagcaatatggtgaagaaaagcacaaagttccaaaaccagactgacgttctctcccccaactgacttgtacattcagtgaattaactcagctgtgtatttccccaatatatcagcctggtgagagatgccataaacagacctgcaggcaaccctacagacatcccttatccctcccctcctccaggggtataaaggaaagctaacattaagtgaaagacataagtctagagctgcaatgtccatagtggtagtcaccaggaatgtgtgaatagccagcatccaatagatagctagtccaaattgagacgtgctatgtggataaaatatccaccagatcaaaaagactagtatggaggaatgtaaaatatttcaatattttatactgaatacatgctgaaataatattttgggtatattaggcttaaaatatataattaaaaataatttcatctgtttttttatttcttcatgtagctactagaaaattttacagtataggcaaggctctcaattgtagcccaaactgtatttttcttggacagtgctggctcagagcatcccagtttcacctggatcctttgaaaggacaaattgaacatatggaaatgcagtcaggctcacaaaacaaataacctcattttccatgaggtgaccttgacaccattgaaagaatgaagccgattacatggctgtcctctcacagttgatctccaagtacaagactgtttcttgtcaggctaaatgctctcttgcaatgatctgttttagataataccaagaaaagctctacagggtatgggtcaaagcacaggtactggagtcaggccgacctgggtttgaatcccatctctgccactttctagctgggtaatctcaggaatattatttaatatattaaggtgcctattctctgtaacaggacaatcagatttcttcacagagaaggggagggaagggttaacacagcaagggagatgaagaatcttgggcaccatgcctaacagacagcacttgagaatggtagccatctagtaaaattctagcaatcttatctgagcaccttccagaataatgatgaggtaggggagacggggatggggtgcaaaggagatgggaccacttgtccacagaccttggagtcagtgaattaaagccgaatcctcaggaacggtatttattccacacagtgcaacactgccctctagtgacaaagaggtggaaaagctttcagagcatgaggcaagcaaggaagaaaaatacatttttccaggctctaagacagtaagttctccaaatcagagagatcatatcaaagaataattttttctcatgagtcacctttaaagcagtgacatggagtatgaagagcaatattatcaagatttactaccaacccagaggttgtcactttgttaattatataatatctcaaataggaaaaacagtaattctctctagacatattaaatgtgacacctaaaaagaagaaagtctgagtgttccaggttactcgacattattctggtaggacagcacggaggtttaagattcatgtataacagtttgtaaaccagatttgatcacagatttggttaatgcaactaacaaggtcaaaacttaaggctgaactggtatacaaacttggaaggaatacttaccatttttaacctcttttctccttgcagagcacctaagtgaggctaacagtaccctgggttgttgtggggagtaaataagaaagaacaccgaaatgcccagcagagtgtctaacacacaagcagtaagtgttagctgctgctatttttgttgtttctgttgttccaactgccacaggcccaaatggaggaaaagccataagataaaataactccttttacttttttgggttaaaaccaaggcttacctagtttcatttcctgatgcatctaccaatcaaatgtatcattttataacaagaacatcttagcacaactttgatgtccctgagattataatgctaactgaagtttggtaatagtttagaattcagatactgatctttaataaggcagaaagatgatgctgtaatcaaaaccgtctgcagagacaagacgtgtcaccatttctatcgtaaacctactatggtcgttttaggcagtctctgcccatcttcattcttctcaattaacttggatgaaaaacataatactttaaattggaaattttttataataattttcctcacttaattttcatttttaatatagtgatctcacgtccaaacatttcccatttgatgatcaccgggtaaccatgtgaccccttaagccagtcccagacaactataatacatgctttctagtattgtacagttcttgtttcaatatcctgtagtcacttctatatcctgaaaaggaaaaaaagaaaaagaaaactgatacaaagatatgtgattactgatgtcaagggtacatgctagagaagaccaggaagcaagtaagtgctagaaacccacgttcaagggtcccacgtgccccatctgcagaaggaagaatgtgagctacacaccttgtcatggtatggtcctaagacaatccagccacagaatgtgtaacccagataaatcataccagcacaagcacaaaaccgaagaacttttggcagtgaggcctgcattgttaaaatcagcacctgaaaaaaagaacagaatgggtgaaatgaaaaagtagctattagaacccaaagaataaatgagtctcaactgcagtggcactacccggtgccgcatccttacattatatgcctggaaataacccaggtatctgatgactccaacccaaaccaagagcgtagaggttccaagaaaaatgctgcagagatcatagtttgtgagattctaaggaatgaaaaaaaagaaagagagaaatgagtaaaatatttgactccacttagcttattagccttacattaaaccaattaataaaaaaagaactatctgcctccctataggtgatagagtttttttttgaagaaaaaaaagaagaaaaacagatataattccaaatatttgtgtttctcattttcttttagtatttcaattggttgaactaaatttttttccaaataatactctgaaatagaaattgtatttaggttgaactaaatttttttccaaataatactctcaaatagaaattgcatttatcactgacctaggcattcgaggatacaaattaatggtgtttgttaagtaccaaacaatacaattcagctgcttttgaaagaaaactccagcatgatttcctaacacagctgcagctctgaggaaattctagggctagttgaaaagacaaacacacaaacatgattctcatataatacgctaaatgcagtgaaagacacaatgcctagctcatcacagagggacaccacagacacgaccccagagcaaagacaggcctgcaggacaggctgggaggaagcaccacaggtaagtggacaaaagctgaacaaaggcacaatgctgacaagacgtcctagaggggcagggtcagagcaggggcaggagcaagaggcagagctggatgatgatgaccccaggggccatgctgctgagggaggccacttcatcccaaagtaggccccaagaggtagaaaggatggtaacagctggatagacacttccagaaaagtccctctgacagctgtgtgaatggatctcaggggtatgaagtagaagacgggaaagctggtgaggaggctgctgtcacagttggccagaaaggaagaagcctgaagaaagccagagggagccgggatgggagagaattaggcatgtcagggttaggaggtgtggctggagggacctctgaccaacagcagagaatggacgggagaatagtgcggtgaaggaggagttgaggcttagttaggagatcaaatcaactaagttatacaaagggtcaggctttagcgggcagtctgacattcctgccctcaccccatccgtcggagcacccaatggtcacagatcctccccacaagctcttgacatgcaggttcagggaagggactggtttatggataagctgctcctttggcaacttaaaaagaaaaatgaggcccaaataaccaatcttttcaagcttagtcactattctggagctgttgccaagtttcgttccatggaacatcggcttcctttcccttcacgaggaaccaagccaggggaggcctcacttgtgctggtgtgagaaaagggaagacacgagaatcaaagtggtctccaaaggatggtacgtcttaagatgcctgtggccatccaggagaagatgaagaacagagactttaaatgggcttccctcacctttgctttgatttccatttttaatatggagccaatgattgtcattaggtcgctgataatcaccaggacataccagccgttgatgaactcccactggtcggtgtcacacacaggccgcttgtacttctccaggaagaaatttagaaatctctatggcaaacatttaaagaagcgtttcttacaaaccacactgccctctggaagaagaaggcaagtgcaaaacagtgctctcacctgtaaaaggacatggcattgcctttccaatttgccagatccacctcgaaagtggaggttacggcacacactttcccctataatctgagtaagcattcaattgtctgtgaagttacctcaaatatgaaatacgtacgcggtaactccagcaggttcttgtcatagctaacacacagtacattccaaatacttttcatattaccaacacatccattccgataacaacccaatgaagcaggtacgagcaggtctatcacccagagaagggaactgaggcaccgagaggctaagccaggatccgtgtccaggcaggccggctccagagtgcgtgctccaaatatgagccccctcaccttggcagggaaaggaccttaactttgcattcagaatatcaaggggattggggagcatgtaagaaaggtggatatttacaaaggacattgacaaaggtcaggattaggcaaaatcaaatgcagactacgtccctgctccacaaatggtactctgtggacttccaatttcccctgaccccagtgtgcatttgtacacacgccacagccagaataagatatgtggggagcggaagtatatattcataagagccctgagggtaaaaaggcaaaatgaaactcaggggagaattttaaaactattttaaaaacagaataaagtattttatgcttcattataatccatttaccatgcctccctgtcaaaatgaactctgatttgaagacaaaagatgaaacccacacatgctattactctgttcttcagatcactcctgaattgaagagggatttgttattctggaaacattcaaaagcctgagagttcaccactgtgcatctgtacatatcagctcagttttaagcaggataattatctgatcccacttgacatactcagagcctttactcacttcctacacctcaggctgatgaatgcctcatagcgggcaactactcaaaggaatctgatttagtcaaaggtctccaaaaaaggcaggtgcacaatatcggtggtccactgcttgggcaaactgagggcgcaggccaagagggcaggaagagaatgcgaacacactcttaccttccgtaaccttagagcaagaacaatggatcttgtacacagaataagagatgccaagcaaatcacaatgacaaatgcatcaaacaccaggacatactgagcatttttctgagctgaggaataaaacagaattcaaatgttaaacacaccttaccggagaataatttccaaacaaaatggcagtgtgaaaagaagttcaaacaataaatgttttgtctattgttaaaacaaaatggtaaatatcagaaacaaatcacaccgcattcattcagaagtacatatgtaaggcaaaacattccctgatataaagctatacatttaaaaacatgtgagctgggccaggcacggtggctcacgcctgtaatcccagcactttgggaggctgaggtgggcggatcacgaggtcaggagatcaagaccatcctggctaacacggtgaaaccccgtctgtactaaaaatacaaaaaaattagccaggtgtggtggcaggcgcctgtagtcccagctacttgggaggctgaggcagaagaatggcatgaagccgggaggcagagtttgcagtgagccgagatcgtgccactgcgctccagcctgggcaacagagcgagattctgtctcaaaacaaaaaacaaaaaacaaaaacaaaagcaaaaactatgtgagctgctaataaattcactcaaatttatatataaatatttactgtagaatagaattcaacagaaagtgatccatttgggctccattcaaaaaaaggcaaaactgctgacctactctgagttctttcacataaaagcagagacatcaagttcaccattaataagagaacaaacaaattaaaacaccaccactcagaatccccacttctgcttctcaacctcactgtgcactttcccaggacatagtgccaatcttataagccttctctgtatgtagagaaaattacttcttggaacagaagcaaggaggggagtggtaatcagatttttggtttggagcacacagcagcaagaagaatgtatgggaaggagatgaatctaaccttagtttctctcagacttcacggtagtgtctccaatcccagcccagctctcttctgcctgacccccaccttcttcaccctacagccacactgatcttccttctttcctgctctcacctcagggactttgcacatgctgatctgtctgcctggaacagcacttctcccacatgcatggctcagcttatttattttcagcctcaagttccaaatgaaaaatctcccatctcagaaaagaattccttaaattctcatctctattagccctctcctatatactttcatggttcttggttactacacacacccagagctcctttactttcctctgcacaacagacactgacctttcattacatctgcaaaggcagcacagcatggagcacagagacagtgtagaatgggaaagaacatggtctctggagcccgacagcctggctctgaatctcagctctgtactcagaagctgtagagccttgaggaagttgcttaacccctgtgcctcagtttcctcctctgaaaagtgggtagaattaaaaaatacctacatcatagggctattgtgaaaattatgcaagttcatatacaaagagcccatgaaacagccccaggaaaataataatagcaaacacttacagtggttactattttatcattaagtgtccatcttccccatcaagtgacaggctctctgaagcagggcccataggtagttgctacggtttgagttacttgtctcctccaaaactcatttgaaatttaatccccaatgtgacagtattgagagggagggcctttaaaaggtgattgggtcatgaggtctctgccctcataaatggattaatccactcatagatttatgggttatcaagggaatggctctagtggctttttaagaagaggaagagagacttgagctagtatgctcaccccccttaccatgtgatgccctgcactgccttgggactccacagagactcccaaccagcaagaaggtcctcaccagaagtggggctccgactttggacttctcagtttccagaactgaaagaatgcatttcttttctttataaattagctagtttcaggcattctgttacaagtaacagaaaacggactaagacagtagtgttgaatacagcacctgtgcttagtataatgcttcagtatactttcaaattaatgaagagaatcaagcagaacataagaccactgaataatctaagttagaacttatgttggtctgagctaagttgcggcagagtgaaagagggcacagaatcgtaagagatggagagagtcatggcctggtctctaactggacttggggaataaggaagaaggacaaccaagaatgattcctggttccctgtcttgggcaaactgagtttactctggatattcatgacaagagaagactattcagtggcagttaaagccatgggagtgacggcccctcagagagaccactgggaaggacagcgtcggggatggggagcaatgtttgagaattagaaaaggagatgagctcaggaatgggatggagcagaaaggccagaggagaagcaaacagaaccagggacaggcgaccctcagagaacagactgcggtcagagtcttccacagcaacacctctgcagagacagcattgaagagaaatgccagagtgtctatggacttagtaatgcaaagatgtgggtgacactggcatgagtgtctgagggcaaagcagctcctacaatgggtggcgagcagagacagccagctggtaaatgcaactctctgagcaaatgatttcatcttactaagcttcagatgtcccacctacaaaatggggagggcaagcgtactggttcctgaggctgccatgagaatcaggtggaacagtctgtgtgaagtgcttgttacagtagtgcccagtgcctagcacttacatttacccttagccatttacactcaagaaagttatcttgaggtatcatctaatgggtaggtaagaaaacaacttagctctatcataatgcaagattttttttccccttggatccatggaatggggcagaggaaacagaggcagctcttgggaagataagactgaaaatcttatgaaatgcaaggacagcatctagtaccttcctttctgacataaaactagaacacaaatctctaagacagtttgcattggaccttgtttacagatgggaaaacaagcaggcttagaaacagaaaccagtcctcctaacagaatccagtataggattctgtttttctttgaattactgagaagactagttctatggtatgctaaaaatatgtattttatgaacatcttggccaggcgcggtggctcacgcctgtaatcccagcactttgggaggccgaggcgggcagatcatgaggtcaggagttcaagaccagcctggccaatatgatgaaactctgtctctactaaaaatacaaaaaatagtcgggcgtggtggggtgtgcttgtagtcccagctacttgagaggctaaggcagaagaattgcttgaacccaggaggtggaggttgcagtgagcaagatcgtgccactgcactccagcctgggagacagagcgagactctgtctcaaaaagaaagaaagaaagaaagaaaaaaaacatctatatcacccatcactggggaatcccgccaagaaggagtcccccaattcctccccaagcccctcatctccaaattcctatatttatgaaaccaagttaaatgaagacatggcacatttagagaggggacttcggagtcacaaaaggcagcatgaggtttgtatgtgaaaatggacattcacctgcatttgcttcaatatgggtaatgacaaaggagagaggagcctgggggtaagcgtgtgggtgtgaatgagcctctgaactgttagaaatagtgtaagtgtcccaccagatgtcgcccttgtccttgcccacttcccccaaagccaaggcaatctcaatccaccagacagcttcatataggggaaaaagtccatttcctaagatggtttccaaacataagttttttaaggctttcacatcacatcatcttattttaaattcacattctcctagtgatagaacctggtttcttaagacacagctctaggagaatatgtaaatcttaaaagagcttttacccagtggtctaggaggcttgtgtttctcctcattggccacaggagggggctagagatactctcttctgagcacaagcaaggaaaacccctaacgttgcaaggagggcagcaggcggaaggaaaaactcactgttctggaaatgcatttgactgactagcttggaaatttccatcattttgatctttataatgatattccaaatcacatatttgacaaaggttagtttcttttcacagaaaattggcaacctatacttggacttagaaaatatgcccctgatctctgcgtatctgtaagagagtggtgtatgctggggaatagtaaccactttttaacagaaactgaaactataatcggtggcttaagtcagtcagtgaaattattgaaaccaaaacttcaatcgtcaggacatattatacatctgaaaagcagcaggccacaaatcaaatatactttaaaacaaatataaaacagaagccacaggtattttacattttatttcattctgataacctggtcaaaaggaaagtcatttaaacaaaatctgcaaaataaaaaacactgagcatccatcattaacatcatcctaattctttactgagcaaacagaacaggttccataggtagcccatgatattttattttattttaatttttttatttattttacttatttttgagacaaagtctcactctgttgcccaggctggagtgcagtggcatgatctcggttcactgcagcctctgcctctcaggttcaagcaattctcctgcctcagcctcccaagtagctgggattacaggtgcatgtgccaccatgcccggctaatttttgtgtttttagtagagacgcggttttgtcatgttgaccaggctgatcttgaactcctgacatcaagtgatccacccgcgtaggcctcccaaagtgctgggattacaggtgtgagccactgtgctcagcagtagcccattttaaacatgtggattaagagatgttttttgagcaatgactgagtaaatgactcagcatttgcagcggttgctgtctgggctctgaaggccctgatccttccccactgtccaaggctcagatcaaagcataccttctccaagaatcatttcttttcctactctgccccactcaaacttattacctttgctttttttctcctcatactttttgtatgtatacccttatttctctccataacacatcacagattttataagcacgtcagtctctctcactaaggcattttcttccttttcccataatgcctagcaattaatatgtgccaactcttgtgttcagtgctttgctttatatactaattcatttaatattcaatatcctggaaggtaagtttaggctgagtatgccctatccagaatgatttgggaccaaaagtatttcagatttcttttgattttggaatacttgcattatacttacaggttgagcatccgaaatccaaaaattcagaatccaaaatgctccaataagcatttcctttgagctttggtcatgtcagtgctcaaatgtttcaaattttagagcattttgatttcagatttttccgatttgggatgttcaacctatactattactctcattttacatagaaagatactgagacagacaggttaagtaacttgtacaagatcacaggcacagtaaacagaactgggaccgaaacccaggcaatctggctccagagctaagctcctaaccactgagtcatgctacctcttctaagaggcatataataaacatttgctgaattaaacaaaaatacaaggctttgggatattctttacaggatctaatgctcgaggcggttttcttcctattatcatgcaaacaaaccatttaaataccccaagccacaaaataaagtgttaaaaatcatctataattcccatgggcaagtatatagcatacttactagatccaaatatgttcaagtctttacattcttcaattttggcatcactgtcaaaatagattttgattttgccactgtgagctttattgtcaaagataatctggagacacaaatgtatagcgagattacaacacagaagaaagtataacatgttagatcaaatctgcttaaaaaaaaaatcactggcatccagtgtgctgatccaaagagaattacacaggccagcaaaatggctgactagaattacttgacactcatttcctgcaccccccaccacacacacacacacacacacacgggaccaaaataatgaataaacaactatattttgactgaaatcactaaagaagtacactggagagcaccagggtagcaggaaaatcctgtggagcatgaaagcccaggacagcaacataggaaggggagcaaggcaccctgcctctgccacactgtctccccagccaggatcagcttagagccaggggaatctctttggataggaaaacgttaggctagagactctggtggtcctcattatggccacagaatgccagcagtccttgctacaggagagccctccagtcctcacaggctttgaatccagtttggagaggtgccgggagttcatacagccatgctgccccagagtggaagcacacattgcgcactcttcacctctgtgacctaagctgctatggcatgacaccatttagagaccagatgctaacagagtgtgttctgccctgggggccagtactctttgtgtctctccatccctgaagtcctgccattattctaccatgttcacaaaggtgcctgcaacaccatgacactggctgcctagagcctagacctgatggaacatctgagaccctgacatctgaatccatgcagcaccccttcctgcccctgcccctgggaacaggcagaagtgcacagcaggaagctgccaaacagctggctggtgtgctgtgcttgtgcacacttgggccacacagttggctgtctctccacacccacacaggcctgacagccagttcagctgtaacttcgcatctctaaagagcctgcctcacagcctactggccccaccacaaccatgcacacctggcctgacaaccagctgggcagcaattgcccctacccagttgaagagcctgccacacagcctgctgcttatcatgtatgcacatgtccagcccgacaacaagtctggcatccctgcctccagcaaaactgtgtcattgctgttaaaaactccctcagcttaggccactgagccaatcacagacatcactgacaaggagtacaactgaacaaactgcatggacaccatactactgagtctgcccagaaccaaagccactataaccaaccaacaccctagggcccatctacaggaaaaagtctatccctgtgaaagctattccataaaattggaaaaagcaactatttcactagatgcatagataacaatgtagggacacaagaaacatgaaaaggcaagaaaacatggcacccaaaagaacataataattctcaagtagcagaccccaaagaaaaggatattcattaaatgcctgaaaaattcaaaataatgatcttaagaaagctcagtgagatataaaagaatacaaacaattcaatgaaaccaggaacataatttatgatttgattgagaaattcaacagagagacatagcataaaaaagaaccaaacaaaaatcttggagctgaattattcaatgagtgaaattaaaaaattacaattgagagcttcaacaacagactacatcaagcaaagaaaaatgaatttctggccgggtgcagtggcctgcctgtaatcccagcactttggaaggccaaggcaggtggatcattttaggtcaggaggttgagaccagcctggccaacatggtgaaaccccatctctaatagaaaatacaaaattagctgggtgcggtggcaggtgcctgcaatcccagccactggggaggctgaggcatgagaatcacttgaatctaggaggcggaggctgcactgagctgagatcacaccactgcactccagcctaggcaatagattgagactctgtctcgataaaaataaagtaaaataaaatgaaaagaatttctgaacttgaagacaggtcttttcaaataacccagttgaaatcttctcaagtcttgggagagatatggacatccagatctaggaagctcaaagatccccaattagattcaccccaaaaagattctctccaaggcccattataatcaatctgtcaaaagtcaaagacagaggcaattctaaaagctgcaaataggccgggcgcggtggctcacgcctgtaatcccaacactttgggaggctaaggcagacagatcacgaggtcaggagatcaagaccatcctagctaacacggtgaaacctcgtctctactaaaaatacaaaaaaaaattagctgggcgtggtggcaggtgcctgtagtcccagctactcaggaggctgaggcaggagaatggcgtgaacctgggaggcagagcttgcagtgagcggagattgtgccactgcatgcactccagcctgggcaacagagcaagactccgtctcaaaaaataaaaataaaaaaatactgcaagagaaaaacatcaagtcacacataacagaatctccattagactatcagaacatttctcagcagaaaccaggcaggccaggagagaatgagatgatatattcaaagggtttaaagaaaaaaaaaaacaacaaaactgtcagtcaagaatactatatccagcaaagccatccttcagaaatgaagaagaaataaagacctccccagacaagcaaaagctgagggaattttcaccactagaccagcctttcaagaaatgcttgagggagcactaaaactggaaatgaacaataattatcatgaaaacatgtgaaagcataaaactcaacagtagaggtaagtttataatcaaattcagaataccccagtattggaatggtgctatataaatctcttagtcctctagtatgaaggttttaagtcaaaattgtaaaaaacaaacacaagtacaattagaggctaaggaactcacaataaagacataaattaaggcaacaaagagaattatgccaatgaaaatgttcacatcacaagatttcttcacaactttctgttattagtgaaacaaatatgattgaaagggctaatatgtgaagttttactaaatacaggatatcagatatctggttcagagaaatcctagagaaaaacagacaaccagtcctaggaataaaaaccaaaattaactaacctttgaaagaacacaaatgatctcatttattattctgaattgaatttaaaagcatttccttcaatttagttctttgggtatgaaattctagtttttgttaggctagaaattatttttctatttgtttcaagagctacatataatgttttcagaaagaacaaagattgctccaagactgcaggctgaacttaagatgtccaaatgccctcaatcttctaccttatgaaatttaaatcaatcatttaaatcatttacagtttataagtgatatatgccaagtacttattagggtgaacacattaagaaaaccaaaaagttcactggcagagcttggagagccggatatgtaggtgatcaaatccacatgcacctgcctgtctctgaacacaagccaggtttgcccaagatcacacactcaaaccaaaggtttgagaattaaaccataccatcctcatttctatacctgtaagttatgattaaacctccattagcactggcactcaagatctctgtttcccccaggagagcccctaaaatgcttttctcaaagcagacagaagtccaaagaacaaaataaaaatgaaaagccaatatttttaaacccacacttccgaccatatcatgacaaagtcatcaatgacctcatccttgcagaccaaactccatgctcctctcctgcctttctcctcatccctgcagatgctcccagtgctcctctggcccacccaccccagagagcttgcagctggagacattcttccttaccacatatcacaacctgtagttacttttatttcgtttacttgtttttctgtttcccctactaggctgtaagctttcctgagggccactgtgcctctagggcatagcaaaatgcctggtgcatagtatggactcattaagtatttattgatagttgaatgaaacactcttctgaattgctaaaggacagtatatacaactttcagctaggcattcagtttagtcccttaatgaacagggaaggcagggagggagaaaaagaaggaaggcgagaaggacagagaaagtctatgaaaatgagaaggcagcttacttccccataaaagtgaactgtctcttctactatacatgccccctcccaaaataaaaagagaaacaactgctcctttgcagactggtcttcacatcagtggagcagtttatgcctcgaggtttgaaaatatttgctataacatttgcaaagaccttcctctaaagctgggaagaacactatagacatgtaaaacaccttcataaacattttaaaaaatgtattaggagagtagaaagtcaaagccaattttttaaactcttcttttcaatgtagaaacttggtttttaaaagttgaaaagggtttgcttcatcttcagaagtaatggtctctggatcaacaataataccataatgaggctgggcatggtggctcatgcctgtaatcccagcattttgggaggccgaggcaggcagatcacttgaggccaggagttcgagaccagcctggccaacatggcaaaaccctgtcttgtctttactattaataaaaacacaaaaaagttaagctgggtgtggtggcacatgcctgtaatcccacctacttgggaggctgaggcatgagaatcgtttgaatctgggaggcagagattgcagtgagctgagatcacgccactgcactccagcctgggtgacagagcgagactatgtattagaaaaaaagaaaagagtatcatattgtatcactaaatctgttttaaacatgactgcatttaacacatctgtaggctgctgtgttttatactctgcatcaacaaaaagtgtaggaaaaaaataaaaggaagtagctagtaaaacaaagatacttgccgtattctgaaagacataacagtctggtaactcacgggaatgaattgtctgtaggtcaatgcctttaagatgaaaggagatttcaacctgtaagagcctgaataaaatatattgaaaggtataaattgtcataatcttactatatactattctccttctcccaccctcatctcttagggaataacactttaaaatgtatttaccgataaaattccagtctgaagaatgatgagttcttccagtccggaggcttcttggagaggtcctgaaggtctaattgaacacaatctagggcaatgaaagaacaagaaatggttgtttcaggcaagaattaggtgctaaaactaatgggtgaaagtgtgacaagaagcaggttacttacggagtttcaaagtatctccctagaaaatacttagcaattattcaggaaaaatgatagtaacctcacagacacctgtcaagtgaacctggcagacaccacactaaccaagtgatcagttacatcacagtaatgagataaacagacatgtacctcctgatacaatgaactgagaagcatatgacatcacttgtgtggtattcctgccaaaaaatgtataacttcaatctagtcatgaagaaacagaaaaacccaacgtgagagacattctactctttaaatgtatcaagatcataaaagttaaacaaacaaaaaccaagaaactttagactgaaaagacataacatgacaactaaatgccagatgttatcctgaataggatcttggagttgggtgcagttttcattttatgataaagaacattaggaaaatttatgaaatgtgaatagggtttgtagaatatagtattgtatcaatgataactcattattttgagcactgtatagtggttgtgtaggagaatgttcttgttttggggaaatgcacactgaagtatttaggggcaaaggaatagcatgtctgcacctccaggagaaatatttatgcatagaaagaatgatcaagcaaatgtgataaaatgttagtattggccaggcacggtggctcacacctgtaatccccgctctttaggaggccaaggtgggcggatcatgaggttaggagttcaaaaccagtctgaccaacatggtgaaacgccgtctctactaaaaatacaaaatttagccgggcgtggtggcgtgcgcctgtaatcccagctactcaggaagctgaggcaggagaattgcttgaacccgggaggcagaggtttcagtgagccaagattgcgccactgcactccagcctgggcgacaagaacgaaactctatctcaaaaaaaaaaaaaaaaaatgttagtattggggaaatctggatgaaggctatacaggaaatatttgtgctattttgtaacttttctggtaagtctggcactttttcaaagtaaaaaaatagaaagaaaaagaacacaggttgtattcaagtaaaaacagattatgagctgtaaatgatagaagaaagattccaagaacctcacataaaaattagtctcattattgtgtaggctaacacccttgttttacagggcaggaaacaaggagctctaaagacaagcacctttcagggtcacagaaacctagtgacagaactggtatgaaaccagcatgggtgacccttgcccaggctgttgctgccccttccatgctgactttgaaatggaaaagttggggccttgtgcagtgcctggcacctagtaggtgttcatgaatcttggaaaactcactggctgattcttcaaaagtgttattccacaactgcaactcttcatttgcttatttatccttccaactagagtataaggtctttgagatcaagagcacaactttattgcaccttgctaaacgcccattgcctagcatgtagctggcactcaaaatatgtcctgatacacgggatacacttacgtttaatgaaaattagatgtcctgagccagaaacagggcccagagctaaacagacaactcaatagacacaatatttttaaaagatagttgcagagagtgtgtctccctgtgtttggcagatggagtattacacaactcaatactggttttcctgactagaccttaattagtacagtgagggaagttggtcaaaagaaacttgtttctggcaggaaaagactgatgatagaaatagcaaaaacatattggcacttaactccataccagacactgtgctggactttatatattctctcaattaatgcatcatctcatttaatcttcaaagcaaccttgtgagataggcactattagtgccatttcacaaatgaacaaaccaaggcccagagaggccaagaaacttcctcaaggtcacacaggtagctactaggtatccaaaagttaattcgacttgtgcttggttctagagcctgagctcaaccagtgcactgaggaggttgacctctgagcacatattttagaagaacatcaaagacccaggctccatacccaactcattcgtttattcagtaaatatttgctgaaagccaggcactgtgctaggcactgaaggtaaagcaatgaacaagacagacatggttaccatcttcatggagctcacattctagtgggggagataacagtaagtaaaaatatatacaaggtaatttcacagtgtgagaagtactatgaagataaagtgaacaagaataactaagagggtgatatggtttgtctgtgtccccaaccaaatctcatcttgaattgtagtttccataatccccacatgttgtgagagggacccagtaggaggtaattaaatcatgggggcagttacccccatgctgctgttcttgtgataatgggtgagttctcatgagatctgatggttttataggaggcttttctcactttgctctgcacttctccttcctgccaccatgtaaagaaggatgtgtttgcttccccttccaccatgattgtaagtttcctgaggcctccacagccctgcagaactgtaagtcaattaaacctctttcctttataaattattgcgtatgtctttattagcagcatgagaacagactaatacagagggggagtccaccttaggaaagatagttagggaatggctttcacggtgcgaaacatgtttgaactgaaacctttttcctgaaaggaaaaagaaccagctatgcatagatccaaacaggaaaaaaatcaagcactaagacctccaagcaagaaagagcctggcttgctcagcaaacagaaaggatgttacaacagagaaatgaggacaggggtctggagaggcaggcagggggctagtttctataaggacttgtggattttattctaaatgggatgggaagccactaatgatttttaagcctggaagagatatgacctgatttaccactgcggtttctgcagggcagggcaggggctcgtagaggcaagaccagaagcagggagaccacaagtagtggcttggatgacagtggtggcagtgaaaatggggaaattggcaacttcaagtacggggcttgaataactgggattattacagtatgatatgaaaacatgatgactacacaccagaggtttgttgagtgaacaacaaaacaataaaataatgaaacattattttaaaaaacaaaaagtcttaagccaaacacctcgtatttacatacagtatgctcttaaattcttaacaaaatagcacaaaacaattcgacttgattagccattaacttgttgccaagggatctcctaagagagaaagtgagttgttaatcacaattcacctttgaagagcatttctatattttacaaataataaaaacaagtgtacaaaacatctttatgtatattatttcatttaacacatacagaccgttttttcagaaagcctaatcaccccttcatagggaaaaaaaaacaaaaaacaggacctgtgaatatacccccaaaccaacaatcttgagttgctccaaacagatccacaaatgctgtccctgtcccatcgccacaaccccacagtttcctgagccaaagcccctctgcaggccagtgttggagtgtcagcccctaacaggttagctctcaccaaagcaaagtttttccatctgggttgctagcacatgagggcatttctgctcttaccagaagacgataaaggtacatcatgaaattatcactgcattaccgagctcaacgtcgttgtcaatattcagtgtctcattagaaggaaacatggtccctttcttgtaatgctgcttacagacttttaagccaattctattgtcttcattttctccataaccaagggtccccagggtaatgtcctttagctgatgatactattaaaaaatagtcaagtaaaaaccacatatgaccttttataactttgatcagaggttatagcatatagaatgtactttcagttactttgtattgtttacatcatggctctcaatagaacttcccaatttaaaatactacaaagaaatcttctcagtttgttcagcaagacactgcctcacagaactcgaaacaaaacaaggtgatggacagctcccacctcactcagccaaagccaaggtcctgccttatctctaggacctcatctactccagtcccttggctccaacctgcaaagctgcactgccctccaggcagttcctggagctcacacgcatatttttgcctctggcctttgctgttccctctgcctggagacccacgtacatacccgctcggtttactcactccttcagctctcaattccgcacctcaatgaggccttccctccccaagccaaggaaaattgcaaacatatatcaaaacatcacattgtaccccataactatatactgtgtgcaattatgccctgtcaaataaaaataaaataaatgcagtaaaaaagaaagaaagaaagaaaatcacaaacatccatcactgcacccaggtacttcccatctccttccctgctttactccttagcagttattactttctaatatctactgaggacatgagccatccacactccacagcttacatcaatgactaacatgaaccaacattagcttacctcagcttacattaacatggctttactgttggctatctgcactaatagggctttactagctctgtcttcattaatacgactttactattcctgaaaatttttgccctggaccataaaattccctctattatttcaggaacatccaaaaaattcattgaaatagataacaattggaagattttgtctgaaaacaactccaagattctttgaaactgccttcccaatcctcaccttgccatgtccatcagtcctaaattattatatcatcatccttacctaattctaatcaagctcccctcacattaaagaactccctcctcacccaaggcaagatggcctctgatcaatatagcatctcccttaccactctaagtaataagctcagctttgctcatcaacatgttttttgtgtggtattctcagggagctagcatttgatattacacatttcacttctttttgtctagctcttcgttccagaattaagctctataaaggaaggcgctttgtctgttttattcactgatgcatcctcaatgactggaataacacctgctacatattagatacttcaatatttattgagtgaatgaaaaagagcaggaacagtttctctttcctaaattatttcttcaagtctactaatctgctttctcatacctgtctagatacaactattttatattccatattcttaagattcagctagggttattaatgctaaaacatcacaattaaggccacagaatccctgatttttttatttatttacttatttattttgtagagatggggtttcacaatgctgcccagactggactcaaaggatcaacccactttagcctcccagagtgcctggattacaggcatgagtcactacgccaggctggaatctttgattttatattaagctttcatcaagccttctgagattaaaaatctactcttgctatttgatctggggtaattttccaaaagcagtaggtatgaagtgataaattaaaaagataaatattttttaaaaagtcaaaataggcaaactcttttgtgtagaaatgtagcttcagaaatagcaataaacattttttggcagactgcaaaacttacattagaatattttaacatgtgtataatttttgtttgttggctaagacaaggccaagtatcaatacattgttaaagtataggtcattcacaacaaaacacttgcctgattaatagcaaaaaagatgctctcataggcatcctcttgagtatatacactgcagctgtagtcatcttcatctgtaccagaatatcctttcaaaaacaagtgcttaaaagcaacagtgttatcttctttgaaagcaaccaccagctggttacttaaaccaaaacgaacaagctaaaaaataaaataaaatagaaacacatgaattacaccatttatcaggggaggcaaatgtcttctcactatcatcaaccattacctataaacatcagaaaataatatcaattttttttggtttatactaatagcatcaatgtcaaaatacaagtcccacagaagaataacctcatcaagctacatcagcaattcaaagtagcataaaattagaagagattactgctcccaatgactactgactctactggcctttaagaaagaaagaaagaatccaaatcagctaagtctcaatccatttttcttatatttggatttcaagttaattgttttcaaaatcaattacttagtaaagcagtaactcattgtattgatttaagatttagaaattgtagtattttttaaaatcacaactatgttttacatatggcttttaaaagtgttttttgaaaagtagcctacataaaaacttactccagctaggaggtaatagttgtcaaaagaattcaattaattcagctctgcaagaattctgtataaaatttacacctgagagtttccctcaccaaattctacagtatcaaagcacatgaaagaataacagagcatgctttacttgtatgatgtcaaacccattcattgtcaccaagcatccacctactgaaaaaatgcccacttattctccctttcactgtattctggcagaatttaggcacccaagggctctcttcaccagaagtgaaagttttcttcttggaacccaataaatggaggaaattagtcagcaccaaaagtttacacaaaacctaggaaactacacacacagctacacacatacctcatcacacacgcactctcacacgcacattcacactctctcacgtgcgtcctctctgtctctctcacatacatacacaggcagtgacggtagtcaaatctctataagccctgtcccacacacctttccccacctccctaagtgatttcttcagctgccttataaaacaatgagactagaaagtttgctccaagtcctcactcaactaagccaccaaattttgggactgttttcttcctatgtaaaattagcaagtgtaactagatgaccctgacagttctgttatttgttgtcattccatggttcaatatgatacatctgaacaataatatacaagatacaattctgaacaattcagataaaactaatgttaatttagctgggtgaggtggcctgtggctgtagtcccagctgcttgggaggccgaggtgggaggatcacttaagcccaggagttcaaggctagccttggcaatatagcaaaacctgtctctaaaaaaataaagtaaaatagctaatattaatttgcatatgcaaacaacatacaggcatacggttttttcatggtttacattttttagcttttatattttgttgttttaaaaaatactaaagaattaggaaaaataatcaccattttcagcaattattatatgccaggtactgtgctaactgctttacatgcagtgcctcatttaccccaagcggactatgaaaatgttactactgttattccattttacatacgtgcaacctgagatttagcctcattaaattgcccaagtcaccagaatggaagccaagtctaattccaaagtcatctgtgttatgctataaaaacaacttccttctgctgaaaaagttctttaggatgcttcttataatgaacttaagtgctagcttttcaaaattaggaaaggcaactatcgcttgagaaggtacacagatgctactgttcagcatttgagtctcaccatgtcacattcctcaaatgccatgtcaaaggattgtgcaactgctaaaactcagctattctaaggaaaacatcagataagaagtcccacatcatccagcttgtgctgaaaattaagcaacagaaggttataagttcttctaagcatgtgatgtctgtcaatggtgcctgtaggagaagccagaaaaggtcatgttgctcttgaaagctaaaatgtaaaccagggaagcaacacatacatgattgcttcaaagttttattaaaactactgacacatatgaaaaaactggtacacacaccacacatgaatgaagttcttcaatcaaagtttgctgagtgcttactctaagccaagctggtatacaacgtggaaaagaacactgcatggtacggaataacaactcttatctgttgagaaccaggcattgtgctaaaatttataattattatttctcatttaattctcaacaccctattattacactgggctctgcaaggacaggaatgtttttcctttttccctgctattatatactcaggaaatgaaataatgcccatcacaatgtcaaacactgaatcagctgatgaatataatcccatttgatacatatgcaatctgaagtcaagtaatttatccaggttggaatatccagaaaatgttagagtaaggatctggacccaggtctgattgattctagagtctgtttgttctctcaacctcttggccccacagcctcttaaactgaaatgctgccaatttaactctagaggcagggatattagacccattcctcccacattaatagtgaagctaaagaaataaaaaaaaatgtaaactagggaatgaaaaaactgaccatgaaagtggtatatagtttgctgatatttgaagccataaccttaaactcaaagctcatcaaaactcagctttggggatgagaggactctgttgtaatctctgcttggaacctcccctatctggcatcaggagcaagaaatttcctccattctattcatagaacaagccaagataaaaatgtatggcccagcattggggaaggttgggaggaaactgcgaagtccctttcttgttatgacagaaccaaacactccctgcagagtaagagtaagggaagatggtattggccaaatgactgggttttttttaaaggcattgacagcaaaatgcatcctagtcccactaattagacattaagatttgctgagagtatgatacaagacagaaaaataattacttataagtgtagtctggcaaagattgtgaatttaagacctcattatgaaatcaatgtaggataaaatattctgtaccaggtaaaaacaagatactgctctaattatgtacaaaggatatgggagagaaagagtagaactagcaaaagaatgtagacacctctctcaagattataaattactgcacaattcagagcaggaattttaaaaaaattttctttctcatcagtcctcatacccatcccattagacttgaggatgaaacacaaaaagacagaaaaagagagggagggaaaagtgagatattatgcaaggaaaggtgatcaagaaatctgctccaattagatatcacccaaatagcaaaatttgttagaatgatcctatatggaaacaaaagtttaatccttcccaattttattaggggaaacagggtatgcccacatgaaaagtaaactacagttcccagaaatattttgttatttaaagtaaaattagtaggctgggcacagtggctcatgcctgtaatcccagccctttgggaggccaaggtgagaggactgtttgaagccacaagttcaaatcaagtctgggcaacaaagcaagaccccatctctacaaaaataaaataaaaagccaggtgcagtggcatgtgcctttagtcagctgtttaagaggctgaggtgggaagatctcttgagcccaggagttcaaggttgcagtaagctatgattgtgccactgcactccagcctgggtgacacagagagacctcatcttgaaaaaataataaaaaataaaattagtcatgtagacaggaagaagtaccaaagaaaaccatgtgctggatggtcaggcaaggcccagtgggggagatgggacttcaaatagtacctgaaaggtgagggagaaaaagaatcaccccggacttggacgaacaaacaagatgtggaagagaatcattgggttggcctgtctggctgggatttgggtaggaaatagtagatgaaaacttgttggaaagacaagttgaaggagactggaactctttgaattcctggctagagaggtgaaattttcttcttgggaagtagggttttataggagtttctgaacaggagagtgacacaataaagtctattctacgaaaaattaagctgatattagcatcgaatgtatatggataagaaaggtaggcataagacaaagctagaagctgcctaattaacttatctatattccaacactgcaaactctgaggacaggacctatatctagaatagaaacagtctgagaagagtacagactccagagccagactgcccaagcacaaatcccagttctgtcacttactaactgaaggattgtaagcaaattacttaactccctttgctccagtttcttcatccataaaaaggggattataattgaacctacctcacaggattgcaatgaggatgaaatgagttgaagtacataaaacatttattgtgcctaggacatggcaaacactaagctaactgttagctgtcagcagcactggtaatacagtcacagttgtattcccaacagaaggcccacaatatgagatgcttcacatttatttttcattaactaaagagtctgtgctagagagaagatagtgagtatgggaaaacataaatagatgcagttttgaaggaagaatcaataagatttagtaggtatcaggaaaaagaaggtaaatccaagatggtgatatggtttatatttgtgtccctggccaaatctcaagtcgaattgtaatccccaatgttgcaggaggggcctcctggtgacaggtgactagatcatgggggtagaactcccccttgctgttctcatgatagtgagtgagttctcatgagatctggttgtttaaaagtgtgtatcaccttcccctttgctctctctcatgctctgccatacgaagatgtgcctgcttcctcctcgccttcccccatgattgtaagtttcctgaggcctcaccagccatgcttcttgtacagcctgcagaactaagtcaattaaatatcttttcttcataaattacccagtctcaagtagttctttatagcaatgggagaacacactaatacagatggcaatgatattttatgcctgggtaaattagaattttagtaacgttaatagatcaaataattgaaggaagttggtttagcaagaaaagattttgggaaacaattaaaattaaccaactgaaaaaaggggacattatttcttctccttccaagtaatactaacaatgtatcaatgtatctattttattggttgccaagaccaaaacttcaaaacaaagaatgaaataagctaacaataagcatacacatttaacaatgtctctgcatctcaaccttgttgtttcttttgaagtaacttgctttccctaaacttgagctggtacacatggcatgtcatatactgaaaacctctttatgaacacagaataaagaagcaactctagttatggcagggaccgtctcccatttctaaaactaaaggtatttttaagtatttatttttatgttccagaaataacatctttacacacctctacactgataacagaatgattatttgccaatagagccaaatatccccaatcagtttaaaagggcgtgtgtttcaaatatggttaactacagcaatgatccccaaccttgttggcaccagggactggttttgtagaagacaatttttccagggactggagtggggcaggagtgggggggggtgggtaatggtttcaggatgattcaagtgcattacactagttgtgcattttatttctattattaccacattataatatataatgaaacaattatacaactcaccataatgtagaattagtgggggccctgagcttgttttcctgcaactagaaggtcccatctaggggtggtgggagacagtgacagatcatcaggcattagattctcataaggagccgcacctagatccttcgcatgtgcagttaacaattgggtttgcgttcctatgagaatctaatgccaccactgatctgacaggaggcggagctcaggcagtactgcaagccatggggagcagctaaaaaaacagataaagctttgctcccttgcctaccactcacctcctgctgtgcagcctggttcctaacaggtccgtggcccaggggttagggatccctgacctacagagaagcctccccaatactggttcagcaatacaggccccaaaactagaggaaaactctgatggctgttttgatcatggtaataaagagctcaataatacgaacttgaacaaaaggtctaaatgtagcttttgtataatcctgatagcgcctgggatcagtatttacttagatagagcacactgttatgataaaaggaaaacttaggattctataagtctgaagacaaaaaaatgcagattttggaagtatatttgaataagctgtgtttaatagagagttccagaacacaaatgtgtgtcactcagatatagaaacccctccccacagatctgcatttattcagcatttatagaatctgtacagagaggccctcaggatctcttactatgacaaggttgtcttctaaacagaacttcaacctagcctctgctctccagagtcaatataattttagttttatgaacttgagtgtgggcttttcagaacaaaagtcaagtacagaacacatgaaaagagttttgtcttgtggtaagggaaaaaccaaatgaaataataagataggttacctgtgtggtgaccatgactatcttcaaaatctgcaaacccagtttccacggaatctggcgtctggctcggtatttttcacaagggctcatgaagtaaaacttcaggtcttcccttagacattcttctttcatctcagaatcacgatgtgccattgcatttctgccacagaagattaattttaaatatccaggaaagcctctccctcagttccttttgaagtaacttgctttccctaaacttgagttggtacatatggcatgtcatatactgaaaagcctctttatgaacacaaaataaaaaagcaactctagttatggcagggaggttctcccatttctaaaactacatgaaaaattattccagaccttctacctcctacctttccacacagccacccatcttgttcaaaatggccaatctcggccagacgtggtggctcacacctgtaatcccagcactttgggagaccgaggcgggtggatcatttgaggtcatgagttcgagaccagactgaccaacatggtgaaaccccatctctactaaaatacaaaaattagctgggtatggtggcgggcacctgtaatctcagtttctcgggaggctgaggcaggagaattgcttgaacccaggagatggaggttgcagtgagccaaggtcacgccactgtactccagcctgggtgacagagcgagactccctctcaaaaaaattaaaatttaaaaacaaaataaaaaaaacaaaatggtcaatctcaagaattataaaaattggattttacttacaagactcatcaattcctacatcttaacatagagcattcatctgtcactacagaaagtatgtatgtttatgtttgtgtgagtgtgtgtgtatgaattgtaagtgagtgagtatatgaacaaaaaccagacaggacattttcatgatactccaggtatgacattacagaaaattagtataaacaaacggaattagattgttatggaagaagagaatctttgttctgtaactctgtactgagagaaggactatgactccttttttggataaaatatcagtgattatatgattccagaatataaatagcttcaaaaagataaatagcatctctctatttaagcctactcagatatttgtcactttatattaataaaattttgcttttactatttcaaggactctggactcaggaatgggcacatgactcaaggtaggccaaaaagaaccaatgagacatggttcacaggactgttattgtagtccccaaagtggagtgccgaaaacaatccattgggagtataaaaaatattagtatttctattttattatttatattaaaaactaaaaattgaactccataattagtacaacatagaatatacatacaacacagcaatataacttacagcatatgtacaccataacaaagaatatacattatataacacataaaagtagtatccagtagcatatcatatataaagaaatatatacacattgggactattatgctcaacttttactgttgggtacataatcaacaaagtttggagatcagtgacttcaagcatagactgtgagtccggagttcctaaaatccatctcaccaccaaaggagagcttgtcagagactgaaggtcaggtagacaggcactatgcctaatgacaatatttgaattcctggatccagctattcctgaagtaatccatcccaagtctttccatttgagtcaacaaatacccttcatggcttaagccagtttgagtttgacttcttgccttaggaagtatcttgatggtaagggtaaagaataaattctagtaagttaggctaatcattcaagttactcatttcttggaaaggttttatacttgtgggtcattttttaaggttctgtttactggaaatatgtaagtgacatatttttatactgactgatgatctatgttatctgccttgactgacgaatctaaaagaatcctaaaaggggatgcccattttaaagcttattgtcagttgttaataatttactatttctaaatagatttttaaatctcctgtttctagtattagtgggctaagttattcagaactatcatgctggaaaggaaggaaaagaggaaagaaagagagaaagcaaggaaagagggagagaagaagagaagggaaggaaggagggaaggagagagggagggagggagggaaggagaaaaaggagagagggagggagggaaggagaaaaaggagagagggagggaggagagagaaagtagtggagggagggaaggaagaagggagagagggagggaaggaaggaagaagggagagaaggagagagggagggagggaaggaaggaaaagaaaaatcctagatacaatacattcttcttgaggagggtgaagaagtacctttaaaagattgaagagttaaggagagcaagaactcctgggtcaatcttgggggatacctacacgagtaacagccagttgccaccattcaagtacactcagcttccgttctgtggcctcaggaaacgggaacaagagagccaagattctaggcccaaaggcatcaaaactgcctgtcctcaaatttataggactacagagaaggccagagtggttccaaatcaaagaaaagaaaaaggaaatttaaaaatagacccatcctgataaagaatgcccataaaccaggccatgattaaataaggctcataaacctttgagccttacacctgggtgagccagggaacttcaaactgtgggcctgcttggttctggaggacccagactggaactgttcttcatatccccggaaacacccacagaactctgtgtcttaggttcatcctaagacttggcactctaataaataacttataaaacacaatgacaaacaggtagttaaatataactaagcacatgaggaaaccaagtgacataaaacagactaaaaacagaaacaggactaagcatattggaaattagacacattagaaaataaccatgcttaccatctgtgatattatgacatacatacatgttggtttttgtccgcagctcctagctcataactcccatagcttttgttatactgttgaggcgccttaaggcctcatgagcaggcctcagaaaacataatctctctgaccttctcctgatctcctttaacctgctccttcttgtcccaaagacaggcatcttccccaccttgctgtgtaggagccagccataaaaaaattctctgacctaccctgtctgattgtaggtcacaagactcccatttcagaaggggtcctgccccaaaccctggaagaaggaaggctgcacagagaggccagaaggatctgaacagacaggccttgctgggtttccctcatgcagtctattagtgtttgttcataccctttttgtccagtcacatttctacatggttgtcaatcatacctatccaataaagtctccataaaaggcccaagaggacagggttgggagagcttccggaacacatggcagttcctggagggtgttgtacccggggagggcacggaagctctacactccttccccatagcttacctcatgtattcttcactgtatcccttgtaacaacctttacaataaaccagtaaatgtgtttccctgagttctgtgagcctccctagcaaatcattcaaacccaaagagggagtcatgggaaccctaacttgaagttggacagtcagaagttccagaggtggctgggcacggtggctcacgcctataatcccagcactttgggaggcagaggcgggtggatcacctgaggtcaggagtttgagaccagcctgaccaacacagtgaaaccccatttctattaaaaatacaaaaattagccaggtgtggtggcacatgcctgtaatcccagctacttcggaggctgaggcaagagaattgtttgaacctgggaggcagaggttgcagtaagccaatatggcaccactgcactccagtctggatgacagagtaagactctgcctcaaaaaaaaaaaaaaaaaagaaatgaaaaagcaatcaccacaatgagtctcattcaaaagaatgtgaaggccttaaacatgtgtttgtcctgagcctgacacactcacctcttgactcaacttgaccaacttaatgagcacttagtccgcggagcaagcactgtgctgggtacacaaggctgaataaccctgaactgcacatgcttagtgtccagtagaagagaaagacttgtcaatgcataattattaaagagttccgtgaatgctgtaaaataagtaaatattacggaagcagagttctgactctggagagaggggtgagagagctggtgggaaagcccataagagtcataatagacgatgtggtaagtgctacgggggcatgtgactgggcgcattgagggaggcatttccaagaaaaaggtgcatcttaactgtgcctgagagcaacatcctcaaacatgaactttcagatctcctgagaacatgcctgtaagaagcccctgtgggcatgtttcagcaatactgaatttagtgttaattgctatcactgtagtggatcagtgttgctaaagcatccctcctgatgactcaaaatatgctttttcatttaataaaaagagtatatgaaatggtgtacactgaattctcaggcccttgagaataaagccatagaaactaccccccaactccccccaccccccaacacacacacacacagcctctgggtgagaaacactgaactgaaggacgaagaagttgttttctcgaaacagtggtgcaaaacaaggcatttaatcaaatacttaaagaatactggccaggcatggtggctcatgcctgtaatcccagtactttgggagggtgaggtgggtggatcacttgaggccaggagtttgagatcagcctggacaacacggtgaaaccccatctctactaaaaatacaaaaaaaaaaaaaaaataacaggcatgtgtggtggcacacgcctgcaatcccaactactcaggcagctgagacacgagaatagcttgatctcaggaggcagaggttgcagtgagccaagattgcaccactgcacttcagcctgggcaacagagcaagactcagtctcataaataaataaatataaataaaagaataccttgtgagccatgctctgctggagacattttcctgccttccaggagcaaatgtgaatagataaaagaatgatacaatgagttaagagttatactggaaatattcactgagtgccctggaaacagagagtgcttgatgcagcccaattgcttcaagaggcttcaaataattcttctgactgctgggttcctttgactgagtggccattaagtgttcaagaaatgataactgatgttagcattgccctaagaaactttattaagaagtctcaggcaaaaagaaaagaaaaaggtcaaagtagcagataatgactgtgagatcactcattgtgttacactatttatactatctatccttccataattgtttcatttgggtatttacagagcagttgtaatacttttagcaatatgaaagatgaaaaatgaaaaaactagcaggaaaaacatttccctcaagagtacatgagccaactagtgaaatacaagctagtactagtcaactgatgaaaaaatgatagacatgtagggggaaagagttgataatgaataataaaggtgcatgatgagatagctgttttttaataaacctaagttttaaaataatatgtacatttgggaggaaaagataatgaaatttaaaaatttaaaaatttaaaaattctgatatttcaaggaaaatataaatgtataaactttctaaactttacttttctgagggctctttattgcctccctcttccccatttgtaggtttgtcctggtagatgaagggtattaaacagacatacacacacacacacacacacacacacacacacacacacacacacacgatatcttattgctataacaaaaataaaatggtataaaaatggtgcaaagtaaagagggaaaaaaattttaaaacagagaaagagagagacaacacaatatcatagaaataaaacactcttttatttaacacatatttaccctatataccttgcaatgctgaacacctggctgggggttttacaggagtcttaaattacaaccaggcttcataaccaagaattaggtcagcagaggctgggcatggtggctcatgcccgtaatcccagcactttcggaggccagggcaggcagatcacttgaggacaggagttcaagaccagcctggccaacacggcgaaaccctgtctttaccaaaaatacaaaattagctgggcatggtagcacaaacctgtaaccccagctactcgggaggctgaggcacaagaatcacttggaacccaggaggcagaggttgcagtgagctgagaatgtgccactggactccaacctgggggacaaaaacaaacaacaacaaaaacaaacaaacaaaaaaattaagtcagcagacggcagaaatactgcaacttccatcacaaatgaaaatcaccaacagtttaagaaaagcatacagctgctaacttgtggtaacataagtcaggagaatgaaagtaactgtaccgtaaaaccacttaaggaacagaaatcaatgaagatctaaattacacagacccatcagctacagggctgtcatgcaattgaaattgcatgaaataaataagagcaatcacagcttttatgaattatttatgtttcattaacccataggaaatgcatgatctggatttttataagcttaataatggcagcactaaagaacaaaatatcaaagaaaaaaagcatagtatttgaaggcataaaaataagatctgaaatagaatagaaagccacccatacagtgggttaaataaaagccagagatgctggaatagaaaatgaaagaaaagaaggctgagactggtactgtggtaagaaaccaggaggaaggcacaacaaagctactgtcaggtattaagaaaacctactgtctccacagataatcaggactatgaggttggcattaagaaaacctactctctccacaaataatcaggactgtgtgacattggctaagtttaaggctatcatatgatcaagggcaatttcagctttatcaaaacaatgactaagagtctaacggaagcctgaagttttgaaacaaaacaagatgtcagtgattcttaaccttattggggttataaacccctatgagaacagaaaaaggctcttgacctttgccccaggaaaatgaatacaccagtttcagtgatggtattttgtcagcaaataagctaaccagcccaggatgctattgcctttggcttatgtgatccccctacttgacaaggggcctgaaagttgtttttatcccctgctgcagttgtctccaaagtggggtccttgtgcacaaggacgtatgcaagaccattcactggtatgtgagaagaaactattagggcttctaattgtgttaatttagaaaatagagaagtaaagaattcccaagatttaatatatgaattgttacctatcacacctaaggtgccctcactcggtcagtaacatctgatgggactgacacagtggctcatgtctgtaatctcaacactttgggagactgaggcaggaggatcacttgaggccaagagttcaagaccagcctggacaatatagtgagactctgtctccacaaaaactttttaaaatcagcccagtgtggtggtggatgcctatagtcccagctactcgggaggcagaggtagtagattcgcttaagcataggagttcaaggctgcagtgagctatgattttgccactgcactccagcctggacaacagaaggagatcctgtctcaagtaaataaaacaaaacaaaacatcaggtgcctgtgtttcacttaggtatgtgagacatcctggggaaattgtcaagtttcccaaattagggggttcatggtggtacccccattgattttcagcatattcccaccagttatgttttatgtgggcccacttaagcatttttagaatgtatcatctagtttccgtggaaataacccttgcgaaataggcaaaggacataaagattcttgcaaaagcccagaaggtggagcaagatggcagaagagaagcctccactgatcatcctctcacaagaggacatcaatttaacaactatctatgtaagcaaagcactttcataagaaccaaaaatcaggtgagcacttgcactacctgcttttaactttgtattgctaaaagaggcactgaagaggtagaaaaaacagtcctgaagcactgataccacccttcccccagccccagcagtggccacctggtgcgcagagtgcctctgcatgctgtgggagggagagcacagcaattgtgaggcagtaaacggttctgcccggttagagcagaaaggaaaactggaccaaattcagctgatgcccacccacggagggaacatttaaaccagccctagccagaggggaatcacaggtccttgtggttggaacttgagttcccacaaacttcaccactgcaggctaaagtgctctgggtgtctaagtgaatttgaaaggcaatttaggccacaaggactgcaactctaggcgagtcctagtgctgaactgggcccagaaacagtggactagaggggcatgcaatctaccaaactaccagggtggctaaaggagtggtgacatcacctctcccctaaccccaggctgcacaactagtggctccaaaaaagatcccttccttctgcttgaggagaggagaaagaagagtggggaggactttgtcttgcatcttggataccggctcagccacagcatgatagggtcagagtcataatgcctctgttccaggccctagctcctgggcaacacttctaggcacaccctgggccagaagggaacctactgccttgaagggaagaacccattcctggcagcattcatcacctgctaactgaagagcccttgggcactgaataatcagcagcgatacccaggtactacatctagggccttgggtgagcctctgagacttgctggcttcaggttcatctcggctattggggggtggagcaacaagtgggctcctggagtccccagttctaagagctgactcttggatggcatttctggaccttccgtgggccagaagggagcccactgccctgaaggatgagtctcaggccagacaaccttcatgacaagctgacttaagagaccttgggccttaagagaacatagtggtagtctggcagtactgcccatgggcttctggtggtgatgaccatggggaaggtctcctctgcttttggaggaggggagggaagagtgggaagaactgcatcttgtaatttgagtgccagctcaggcacgatacaatagaacactaggtagacttctaaggttttttattgtagtccctgactcctggacagcacctctggacccaggagggtcctgggggagctcagcatcctggagggaagaacacaggcctggttggctttgccgcctgctaactatagagccccagagccataagcagacacaggaagtagccagggagtagttacagccggccttgggcaacacccagtgctgtgctgacttcaggtctgacccagtgtagtcacagaggtagtagccacaggggtgcttgtgtcactccatccctagctttagatggctcaggactgagagagagactccatttgttagggagacaaaaagggtagagaacaagagtctctgcctggtaatccaaagaattcttctagatcttgttcaaggtggtaactccatgagtctataagaaccacagcattactaggcttggggtgccctccaaagcagatagaacttagatcacaatgcccaagtcctttcaaatatctggaaagccttctgaagaaggacagataataaaagcccagacagtgaagactacaataaattcctaacttttcaatgcccagacacagatgaacatctacaagtatcaagataatccaggaaaacatggcctcatcaaatgaattaataaggcactagggacccaatcttggagaaacagagacaggtgacctttcagacagataattcaaaatagctcttttaaggaaactcaaagaaattcaagataagacagaaaattcaaaattctatcagataaatttaacagagattgacataattaaaaagaatctaaaagaaattctggagctgaaaaatgcaattggcataaggaagaatgtatcagagtctcttaatggcagaaatgatcaagcagaagaaagaattagtgagctccaagacaggctatttaaaaatacacagtcagagaagacaaaagaataaagaataaaaaacaatgaagcatgcctacaggatccaggaaatagcctcaaaatggcaaatttaagagtaatttgccttaagaaggaggaagaaaaagagacaggagtagaaagttattcaaagggaaataacaaagaacttcccaagcttagagaaagatatcaatatccaaatacaagaaggttatataggacaccaagcagatttaatccaaagaagactacctcaaggcatttaataatcagactcctaaagatcaaggttaaagaatggatcctaaaagcagcaagataaaaaaacaaataacatacaatgaagcatcaatacatctggcagtagacttttcagtggaaaccttaaaggccaagagtgaggggcatgacatattgaaagtgctgaaggagaaaaacttttattctagaatagtatgtctggtgaaaacattcttcaaacatgaaaaagaaataaagattttcccagacaaggtcgggtgcagtggctcacacctgtaatcccagcattttgggaggccgaggtgggtggatcacgatgtcaggagttcgagaccagtctgaccaacatgatgaaaccccgtctctactaaaaatataaaaattagccaggcatggtggcgcaggcctgtaatcccagctactggggaggctgaggcaggagaattgcttgaactcaggaggtggaggttgcagtgagcagagatcatgccactgcactccagcctgggtgacagaccaagactccatctcaaaaaaaagattttcccagacaaacaaaagctgagggatttcatcaacaccagacctgtcctacaaaaaatgctgaagagagtacttcaatcagaaagaaaaggacattaatgagcaataagtaatcacctgaaggtacaaaactcactggtatcagaaagtacacagaaaaacaaaaaatattataaccctgtaacttccttgtgtaaactactcttatcctaagtagaaaaattaaatggcaaaccaataaaaaataataactacaacaacttttcaagacatagacagtacaataagatataaacaacaaaaagtttaatagttggggagacgatgttaaggcatagagtttttattagttattttttttgcttgtttgtttatgcaaatagggttaggttgttatcagctcaaaataatggtttataagatagtatttacaagcctcatggtaacctcaaaccaaaaaatatacaacagatacacaaaaagtagagcaagaaactaaatcatatcaccagagaaaatcaccttcattaaaggaagacaagaaagaaggagagaaagaagaccacaaaacaatcagaaaataaataaagtggcaagagtaggtccttaattatcaataataacattgatgtaaatggactaaactctccaatcaaaagacatagactggctaaatggatgaaaaaaaaacccactgatctgttgcctacaaaaaatacacttcacctataaagacacacatagactgaaaataaagggatggagaaagaaattccatgccaatggaaaccaaaaaagagcaggagtagctatgcttttgtcagacaaaacagattttaagacaacaactataagaagagacaaaaaagttcactatataatgataaaggggtcaattcagcaagaggatataagaattttaaatatatatgtacccaacattggagcacccagatatagaaagcaaatattattagagctaataagagagataggccccaataaaataacagctggagacttaaacaccccactttcagcattagatagatcttccatacagaaaatcaacaaagaaatactggacttaatctgcactatagactgcatggatctaatacatatttacaggacacttcatccaatggctacagaatacacattcttttcctcagcacatggatcattctcaaggacagaccatatattaagtcacaagacaagtcttaaaacattaacaaaattgaaataatatcaagtatcttttctaaccacaacagaataaaactacaaataacaaaaggaattttggaaactatacaaatgtatggaaattaaataaaatgctcctgaatgaccagtgggtcaagaaagaaattaagaaagaaatttaaaaatttcttgaaacaaatgataatggaaacacaacctaccaaaatctaagagatacagcaaaagcagtactaaaagagaattttatagctttaactgcctacttcaaaaaaaaaggaaaaacttcaaataaacaatctaatgatacatcttatagaactagaaaagcaagagcaaacgaaacccaaaattagtagaaacataaataaagatcagagcagaaataaatgaaactgaaataaagaaaataatacaaaagatcaatgaaaaagttggtttttcaaaaagctaaaaaaaattgacaaaactttagccagagagaagatccaataaataaaatcagaaatgaaaaaggagacattacaactgatactacagaaattcacatcattattggatactatgagcaactatataccaataaattggaaaatatagaagaaatggacacacacaacctaccaagattgaaccaggatgaaatccaaaacctgaatagaccaataacaagtaatgagatcgaagctgtaacaggaagtctcccagcatagaaaagcccaggacctgatggtttctgtattagtcaggttctctagagggacagaactaatggaatgtatatgtgtataaatatatatatacacacacacacatatacatatatacatatataatacatatattaagtattaactcacatgatcacaaggtcccacaataagccatctgcaggttgaggagcaaggagagccagtccgagttctaaaactgaagaacttggagtctgatgtttgagggctgcaagcatccagcatgggagaaagacatagggtggaagactaggccagtctctcttttcacatttttctgcctgcttattctagcccagctggcagctgattagattgtgtccacccagaataagggtgggtctgcctttcccagcccactgactcaaatgttaatctccttaacaccctcacagacacacccaggatcaatactttgtatccttcaatccaatcaagttgacactcatattaaccatcacagcttcactgttgaattctaccaaatgtttaaagaagaactaataccaatcctactcaaacttttctgaaaaatagaagaggaaacaatgcttccaaactcatcctatgaggccagtattaccctgatatcaaaaccagacaaagacacataaaaaaaattacaggccaatatctctaatgaatattaatgcaaaactcctcaactaaaatactagcaaaccaaattcaacaacacattagaaagatcattcatcatgaccaagtgggatttatccctgggatgcaaggatggttcaacatatgcaaatcaatcaatgtgatgcatcatattaacagaatgaaaaataaaaacaatatgatcatttcaattgatgctgaaaaagcatttgataaaattcaacattgcttcatgataaaaacccttaataaactggatatagaaggaatatacctcaacataataagaaccatatacagcatacccacagctagtatcatactgaatggggaaaaactgaaagcctttcctctcagatctggaacacaacaaagatgcctactgtcaccactgttattcaacatagtactggaagttctagctagagcaatcagataagagaaagatataaagggtatccaaattggaaaggaagaagtcatattatccttgtttgtagatgagatgatcttatatttggaaaaaaactaaagactccactaaaaaacagttagaactgataaacaattttagtaaagttgcaggacacaatatcaacatacaaaaatcagtagcatttctatgtgcaagagtaagcaatctgaaaaagaaaattaaaaagtactcccatttacaatagccacaaataaaatacctagaaattaactcatccaaagaagtgaaagatctctataatgaaaactgtaaaacactgatgaaagaaattgaagaggacaccaaaaatggagaaatttcatgttcataaattggaagaatcaatagtgttaaaacgtccacactccaaaggaatctacagactcaatgcaatccctatcaaaatatccacgacattcttcatagaaatagaaaaaaaccctaaaattgatatggaaccacaaagaacccagaatagtcaaagctatcctcagcaaaaagaacacaactggaggaatcacattatctgacttcaaaatataccacatagctttactaaccaaaacagcatggtattacacagatacaaaacacaaaaacagatacacagaccaatggaatggaatagagaacccagaaacaaatccacacacctacagtgaactcatttttgacaaaggtgacaagaacataaactggggaaaaggcagtctcttaaataaatggtgttggggaaactggatatccatatgcaaaagaatgaaactaaacccctatctatcaccatatacaaaaatcaaatcaaaatggattaaagactttaagacctcaaactatgaaactactacaagaaaacactggggaaaatctccaggacaaaaatttactgagcaataccccacaagcacagatccaaagcaaacatgaacgaatgggaccaaatcaagtttaaaagcttctgcacagcaaaggaaacaatcaacaaagtgaaaagacaacccatagaaagggagaagatatttgcaaactggagattaacagccagaacatataaggagttcaaacaattctataaaaaataacctaataatctggttatggcaaaatgggcaaaagacttgaatagactcgttatgtctcaaaagaagacatacaaatcacaaacagggatatgaaaaggtgctcaacatcactgatcactagagaaacgcaaatcaaaactacaatgagatatcatctcaccccagttaaaatggcttttatccaaaagacaggcaataacaaacactggtgaggatgttgagaaaagggaaccctcatacactgttggtgggactgtaaattagtacaaccactatggagaacagtttggaggttcctcaaaaaactaaaaatagagctaccatatgatctagcaatcccactgctgggtatatgccaaaaataaaggaaatcagtaatatcgaagagatatctgcactctcatgtttgttgcagaccagatcacaatagctaagatttggaagcaatctgtatgtccatcagcagaagaatggataaagaaaatgtggtacatacacacaatggagtactattcagccataaaaaatgagatcctgtcatttgcaacaacatggatggaactggcgatcattatgttaagtaaaataagccaggcacagaaaggcaaataccgtatgttctcacttatttgtgtgatctaaaaatcaaaacaattaaattcatggacagagagagtagaaggatggttaccagcggctgggaagaatagtgtggcagagaggtgggggataaaggggcagtagggatgggttaatgggtacaaagagaaagaatgaataagacctagtatttgatagcactccaaggtgactacagtgaataataattgtacatttaaaaataattaaagagtataattggactgtctgtaacacaaaggataaatgcttgagggaatgaataccccattttccatgatgtgattataatgcattacatgcctgtatcaaaacatctgatgtatcccataaatattacatctacaatgtacccacaaaaattaaaaataaaagataaaaaattattgcaaaaaattacgtttattgtaaaactaatgtaagcctaaattaatatcaaaaaataggagagctaacactctaaatgttgttagccatgggtttttttttttttaaaaaaaagatgaaaagtgtatctgatttgaaaagaagctggggtggggggaagcagatttatcaagaaaacaatttaaaatattggttaaatctactactgctaaatgaggtgcatggctctaaatatatagtaccataagatatttgctaatgacactatgaagtcataacataaagttgctgcatttggcaattcatttttttattttaattttttaaaataaaaaaatagagatggggtctcactatgttggccaggttggtcttgaactcctggcctcaagcaagcctccggccttggcctcccaaaatgctaggattacaggcaatgagccaccatgtccagcctggcaattcatttttaatatcctcatctatcccatgccttaaaatgttcattttatctgtttcataatatacatatggttcagcatatgatatgtaaatgaatacgtatttagagagggtaaatgttctttcaactgttgggaacaagttataaaaaatatttggaactacttccttattgtttcagagctccaaccaccccttagctgtggttgttctttgttgtcctaactgctattataaacttgttagctttaaagaaatttatgtttgttcccctgaccccaacaaacaaacagaaaatacagaaaatggagtacagtggtgcgatcttgactcactgcaacctccaccttgcaggttcaagcaattatcctgcctcagcctccagagtagctgggactacaggcacctgctaccatgcccggctaattttttattattattattttttatttttagtagtgacagggtttcactgcgttggccaggctggtctcgaactcctgacttcaggtgatccacccaccctggcctcccaaagtgttgggattacaggggtgagccactgagtccggaagaattttttttttttaattcacaagtatatcttaccagtctcaggggatggggcagggtaggcagggcaaatcacttcccaaatctatccttcatttttatcctcatcacagtgagtggtaagccagcctcccaggtctccacaccagcaacccaaatctgtgtggctctgcacaatctggtctcacctaactccccaccacctttatttcccccaaatttaataatgtacacaactgtatttttgtttttcttttctttttctttttttgagataggatctcactctgtcacccaggtgggattgcagtgatgcaatcatggctcattgcagccttaacatcctgagctcaagcaatccttctgcctcacttccagagtagctgggaccataggtgtatgctgccatgcccagcttattttttatttttttgtagagatagggtcttgccacgttgcccagactggtctcaaactcctggatgcagatgatccttccccctggcctcccaaagtgctaggattacaggtgtgtgagacactgcgcctggtctgtacataattttaaatgaattattaataaaccccacctccgatttctgttccttaggtgcaactacttttatctgtctttttaaaagtcatttactttaaaatttcttttttttttttttttttgagacagagtcttgccctgtcacccaggctggagtgcaatggtgcgatctcggctcactgcaacctccgcctcccgggttcaagcagttctcctgcctcagcctcccgagtagctgggattacaggcgcacgcctccacgctcagctaatttttgtatttttagtagagacagggtttcaccatgttggccaagctggtctcgatctcctgaccttatgtccacccacctcggcctcccaaagtgctgggattacaggcgtgagccactgcgcccagccctactttaaaatttctaaataatacttatgccactattttttcattttaggtattatcaatttgaatcctcccttggaaaatatggatttagctcttatatctgctccccaacatacatttcacctccctactcatcttcccaaccaagttttaatgcaaattttggataaattaacattagattttatgaagtgaatatgtaaaaattcttcagagttgagctattaacatactgtaatgttatattcttcatcattccaactattttcctggaattaactgcccttttccccatttgtttagttttctgcataccaactataactttatcaccaaactctggctgaatctgacagcacccttaaatacacacaagccaggtaccctgtcaattcctttcttccacagagagacatcaatgcttttgcacaatccttttgctcaaatctacctggttgctttctaatcacttttcaaggccataactttgggaactccttcaccaccttcctaaattggaatccccatctcttggatcccatgtctgcttctttctttactctctcattttgtggagaatattcttcaatcccttcctgggaaaggaagcctgaaaagtaaattgttaagacttcctgtgacagacactactagttgcctgcgcagtatccattcctctcttcctgttttgttgaaagcaagcaatatattaataccaaaggataaaataactcaatatggccaaatgtggtggttcttgcctgtaatcctagcactttgggaggccaaggcggtggatcacttgagctcaggagtttgagaacagcctgggcaacatggcaaaacccgtctgtactaaaaatacaaaaagtttgctgggcatgctggctcgtgcctgtagtcccagctacttgggaggctgaggtgggaggattgctcaagtccagggaggtcgaggctgcagtgagctgtgatcacaccagtgtactccagtctgcaacagagcaagaccctgtctcaaagaaaaattgaaataaaattaaaaatgtgtgacattttggcaaacagccatcctagtccatacattcaagaaacttctacatggtcatattatcaaaatgaggaaaaaaaaaaaagtaaagccatctgatggaacgaacccagcatttacctcctcaagctgactttgtggtacagattctctagaacaaacactgggttcccatttctattactccattaaaatgctcagggtaaaccatttcttgctatagattctaataaacacttttcaggcttattggctcagcagcatttgatacagctgaccactacctccttgggacaacctcttctgtcagtttccaggacacccccctcctcttgatgtcagagtgccttggggcacagtatgggttcttctagtctccatcttctgttctaaaacagcttgtccaatcctatgactttaaatactctctacatgatgtgggtttccatatttgcatctccagcaaatctctctcttgagcagacttccttatccaaccctttttatgaaactccacccacaggtctaattggtctctcaaacctgccctccacctgctcctccacccatctgctcaaagcagtgatctgtacacacttattcaaatgcttcagctgctgaccaagctgagaatcaaataaagaactcaacccctttcacaacagctgcaaaaaaaaccaaaatttaaaattaggaatacacttaaccaaggaggtgaaagacctctacaaggaaacctaccaaacactgctaaaagaaatcatagatgacacaaacaaatggaaacacatcccacgctcatggatgggtagaatcaatattgtgaaaatgaccatactgccaaaagcaatctacaagtccaatgcaattcccatcaaaataccaccaccattcttcacagaactaggaaaaaaaatcctaaaattcatatggaaccaaaaaagagcctgcatagctgaagcaagactaagcaaaaagaacaaatctggaggcatcacattacctgacttcaaactatactctaaggccacagtcaccaaaacagcatggtactgatataaaaacaggcatacaaaccaatggaacagaatagagaacccagaaataaagccaaatacttacagccaactaatcttcgacaaagcaaacaaaaccataaagtggggaaaggataccctattcaacaaatggtgctggaataattggcaggccacatgtagaagaataaaactgggccgggcgtggtagttcacgcctataatcccatcattttgggagaccgaggtgggcagatcacctgaggttgggagttcaagaccagcctgaccaacatggagaaaccctgtctttactaaaaatacaaaattagccaggcatggtggtggcgcatgcctataatcccagctactagggaggctgaggcaggagaatcacttgaacccaggaggcggaggttgcaaagagccaagatagtgccattgcgctccagcctgggtaacaagatcaaaactccatctcaaaaaaaaaaaaaaaaaagcttctgcacagcaaaagaaacaatcagcagaatagacaacccaatgagtgagagaaaatctcacaatctatacatctgacaaaggactaatatccagaatctacaaggaactcaaatcagcaagaaaaaaaaataatcccatcaaaacgtgggctaaagacatgaatagacaattctcaaaagaagatatacaaatagccaacagacatacgaaaaaatgctcaacatcactaatgatgagggaaatgcaaatcaaaaccacaatgtgataccacctcactcctgcaagaataaccataatcaaaaaatcaaaaaatagatgttggcggggatggggtgaaaaggcaacacttttaaactgctgatgggaatgtaaactcatacaaccactgaaaacaatgtggagattccttaaaggactaaaagtagaactactatttgatccagcaagcccactactgggtatctacccagaagaaaagaagtcgttatatgaaaaagatacttgtacacgcatgtttatagcagcacaatttgtaactgcaaaaatataaaaccagcccagatgctcatcaatcaatgaatggataaagaaaaggtgatatatataggcatatctatctatctatctatctatctatctatctatatatatggcatatatatacagctatatagatatgtatatagatatacatatagatgtatatatatatctatatacatatgccatgtagatacatatacatctatatgtatatagatatatagatatatgtatatagatatatgtagatatatatccatatatttatatagatatatacatatgtatatagatatatttatatatgtatatacctatatacgtatatagatatatacatatatacatatatgtatatatagatatatatacatatatacatatgtatacatagatgtatacatatgtatatatgtatacatctatgtatacatagatgtatacatctatgtatacatagatgtatacatagatatatacatatgtatatagatgtatatcaatctatatatacatatgtatatatgtatatagaaatatatacatacatatgtatatatgtatatagatatatagatgtatagatgtatatagattatatatacaccattgaatgctactcagctataaaaaggaacaaaataatggcatttgcagcaacctggatggatctggagaccattattctaagtgaagtaactcaggaatggaaaaacaaacatcatatattctcacttataggtgtgagctaagctgtgaggatgcaaaggcataagaatgatacaatggactttggcgactcgggaaagggttggaatggcgtaaaagataaaagaatacagactgggtacagtgtacactgcttgggtgatgggtgcacaaaaatttcagaaatcaccactaaagaacttattcatgtaaccaaatgccacctgttccctaaaaactactgaaataatttttttaaaagaaatgcattgctattagtatttttaaaaaatgcttcagttggaatccttagtgcaatcagtggcccagctgcaatccttagtccattctccatcttgggtgcacagcagaatcatctgaggatttttttttaattttaatttttgcttttttaaatggagacaggttttgctatgttgcacaggctggtcttgaactcttggactcaagcaatcctcccacctcggcctcccaaagtgctgtgattacaggtgtgagccactgtgtccagcccacctgaggatttttaaaatatttcagcgcttgcctctcagccccaagacattctgatttaattagtaggatgactgaactgggcatcaagatttttataagttactcaggtgattctaatgtgtagcaaagtatactttgctctaaagtatactgctctaaagtatactttgagttccctttgtattcaattctcacattcaatttatcaagttttccttcaaaaccacaaggagtggtccccatcactgtctatgcactgcagcctccctggtccaagcactgtcatctcttacccaactgcaatagcctcccaattcttcacatagtggccagaggggtaattttaaaagcataagtcagatatcacttctttgttgaaaaccctttaggggctttccccttctctcagagtaaaatccaaacctcctacaactgctaaaagactcctgcccactcctcccataccctcttccccttcctcactacacaatgacttccttcctgggtgtggacagtccccgctctgcacatttcactcaccatttcatccaccctactgctgttcccccagctctttgtgtgtctggtttcttcctgtcacccttcatctctcagcacaaatgacacctcggtagagagggctctctggccactctattaatgtggccttccccactgcctctatcatcactttatttccttcataattgcaatcacaatctttattggtctcccctacaatggacttcatgaagggtgggtcttgtttataaccatatagcccagcatacagcatagtatctaacacataataggtgttcaatgaaaatctgttggaaaaaacaaatgaatcaataatgagacatcaatcttgactacacgaacttttccttggttaatatcttttgtgatcaaataataataacaacaatattaataacatgataaaaataatagaaagtctaaaatattagtattaaaaagtgaattaaaaatatatttaaaagtaagtcttacttagtcaagatacattagcaagttgtaggtaatttagttgcctggtttgctgatgatagaaaccctactttgttttactcattattcctagtctttccaaagaataaattattcaatgagttgttattaaaataatttgctatccatttgggaaagagaaagagtattctctcaaactgagtgcaaaaataaaatttagacatatttttaaaacaaaattgatagtagtataatatataggatttttaaaataatttaacatgcctttttaagtacaaaaaaatttagaagatgtaaaaatgactgaaagatcttaacataaaaatttaagacttcaaaaagttaaaagacaaagagatttggagaaaaatgtgcaatatatttacacaggcaaaagttaactatctattgtgatctgtaaagagctccagactattaagaaaaagacaatccaatgtaataggcaatgaatctgaacaagccagtgaacattgaacaataaaaatttactaacaatcaggttggtaaaaacctatcttaatttttatttatgaggaatgattttcaaactattaaaagaaatgtaaatttggattggcacttgggcagtatctataaaagtgacttaagaatcaaacttctgggccgggcgtggtggctcacacctgtaatcccagcactttgggaggccaaggcaggcggatcacgaggtcaggagtttgaggcaagtctggccaacatagtgaaaccccatctctactaaaaacacaaaaaaaattagccgggcatggtggtgtgctcctgtaatcccagctgcttgggaggctgaggcaggagaatcgcttgaacctgggaggcggaggttgcagtgagctgagatcgcgccactgcactccagcctgggcaacagaatgagactccatctcaaaaaaaaaaaaaaaaaaaaaaaaaaaaaatacctaatgctaaatgacgagttaatgggtgcagcacaccagcatggcacatgtatacatatgtaactaacttgcacattgtgcacatgtaccctaaaacttaaagtataataataattaaaaaaaagaatcaaacttctatggatttataatacaaattttaaaataatgagttagttatagaaatgttaattgcggccctattcgtacctttgcactgacttgaagatgtctataacatattgtaatttttttaaagttacagaatagatatagtgagatctcatttttcaaaaaatgtcagcataagctgggcatggtggcttaggcctgtaatcccagagctttgggaagctgaggcaggaggatcccttgggcccaggagtttgagaccagtctgagcaacatagggagacccccatctctagaaataataataataattaataataataagctagccaggagtggtggcaggcacctgtagtcccaattacttgggggggctgaggcaggaggatcgcttgagccttgaagtttgaggctgcagtaagctgtcattgtgccactgcactccagcctgggtgacagaacacgacccaggctggaaaaaaaaaagctagcatttatatgtgtatatagacattttaaagtctagaagcatgtgagccagccaaaaaagcctccatatttttataatctctgtgaagtagtattataggtaatcttaattttcttcattaagttttccatatttttttcatttttggtggttaacgtatgaattcttgagttattattatgagttaaaatgggccatttcaaaaagaaagagtctggtatgtatcagctagtcaggtatttccctgccttagtttgtgcacgactggtttggggtagagggtggaagaagtgatagatacggagactaaaattcaatgtttctacagtaatgactgtgttggccccaggataataccaggggcagttcaacagataaaatgctttagaccattcctaacaactcgcacgtcattttttcactccaattcctacgatgaacaaattttctcgtgatctgctagtctcacaagagaggaagaaagaaaaatatctagccaactgaggttttgaggtagctgagtagggcaggcagatgtcaattaagtgaagttgaggggaaaaaaggcaaagaagaaaactttggttcccttctcagcacagctctcagaacataaatgacatggtcattctaaccctaagaagccccctgaagaaaggccataggggcttttcattttccattagagccactcatgaaagatgaacatgctaacccttcaggagttttcctacagacaaccgtgccaccaagttcctaaaaatcacctctgatcaccactttgctgcctctgaacaccaggaaagcagaactagggctgcatacttttaaagtgcttcttctaaacaagccacactcctttggaaactagaagaaacagttctctgaggaagagataaagaaagggaaactccatttctcagcaataaaggattccacatgcagttaaaactgaggaagatgactggaattatgacatttcctaacatttttctttctccaatattttcagtaagagcccaacttaatagagtcatgctgatgactctccctaaggaaaagaaattataaagaaataatcattttttcctcaaagcattgaggttaccttaattttggacaagcccaactcagtttcatgttggtgaatccctacattctagctatctctagaaaatccctgtagttggcataagtagtacaattttttaaggccaccatttaaattgtgggtcttctagaattacaccaaagactattttcaagaatcttctgcctcatgagttatcaattattgcctcgcagatgttttaggctgaaattacagagatgtattcaaggggagaaaacaaaacacaaccttcaaaagagaagaaaggaaacagcccacccagctgagggaaaaggaatatggacaacattcgctggacacagtctctcataccaggaaaaaaggggctgaggcccaagctcaaaacagagtagaaagctcagctataggcaggctgagaagaacgggaagaaaaaaaaattcagatgattgccaaagcaaacaaataaacaaaccaaaaacatggctgtaaacatttaatactgaacagaacattgtagtttgataagatgaagtctggaaataaaattacaggcacacctcagagatattgcaagtttggttccagatcaccacaataaagcaaatactgcagtaaagcaagtcacacaaattttttggttttccagtgcatataaaagttatgtttacactataccatagtctattaagtctgcaatagcattatgtctaaaaaaaccaccttaatttaaaagtacttcatactaaaaaatgctaacaatcatctgaaccttcagcaagctgtaatctttttgctggtggagggtcttgcctccttgttgatggctgctgactgatcagggtggtggttgctgaaggctggggtggttagggcaatttcttaaaagaagacaacaatgaagtctgatatatcaattaactcttcctgtcacaaaatatttctctgttgcatgcaacgctgtttgattgcattttacctacagtagaacttctttcaaaattggagtcagtcctctcaaaccttgctgctgttttatcaactatgtttacggaatatgctaaattatgtgttgtcatttcaacaatgttcatagcatcttcaccaagagtagattccatctcaagaaaccactttcgttgctcatccataacaaacaactcctcatccattctagtttgatcatgagattgcagcaattctgtcacatcttcaggcttctcttctagttttctgggtatttccaccacatctgtggttagcagatcgctgcaaaagtaattgtgtttttttgccattaaaagtaaggacaaaacccacaattactttttcactgacctaatacttcctctactgaaatctggaccccttcaaagtcatccatgagggataaaatcaacttcttccaaactcctgttaatgttaatattttgacctattcccatgaatcatgaatattcttaatggcatccatgatgatgaatcctttccagaagggtttactttgtccagattcatcagaggaataattttcgatggcaacctataatgttacaaaatgtagttcttaaataatgtcttttttttttttttttttttttgagacggagtctcgctctgtcgcccaggccggactgcggactgcagtggcgcaatctcggctcactgcaagctccgcctcccgggttcacgccattctcctgcctcagcctcccgagtagctgggactacaggcgcccgccaccacgcccggctaattttttgtatttttagtagagacggggtttcaccttgttagccaggatggtctcgatctcctgacctcatgatccacccgcctcggcctcccaaagtgctgggattacaggtgtgagccaccgcgcccggccaaataataagtcttgaaagttgaaattactccttgatccatgggctgcagaatggatgttgtgttaacatatatgaaaacaacattcatctccttgtacatctccatcagaacttttcaatgatcagaggtattatcaatgagcagtaatattttgaaagaaatctttttttctgagcagtaggtctcaaccatgagcttaaaatattcagtaaatcatgctgtaaacaagtgtactgtcatctaggctttgttgttccatttacaaagcagaggcagagtagattaacataattcttaagtgccctaggatttttggaatggtaaatgagcactggcttcaacttaaaagtcaccagctgtactagttcctaactagagagtcatcctgtcctttgcacctttgaaatcagatgctggcttgtcctctctactaggaaagtcctagatggcatctcctgccaatagaaggctgttttgtctacattgaaaatctgttgtttagagtagcctccttcatcaatgatcttagctacatcttccaactaacttgctgcagcttctatatcagcactttctgcttcgccttgcacttacatgttatagagatggcttcctttcttaaagctcatgaaccaacctctgctagcttgaaacttttcttctgcagcttcattacctctctcagccttcacagaattgaagagagtttgggcctgctctagattatgctttagctttagtgaatgttggtgctggtttgatcttctatccagaccacaaaaactttctccataacagcaataaggctgttttgcttccttatcatttgtattttcactggagtagcacttataatttccttcaagaacatctcatatgcattcaaaacttggctaaatggcacaaaatgcctagcttttggtctgtctcagctttcaacataccttcctcactaagcttaatcactcctacctttaaagtaagagacctgtgattgtcccttgcactcaaacacttagagaccactgtagggttattagttgggctaatttcaatattgtggtgtctcagggaatagagagggttggggagaggaaaagagatagaagaatggctggtcggtggagtagtcagaacacatacaacatttattaattgagttccctgtcttatatgggcacagttcatggcaccccaaaacaattacagtagtcacatcaaagatcagtggtcacagatcaccataacagatataataataatgatgaaaaagtttgaaatattgagagaattgccacaatgtgacatagagacacaaagtgagcacatgctgttggaaaaatggcaccaatagacttgctggacacagggttgccacaaaccttcaatttgtaaaataaaataaaattgaattaaatgcagtatctacaaagtgcaataaagcaaagaacaataaaacaaggtatgcctgcacttttttctatgaaccccttaacatgtgacacaagagctcactaaagagtgatttaattcttcagaactgacacacggaacttagaccctaggccttaaagaaaacagcccagcttcaggaaagtccacttttacttttacagccagaagagttttctttggccactacttttactttgaaagctatagtcacaagaagccatctctttttccgccggttttaaaattgtcttgttctaggtttcacttcactgacagagacatagccaaagagatcagcttgtgaatatgatcattcttgactttcagttctgtatttcgtgcccctttgctcaaactatgtctctcagttcttctcacttgcttcattaaaatattttatatctattactctatttttttaaaaaaaaacacttttgatatgttcctccttcacagaaaagaatgtggctacctcaaacactttattaggattcactcattttttattacaggaggttaaataaaattggtattatgatggcctctgtatggaaaatgtgtcgtttttagagttccggccacagaaactgacctatgaacggttttctaaaggagaagggtgtgcctgtggaaagttcacggcaacgggagtttgactcctcttaaggtatgaagaggaagacaggctaaagtctcaagaaacttctgactcaataggggaaagctatcaaatttcccaaaagttgtgcgattttggttagcacatcacaaaggtgatgagcagctcctgagagtgaaacccacatcccatttctggggagaactacgtagttggttccctctacataaaatatcagagtctacatcctgacacccataagaaacctctcccacctttctcttactaaccttttcttccattctcagtttacaatgacacacaattttgtttcccacaagtaccgttcaaccagagacacacacacttacacatacgtatatatttcatatatatatatatatatatatatatatatatatatatgtttggagagcaggaaacgggggagccaaggtctgtttgtactcacaactttggctcaactgtgctggggtggctggaggtttgaccacggaggaggggcccgctggcagcgccaaccggctgaactgtgcgccttttcataaaggccgaggaactggggttagccacactacaaccctcccacctgagggaaaggcctgtttgttctggaaggcacagcctagccttatttaactaactgcaagcagttaatataagcattcccaaggcagcaagcaagctctagtctacgaaagtaaagccatcgactttaggaagatttctccagtccagcatcctgaaagatgaagcccagactcctcacctgacggttaacctgaaaacacctgatcctctctccggaatccttgcctggggaaaacgataaggctgccgggccatgcctcctccttcaaaactttccagggctctcgggattcggaacaggaaacaccgttcacggccgactcatttcgccctcgccgtaacgcgtccgccgaagttggagccctgcaaagcggggttcccttctcttaccctttctgccggccgcgtggtgcgcgcagaccccggcccgagagcaggcgccgcagtcgtggagtgcggcgggcagttctcgggcggctgaaaggcggctctgtgtgcaccctgcaggatgcggcgcgtggccaggcgctcccgccccgcccccaaggggctgccccgccccgccccgccccgccgcctcctaccggggaccggagcttccccagttggggtcctaggggacttattccacgcttcagcggaccagcctccccgcgctcccggagaagggggtcggcgacgcggaggcggggtgggggccgtaggggatggaaccgaggcgcgcgcgagaagagccgaggaagtaagcagtcccaaaagggggcggcggtggggcccccagggaggcgtggggcacgccaagggcgccgtggggcactgacctgtggtgcggcccccaggacaggcccgaggcgcggttgcacaccggcaggtccagcacctccatgcctcgaggcatggcgcggccagggagcggcaggaggacacctagcgtgggacggctacacctgtctgggcgcaggcccgccgcccttgcactctccacccaagtgcccaacgctgcggtacggcccgctttggctcggggtgtctgccggagaagcgccttacagagggacccgggcggtgggccctgcggcaaagtggcccacgcaccctccacaccgctcccgggcggccgcacctggcactcccggccctctggggttcctgcctttttcgggggggtggtggtgagaccgggtctcactctgtcgcctgacctgcgatcactgctgactgcagtcttgaactcctggacccaagcgattctcctgcctccgcctcccaaagtgctaggattacaggtgtaagccgctgcgcctggccccttcttttcttcactctctcatgcattcatttcttgtttccacatgcattaatttgtccgttgctttggtcattcctgttttgatgcttagggaaacactcactgagagccaagccgaccgttgggtactgtggtctctgggatgacaaagacatggtcctttcccttgaggacttcacattaaactgacaagttcattcattctggcttttctctaaagtgcacgatcatgaaagtctgtgacaagggccatatttctgagatgttagaaagtgcgaccggcgcgcaaggaataggaaaagcgagttgccctgcgcccgcgtcgggatgaaaggcagggagccgggagggagcgtcagcgtggcccggcgggcgcggagggagggcgcacggccccagggctggactcgtaaccccagcgccctgctgcagccgccgttgcttttccctcttggtgcacgaaaggaagacgcctgtgggaaatcgaacagacaatcggtcgccgttcgtgaatcttagagatgagagtcgtcagtacatgaccaaaagccgtgttcggctcctagtgatgttagcttggtagtttggacgtggccgacagcctcctagagctcgtacccctccttttcacgaggtagcagcagcaaagtccgcagtgccaggctctgtgagtctgcaagcgtttaaaagatctccgggtttagctcaggcaaagaatattctgccaggtaattattttaatatgcgtgtccaggcagaagcagttggacagacgatgtatataaaagcacacataattgaccctcttttaaggcacttccaaggggttattaggcagaaatgccttggttttgagcccctttcatcggaggtgcgcaatcatccagctttgtgaatagtaactgcactccagcctgggcaacatagtaagaccccaaccttttggcaccagggactggttccatggaagatgatattttccacggacaggtggggggatgaggggaggatgttttcgggatgaaactgttgcaccttagatcagtaggcattagagtcttataaggagcacacaacctgcaacttagatccatcgcatgcgcagttcacagtagggcttctgcccctatgagaatcgagtggaaccgctgctctcttgctcaatgttcacttcctgcagcgcggcttggttcttaacaggccacagacctgtaccagtctggagcccggggtttggggacccctgcagacggagaaatagtttcaaaagggagatctgaggatctcaaacattaatgtgcatatgagtcaccagagtttttattgaagcagactgattcagtaggacctgaggttttgcatttctagcaagaagatgctcctgctgctgctgctgctgctggtcccactctgtaagtagcaaggttctaagaaatatttaatctgagtgtgtgcgggaattaaggggggagaagagtaagagtggaaaattactggagtcagatggctgaaggatttattataaatataacacatactaaagttttcagccattgaatctaatcattctcaattagtaaatttaattctcagtaggcattaagtttttaactttcaaaaagtcacttgtttgtggtaaagatcatggctcatttttcagtgtgtagtaatagacattgttttgtgctatgttaatcctttcaagcatttgtgttctgttctgaatatcatagcacaaaaagctttgtgtcctgactcaaatttgtaatgaccaataaccaaataacacaagaatcttttgctcaacagtgttttataatatgacattttaattttacaacctaaagttcttaaatttctctagcagtttgtcttcatgtggaagtttcactgatttagtgttaaaagggaaattttagaaagtagtctaaaaaatgtgagataggccggacacagtggcttgcacctgtaatcccagcactttgggaggccaaggagggtggattgctggagcccaggagtgcaagaatagcatgggcaacatagcgataccctgtctctaccaaaaatacaaaaattagctggacatagtggcccacgcctgtggttccagcttgcttgggaggctgaggtggaaggcttgcctgagcctgggaggtcgaggttgcagtgagccaagattgtgccactgcactccagcctgggcaacagagaccgagtctaagaaaaggaaaagaaaaaaagaaaagaaaagaaaatgtgagtcaggctagtagaaatgcaacaatttaaattttctaggttgggcagacaaaaaatatttattgtgaagaatatggggagggagaatagaataaaataagagaaaaacgatgctctttatttactttcacattctttcaaaaattttttgatgtgcaagtagtgttctgtatattgtagatattaattccttgccagttctaaacattataagtattttcttccagtcgtcatctatctttttgtccatggtgttcttccttggatgaaagtctttaattttggtataggaaatcaaaattaaggatattaatccttatagtttgtgcttttatgatctttttaaagaagttgttctctacccttaattcaccattcttctgcattttctgtaatagttttatccttcatatcaaattccattgtacttcaactttgcatgtggtgggagatattaatgcaccttgatttttcgacatcaagtaagccagtttccaacaagctatcttataattcagggttggctaattttttttctgtaaaaggtcagatacaaatatgtaggctttgcggattgtactttctcctttacaaatatttaactatctagtgtaaagataatcatacacaatatgtaaaaaagagagtggctgtgttccatgtattacaaaatatttattcttattttaattttttaaaaatagactctttttagagcagttttaggtttattgcaaaatttaacagaaagtacaaagttcctatatattccctgctcccacatacgcatagcctctcccacactattaacatcctacaccagagtagtacatttgttataatcaatgaatatacattgacaaattatcactcaaagtccatactttagggttcacttgtgtgcaggctctaagttttgacaaatgtataatgacatgtatctaccactatagtatcatacagaatagtttcactgcctgctgtggactgaatgtttgtccccactttaccaatccccctcccccaccaaaatttatatgttgcaacctaaatccccaatgtgatgacatttggagacggggcatttgggaggtaattaggtcttgagggtcgaaccctcgtgaatgcaattagtgccctagtaaccatataagaaaaaacaggagagagatatatctctttctccaccatatgaggatataacaagatgatggctgtctgcaaaccaggaagagcaccctcagcagacaccaggtgtgctagcaccttgatcttggattctgtggcctctagaactatgagaaatcaatttctgttgtttaagccacccggtctgtagtattctgtaatagcagcacaaactgattaaaacactaccctaataatcctctgtgctccttctattcatccctccctccaacccctggcaaccactcatctttttactttcacaatagtttttccttttcagatagttggaatcatatggtattagccttttcagattgacttttttcatttaagcatttggcatttttgcatttaagcttcttctttgtcttcacatggcttgatagctcaattcttttcagcactgaataatgttccattgaattaatacatcacagtatatttgttcattcacctactaaaggacattttgtttttttccaagttttggcaattacagataaagctgttatcaacatctgtgtgcaggtttttatgaacacaagttttcagttcctttttttaaataccaaggagtacaatagctggattgtatggtaaaagcatagctttgtaagaaactgcctatcttccaaagtggctgtattattttacatttgcaccagcaatgaatgagagttcctattgctccacatacttgccagtatttggaattttcagtgttttggccattctaataggtgtgtagtggtatcttgttttaatttgcaattccctaatgacgtatgatgttgagtatgttttcatatacttatttttcatctgtatgtcttctttactgaggtatctcttcaggtcttttgcttaatttttaatgggattgtttattttcctattgttgagttttaagagttctttaggctgggcacagtggctcatgccagtaatctcaacagtttgggaggctgaggtgggaggattgcttgaggccaggagttcaacaccagcctgggcaaaaaagagagatcctgtctctatgaaagaaatttttttttaattagctgggtttggtggtatgcacctgtggtcctagctactcgggaggctgaggcaggaggattgcttgaacctaggagttcaaggctgcagtccagcctgagcaatagaacaaaaacctcatctcaaaaagaaaaatatatgaattttttatatattttgaataacaatacttttttcagataagtctcttgcaagtatttttctcctagtttgcagcttgtcttctctttctcttgatgatatctttcatagagtagaagtttttaattataataaagactaatttatcaattatttatttcatggatcatgctttcagtgttgtatttaaaaagtcagcctccaggaaaaaaaaatggcagataggaggcaggactaacttgcatctcccactcagatgaacagaacagcatgtggagactgacatcatgagcttttgctccaagaactaccacaggaacataccaggaacactgaaaggattcacagactctttgaaaaagtggcttgtggctgcaaactctgtgaggcagctgaaaaattgtgagtgcccaaaatgtgaagggggaaagcctacctccgaacacacatcctcactggggaacctgaaaatccagatcacgggagaaggatttaaccttacctagagctgaaatgaatttagagagctgagaaaaatataaaagtagaagcagcactgggaagagccctctaggtgctcccagtcaccagggaagccatttctgactttatctcactggggtccttggggagggctgccaatggaattggggaaggaccatagggagaaggaaacttccagttgagctttgtaataattttgaccaagtgtgaattttcctaggcagaatccaggagtgggagatggacgggaagtgcagataggaccacagaagcagtggcaagctgggagaggtagggcctgaaagccctgctggctttttcagtggagaggcttgtagcctggggcaattagtgccctagcacccatataagaaaagacaagagaaagcatttgagaaaaccagtgtactaaacaaaactacaaccaaggaccctcacagagtccacttcactcatatgctacctctactggagcaagtgctggtatccatggctgagagacctgaagacagatcacatcacaggactctttgcagacactccccagtaccagcccggagcccaagctccattaggtggctagacccacaacagcaataacaatcactgtctagctctcaggaagccccatccctagaggaagggtgagagtaccacatcaagggatcaccccatggcacaaaataatctgaacagcagcccttgagtcccagatctttcttctgacatagtctacccaaatgagaaggaaccagaaaaacaattctggtaacatgacaaagcaaggttcttcaacactctcaaaagatcacactagctcaccagcaatggatccaaaccaagaagagatctctgaatttccaaagaaagaattcagaaggtcaattgttaagctactcaaggaggcaccagaaaaatgtgaaagccaatttaaagaaatttaaacaatcatacaggatatggacaaaaaatctccagaaaaataacacaaataaaatacaatcaacttctggaaatgaaagacagacttagagaaatgcaagctacctggaaagtttcaaaaatagaatcaaatacatagaagaaagaacttcagagcttgaaaacaaggcttttgaattaacccaatctgacaaagacaaagaaaaaataattaaaaaatgaacaaagcctccaagaagtttgggattatgttaaacaaccaaacctaagaataattggtgtttctgagaaagaagattcgaggcaataattaagggaaactttcctggccttgctagagatctagacatccaaatacaagaagctcaaagaacacccgagaaattcatcacaaaaagatcatcaactaggcacatagtcatcaggttattgaaagtcaggatgaatgaaggaatcttaagagctatgaggcaaaagcatcaagaaacctataaaggaaaacatgttagattaaccccagatttcttagcagaaaccctacaagttagaagggattggggtcctatttttagcctcctctaacaaaacaattatcagccaagaattttgtatccagcaaaactaagcttcataaatgaaggaaacataaagtctttgtcagacaaacaaatgctgagagaattaaccactaccaagtcagcactccaagaactgctaaaagaagttctaaatcttgaagcaaaacctcagaatacaccaaaatagaatctccttaaagcataaatctcaaaagacctataaaacaataacacaatgaaaagaaaaggtatttaggcaacaactagcacgatgaatagaatagtacctcacatttcaataacgttgactgtaaatggcctaaccactccgcttaaaagatacagaatggctgaatggataagaattcaccaaccaagtatctgctgtcttcaagagattcacctaacacataaggactcacataaacttaaggtaaaggggtagaaaaggatatatcatgcaaatggaaaccaaaagtaagcaggactagttattcttatatcagacaaaacagactttaaagcaacaacacttaaaaaagagggatattatataatgataaaaggtctagtccaacgggaaaatgtcacaatcctaaatatgtatgcacctaatgctggagctcccaaatttataaaacaattactactggacctaagaaatgagatagacagcaacacaataatagtgggggacttcaatactccactcacagcactaggcagatcattaagacagaaagccaacaaagaaaaaatggatgtaaactataccctagaacaaatggacttaacagatattacaaaacattctacccaacaattgcagaatatacattttcatcagcatatggaacattctccaagatagaccatatgatagaccacaaaacaagtctcaataaatttaagaaaatcaaaattctatcacgtaccctctcagaccacattggaataaaattggaaatcaactccaaaaggaactcacaaaaccatgcaaatacatggaaattatataatctgtgcctaaatgattgttgagttgaaatcaaggtggaaattaaaatattatttgaactgagcaataatagtgacacaacctatcaaaacctctgggatacagcaaaagcagtgctaagaggaaagttcatagcattaaatgcctaaatcaagaagtctgaaaaaacacagacgatctaaggtctcacctcaaggaagtagagaaacaagaacaaaccaaacccaaacccagcagaggaaaggaaataacaaagatcagagcagaactagatgaaattgaaacaaaaaaaaaatacaaaaggtaaatgaaacaaaaagctgattctttcaaaagataaaattgatagaccattagtgagattaaccaagaaaagaagagagaagattcaaataagctcaattagaaatgaaatggaagatattacaactgataccacagaagtacaaaagaacattcaaggcacaaactagaaaacctagaggagatggataaattcctagaaatatacaaccctcctagaagggccaggcacagtggcttatgcctgtaatccctgcactttgagaggccaatgcgggtggatcacttgaggtcaggagttcaagaccagcataaccaacatagtgaaatctcatctctactaaaaatacaaaaattagctgggcatcgtggtgtgcacctgtaatcctagctactcaggaggctgaggcaggagaattgcttgaatccgggaggcagaggttgcagtgaaccaagatcatgccactgcactccagcctgggcaacagagtgagactctgcctcaaagaaaaaaaaaaaaaaatatatatatatatatatataatatatatattttatatgtgtgtgtgtgtgtatatgcatatgtacatatacatacatatatgtgtgtgtatatatgcatatgtacatatacatacatatatgtatgtgtatgtatatgtatgtatatgtgtatatgtacatatacatatatatacacacacacacacatatacacatatacaaacatacaaaaccatcctagattaaaccaggaagaaatagaaactgaaaagatcaatacagacagcgagattgaaatggtaattttaaaattgccaacaaaaaaaagtcaaggaccaaatggattcacagctgaattctatcagatattcgaagaatttatatcaatcttatttaaactatttcaaaaaatagagagaggaaatcctccctaattattctatgaagcaagtatcatcctaataccaaaaccaagaaaggacatagcaaaaaaaggaaactacagaccagcatccctgatgaacatagatgtaaaaatcctcaaaatactaactgaatctagcagtgtattagtccattttcacactgctgataaagacataaccgagactgggcaatttacaaaagaacaaggttcagtgcgcttacagttccatgtggttggggaagcctcacaatcgtggcagaaggcaaggaggaacaagtcatatcttacatggatggcagcaggaaaagagagagcttctgcagggaaactctccattataaaaccatcagatctagtgagacttattcactatcatgagaagaacatgggaaagacctgcgccgtgattcaactgtcccccactgggaccctcccacaacacctgggaattcaagatgagatttgggtggggacacagccaaaccatatcattccacccctggtccctcacaaatctcatgtcctcacatttcaaaaccagtcatgcctttccaacagtcccctaaagtcttaactcatttcagcatttactcaaaagtccatagtccaaagtctcatctgagacaacgcaagtccctttcgtctatgagcctgtaaaatcgaaggcaaagtagatatttcctagatatggtgggggtacaggcattgggtaaatacagccattccaaatgggagaaattggccaaaacaaaggggctacaggccccattcaagtccagtgggcagtcaaatcttaaagctcaaaaatgatctcctctgactccatgtctcacatccaggtcacactgatgcaagaggtgggttcccatggtcttgggcagctctgcccctgtggctttgcagggtacagcctccctcccagctgctttcacaggctggcgttgagtgtctgtggcttttccaggtacacggtgcaagctgtcagtggatctaccattctggggtctggaggatgatggccctcttctcacagctccattaggaggtgccccagtagggactctgtgtggggtttccgacgccacacttcccttccacactgccctcacagagattctccatgagggccccatcctggcagcaaagatctgcctggcatccaggcatttccatacatcctctgaaatctagacggaggttcccaagcctcaattcttaacttctgtgcacccgcaggctgaatagcatgtggaagctgccaagacttggggcttccaccctctgaagcaacagcccgaactgtttcttggcccctttaaaccatgctagagcagctgggatgcaggacaccaagtctctagactgcacacagcagaggaaccctgggcccagcccacaaaaccactttttcccctaggtctccgggcctgtgatgggaggggctgcctcaaaggcctctgacttgccctggagacattttccccattgtcttggggattgatatttggctccttgttacttatgcaaatttctgcagccagattgaatttctcctcagaaaatgggattttcttttctatcacgttgtcaggctgcacattttccaaacttttatgtctgtttccctataaaaactgaatgcctttaacagcacccaggtcacctcttgaatgctttgctgcttagaaattccttccactagataccctaaatcatctctctcaagttcaaagtttcacaaacctctagtgcagggcaaaatgccaccagtctctttgctaaaacataacaagagtcacctttgctccagttcccaacaagttcctcatctccctctgagatcacctcagcctggatttcattgttcatatcattatcagcattttggtcaaaaccattcaacaagtctctagggagttccaaactttcccatattttcttgtcttcttcttagccctccaaactgttccagcctctgcctgttatccagttccaaagttgcttccacattttctggtatctgttcatcggtgtcccactctactggtaccaatttactgtattagtctgttttcatgctgctgacaaagacataactgagactgggcaatttacaaaaggaagaggtttaatgggccagacatagtggctcacgcctgtaattccaacacttttggaggccaaggcaggtggatcacctgaggttaggagttttagaccagcctggccaacatggtgaaaccccatctctactataaagaaaaaatacaaaaaattagccaggcatagtggtgggtgcctgtaaccccagctacctgggaggctgaagcaggagaatcacttgaacccaggaggcagaggttgtggtgagccaagatcactgcattccagcctgagtgacaagagtgaaactctgtctcaaaaaaaaaaaaaaaaaaaagaggtttaatggacttacagttccatgtggctggggaagccttaaaatcatggcagaaggcaaggagaagcaagtcccatcttacatggatggcaccaggcacagagacagcttgtgcagggaaacttccccttataaatgtgtccgacctcatgagacttatttactatcaccagaacagcatgggaaagacctgcccccatgattcaactacccccaaccaggtccctcccacaacacatgggaattcaagatgagatttggttggggacacagttaaaccatatcaaatagcatatcaaaatataatccaccatcatcaagtgggtttcataccagggatgcagggatggtttaacatacgcaagtcaataaatgtgatacaccacataaacagaattaaaaacaaaaatcaaatgatcatctcaatagataaagaaaaagcatttgacaaaatccagcatccctttaggattaaaaccctcagcagaatcagcatacaagggacaaaccttaagcttataaaaaccatgtatgacaaacccacagccaacattatactgaatggggaaagttgacagaactggagcaatacaaggatgcccactttcaccatttctattcaacatagttctggaattcctgaccagagcagtcagacaagagaaagaaataaagggcatccaaatcggtaaagaggaagtcaaactgtcactgttcactgatgatatgatcatatacttagaaaaccctaaagactcatccaaaaagctccaagatctaataaatgaattcagtaaagtttcaggatacaaaatcaatgtacacaaatcagtagccctgctatacaacagtgaccatgctgagaatcaaatcaagaactcaacctcttttacaatagctgcaaaaaattttttaaaattaggaatatacttaaccaagaaggtgaaagacctctacaaggaaaactacaaaacactgctgaaagaaatcatagatgacacaaacaaatggaaccacatcccatgctcatggatgggtagaatcaatattgtgaaaatgaccatactgccaaaagcaatctacagattcaatgttattcccgtcaaaataccagcatcattcttcacagaactagaaaaaaaatcctaaaattaatatggaaccaaaaaagatcctacatagccaaagcaagactaagcaaaaagaacaaatctgaaagcatcttattacccgacttcaaactatactataaggctatagtcaccaaaacaacatggtactggtataaaaataggtacatagactaatggaacagaatagagaaccccgaaataaagccaaatagttatagccagctgatcttcaacaaagcaaacaaaaccataaagtgaggaaagaatactctactcaacaaatagtgctgggataattggcaagccacatgtaaaagaatgaaactggattctcatctctcaccttatacaaaaaatcaactcaaggtggatcaaaggcttaaatctaagacttgaaaccgtaaaaattacagaagataacattggaaaaatgctactagacattggcttaggcaaagacttcatgaccaagaacccaaaacaaaagcaacaaaaacaaagataaatagatgggacttaattaaactaaaaagtttctgcacagtgaaagaaacaatcagcagagcaaacagacaacccacagagtgggagaaaatctttgcaatctgtgcatctgacaaaggactaatacccagactctacaagaaactcaaacagatcagcaagaagaaaacaaataatcctgtcaaaaattgggctaaggacatgaacagacaattctcaaaagaagatatacaaatggccaacaaacatatgaaaaaatgctgaacatcacgaatgattagggaaatacaaatcaaaaccacaatgcaataccaccttattcctgcaaaaatggccataataaaaaaataatagatgttggcgtggatttggtgaaaagggaacacttttacactgctggtgctgaatgtaaactagtacaaccactatggaaaaacagtatggggattccttttttttttttttttttcttttctgagacagggtcttgctctgccacccaggctgcagtgcagtagtgtgatctcagctcactgcaacctctgcttcccagtttcaagctattcttccacctcagcctcccaagtagctggatttacaggcacatgccaccatgccccgctattttttttttttttttgtatttttagtagagatggggttctgccattttgaccaggctggtcttgaactcctgacctcaagtgatccacccacctcagcctcccaaagtgtgtgagtcactgcacccagtctgaattccttaaagaactaaaagtagatctaccatttgattcagcaatcccattactgggtatctaaccagaggaaaagaagtcattatacgaaaaaggcacttgtacatgcatgtttatagcagaacaattcacaattgcaaaaatatggaaccagctcaaatgcccatcaatcaacgagtggataaaaaaatgtgatatatatacaatagaatactactcagccataaaaaggaaagaaataatggcatttccagcaacctggatggagttggagaccattattctaagtgaagtaactcaggaatggaaaacagaacgttgtatgttctctctcataagtgggagctaagctatgagggcacaaaggcataagaatgatacaatgggtttggggactcaggagaaagggtgggaggtggtgagggatgaaagactacacattgggtacagtgtacactgctcgagtggtgggtgcacccaatctcagaaatcaccactaaagaaattatccatgtaaccaaacactatctgttccccaaaagcctattgaaatattaaaaggtgaaaaaaaagaaatattcaaatagtggcttgaataaactgtttttaagaaaaaaaaaaaggtgggggctgggcgcggtggctcatgcctgtaatcccagcactttgggaggccaaggcagacagatcacgaggtcaggagatcaagaccatcctggctaacacggtgaaaccctgtctctactaaaaatacaaaaaaaaaaaaattagctgggcgtggtgacaggcacctgtagtcccagctactcgggaggctgaggcaggagaatggcatgaatccgggaggcagagcttgcagtgaaccaagattgcgccactgcactccagcctgggtgacagagcaagactccgtctcaaaaaaaaaagaaaaagaaaaaaaaggtaattgccaaacccaaggtcatatagatttcctcctgtgttattatctaggagtttttactttccaactttcatttacatctatgatttattttgacttaatatttgtaaagagtgaaaggtctgtgtctaggttcgtgtttttacgtgtggatgtccagttattaccatactatttattaaacagactatcttctccattgtattctctttactcctttgtcaaagatcagtggactatattaatgtgggtatatttctgggccctctattcttgttttaaaaacaggatctcactctgatgcccaggctggaggctggagtgcagtggcatgacctcgactcactgcagcctggatctcctgggctcaagcaaccctcccacctcaacctctcaagtagctgggactacaagcacacaccaccacacccggctaatttttgtattttttatagagatgaggttttgccatgttgcccagactggtctcaaactcctgggctcaaagcaatccacccaccttggcatcccaaagtgttgggattacaggcatgggccactgcgctggcccctgggttctctattctgttgcattgatcttcttatctattctttcaccaataccttgattagtgtagttgtttgtttgtttgtttttttgagatggagtttcactcttgtcacctagactggagagcaatggcacgatctcagctcactgcaacctctgcctcccaggttcaagtgattctcctgtctcagcctcccgagtagctgggattataagcacctgccaccatgcccagctaattttttttgtatttttagtagagacaaaatgggttatgggtttcaccatgttggccaggttggtctcgaactcctgacctcaggtgatccacccacctcggcctcccaaagtcctgggattacaggcgtgagccactgtgcccagccgattactgtagttttatagtaagtcttcacatcaggcagtgtttttttggtttttttgtttgttttttgttttgttcctctccttcaaaattgtgttgtctattctggtcttttgactctccatataaactttaaaatcagtttttttatatccacagaataactcccttgggtcttcatgggggtcgtgttgatttatagatcaagtttggaagaactgacatcttgacaatattgagccttcttattcataaacatgaaatatctctccacctatttagttctttgatttctttcatcagagttttacagttttcttcatatagaatttctacatattgttagatttatagccaagtgtttcattttgggggatatttctacaaatggtattgtgtttttaatttcaaattataattgttcattgctgatatacaagaaagtgattgacttttgtgtattaaccttgtatcctataatcttgttatacttattagttccaggagtttttaattctctcagatttcctacatagacaatcatgtcatctcaaagacagttttatttcttctttcccaacctgaacaccttttatttcctttttgtattttattgcattagctagaacttctagtatgatgttgaaaaggagtgttaagaggggacatccttgccttgtcgctgatcttagcataaaaacttctaagtttctcatcattaagtgtgatgttaactctaggttttttttgtagatgttctttatgaagttgaagatgttccccctttttcctagtttgctgagggctttttcatgaatggatgttagattttttttaaatgctttttgtgtatgtattgacatgatcatgtgatattttttcttcagcctgttgatgtgagggattacattaattcaggtttgaatgttgaatcagccttgctacctagaataaatcccacttgcttgtagtatataatttttttcatacattgttgaatttgatttgctaatatttttgttgaggatttttgcatctatgttcataagagatcaacatctttagttttcttttcttataatctctctctggttttgatattaagttaatgctggtctcacagaatgattaggatgtattctaattctgtcttctggaagaaattatacagaattggtatttgttccttaaatgtttagtagaattcacccgtaaaaccatctgggcccagtgctgttttggaaggttattcattattgattccatttatttactagaatcttattcagattgtttgtttattcttgtgttagttttgtcaattggcaattgtgtctttgaaggaattggtccatatcatccaggttttcaaatttgcaggcatagatttgttcatatattcttttattatccattgaatgcccatgggataggtagtgatgctccctctttcatgtctagtattagtcatttgcatcttccctcttttttcttagttagcttggctataggcttactgattttatctgtcttttcaaagaaccagcttttggttttgttgattttctccactgatttcctgttttcaatttcattaatttctgctataatttttatttttttctacttcctttggatttaacttgctcttctttgtccattttctaaggtagaagcttaggagattgatttttacatctttcttcttttctaatatatgcattcaatgctataaattttcctctaggcactgcttttactgtttcccataattcttgatcatttgtgtttgcatttgtatttagttcaaaataatttttaatttctcaagatttctttctttctttttttgagacaaggtctcactctgttgctcaggccagagtgcagtggcacaatcatggcttactgcagcctcgacttcctgggctcaagtgatcctcctgcctcagcctctggatatttcttctttgacccatgtgttttttagattctattagactttctatgtagattataatatctgcaaataatgagttttaccttttttgttctaatccatacacctatttgtatgtattaatttaatttgaaaatagtgtggtgggataaaaaaattaaaactcaatatgtattagataatttaaaactttattgagtgaaaaaagaaaatggcatctgaattgtttaaaaaaatgtaacagcaaaatcaatgtctgcacaaaaatgatttttacagacacaaatactaaaatatccacgttgatatctataagcccattttcttggtgtttctctcttgactactgtggtttctctcttgagtgatagaagaccattctgaatactgagacttataaacaacttatttgtagcccaacaaagggatttatctgttcctggttgagctctgggccctgcagccaccacaaaccacttgtgtcagaatcactttgtgtgctggctaaaaatggcagattcctggcctcccccaggacatgatgaataagaatctgtgcttaggctttgataaagagaaagacaaaaagagaaagagaaagataaagaaaagagagaaagaaagaaagaaagaggagagagagagaatatgaatatctctgctggtattacctgtacattcatgattttaacaagatcccccagtgggccgggcatggtggctcacacctataattccagcactttgggaggctgatgtgggcagatcacttgaggacaggagttcaagaccagcctggcccacatagcgaaaccctgtctctactaaaaatacaaaaaaaatagccaggcatggtggtgtgtgcttgtagtttcagctactctggaggctaaggcacaagaatcgcttgaacctgggaggcggaggttgaagtgaggtgagattgctccactatactccagcctccagcctgggaaacacagcaagactctatctcaagaaaaaaaaaaaaaaatccccttatgcttacaaccctgaaaatcattatggcaggaggaggggacagagaatctgacttccagaaaaagggggtatcatcgacaaaaatccagccctgatttcctgggataagaagactagaagcctggaagaaaagtgacttccattctatgttctttcttacaactgccttgacattctctatgatacatatatacatgtaaggagagctctaaaatggcccataatttatctgcctacccagatcaagccattgtactggtttgaggacagttcaaaaaagtcagtcagtgctatttctttcagtagacagaagagctattctctcatggacatcattactaaaaattaagccttggaatttatcagggactcctgccacaataagagagcctggagaaataggagagagatgtgaaggcagcaagtcattggctgtgattctacagaagaaatataatgacttcagagcaaagcaaaactccaggcccaacactgcgtcagtgttttcatgtttccattgaagtactgttagtctaaaaatctcaaaagatgtaaagaaaaggacttatcagataataaacatgatttcaaaactcacatagaattctagtaatttctaaaagtgatagtattataaatattagaactgcccccaaaatagtcacttagatatttagattttttttttaaagcctcaggtacttcagaaacagcttatacctgttataaaacctcccatttcaacacctggagtcattattatgactgtcattataattaaataataaaaatctcagtaaaacaaaattagaaatttaaaaatcagtttttttaaaaaaagtttgctttgagaagatctttactgcacataactgaattcacttctatttgaataaatagtaaacacaataaatattcatgtgttgaaagtccctgcaattctcaattagcagtctataaggggtagagactattatgtctttttacagcacacatttatcttatcttaaaattttaagcataattattttcacatatatatatgtgtgtacatatttgagacagagtctcactctgtcacccaggccagagtgcagtggcatgatcacagctcactgctgttgacttcctgggctcaagcaatcctcctgccttagcctcccaagtagctgcgactataggcgtgtaccaccacgcccggttagttttttctgttttttttgtagatatgagtctcactatgttgcctaggctggtctcaaactcctgggctctcgcaatcctcctgccttggcctcccaaagtgaggtattacaggcatgagccactgtgcatagccccgaaatatttttaatgtgagttatagaaccttgccccataaaaccacagcctctcaccccaaaacacttcgctgtgagacataatgtgcctatgaaaggtatagtacatcactagttttaacaggctgctcaagtactaataaaataataattacttcatcaaaaatgcatttggtatatgctttaatttcatgcatgtataagatactctttttactttctactttaacactgaaggaggatagaaaacttgtaaatgagtatttaaaagcctgatcctcttaagaactaaaagcagaatcaagtaacagttggctttcataaccaaatacagtcatatgctggataacgatgttttggtcaatgatgtaccgcatatacaatggtggtcccagaagattataaaaccatatttttactgtcccttttctatgtttagatacttaccattgtgttacaattgcctactgtattcaatacagtaacatgttgtacagatttgtaccccaggaccaacaggctataccaaatagcctaggtgtgtagtaggctataccatctaggtttgtggaagtacatgctatgatgtttaatgacaaaatcgcctaatgacacatttctcagaacatatctccatccttaagtgacatatggccgtatcacattgttagctggtgcgctcttattctggtgcgctcttattctggtgcactcttattcttcctttcaagagaagattttaaaatgcaatgattactgtataaatgataactacacccactctctcaaggatggactcctgagagtggtccaagccagggttactgagttgtccaaagtcacagtcagaccaaggattgttttccactaattacacagtctgcacaatcagaatagcaggagcaacagtatcagagcaaaagagaggcatacagaatacattctaaagccatggcaaaataaacaagaaataataataatccaatagctttcctcattaaagtttttttaaaaacaatcccagcataaagttgcaaagacattaaatattgcttttaaaaatataaacagttattggtgaattataggtctcaattagctcaaaataacagtcttcaaacatactacatctgatctcagaatatccacagtgttccaactcagctacacattatattttcctctaaagtacagataaacctgatagctactttttacaacagcagaataaagatactggagggtcatcttctaatctgtattttccagagttgggtagatctttgcattctgatataaatgtacgaagttcagtctctgggaagccatcttgttggtattgctaaacagaagaatgttaaaaagcttttattaataagctccttgaaaacagcttcattccaaattcaaaatggatcatttggcaagggagggggttttctagagagatagtatcgttactcctgagtacctgcaaaggagatgtagcctctagagtcactcaggtttggcggaggtaaagtgggcctgggattctgcagctgcctacctgagctctctttctgggtccactgaaacccaaatgggcacactgagtcgaagtctgagtcgtccttccagggagaattgagctagccccatcccaagtccgagaacctctgtcactactctgccctgcaggcctgtgacttccagaccagtgtgatgcaggcatttttgaaggaacatggttcaggccacaagaagcccagtggatctaaattaacaaggttttctagtaggccaagggatggaaatccctggccttgcccagaacacctcagcacagtcttggactctctcgagttggcccaagtgtctggacaaaggtctgaatgctgtaagggacctttccaatctgcacacccttttggagtcagtcttccagccaggcaagtttgtttaagggcctcatatttatatcggtttgggacctaaaatttctaggacatgccatgattagaaaggatcagaagtaacttagcttgcccatttggcaagtgctctgagcccacggaaagaggttagcgtctaaaatacgagtttcaggcttatgtcatcaaaggtgaaaacccatgttatccttagagctctcagatgtcaccctcgaataacacacagttctctgcatgcagagttggaggcagtgaacttttagagcaccatttggagggatctgaagttacaactacattctttcccagttgccttggtgatcctaaggacacatctgctaagcagatgagagcaaagaggacattcggtccctgaaatcttgttcagtgaggatgaagtcacagccctggcttcatgagcaaagtattcatcattatcagcttcaaaccaaggcgttctctttatccctagggccaatcacatggcttcatgtttctttatccctctcatacccagaaagaaaagtccccaagtggaagtgtctatgccacaaatacacctaacagtataagttatggaaattgaaacatatatggatatttattctgcctttccatatttcaacaggctcaaattgatttttaaaagattttatatgaatgacaatagcttttcagttcaggtatctgactgtataaagctacatgctagtactggacccattaatccttttgctattctggaggctgggcccctgggcttgtgccctgcagggccttgcaaagaaaatgggctcagttacagtacactcaaaacaaaggggtcaatttttctttatgaaaattggagtttttatgttccccacaatattttggctttctgaaatgccatatgttttattcacacaatatctactaacccttataattctttatttagttttttactctttgccccccagacttctaatgacccttataattctaataaaaggttagaaagcttgtgtgagaaagtataactacttagagactaagactttcaacattcaatttttccactagttctatttatcaatttctaaaaataaggtcctttttctctatcctgaagaaattaacattccatcaacttttcttctaccattaggtactgaattttactgctactctacaagttataggacaatgctactacttatggctcttgataaacctaccttaattgtttcgtatgtatcagtgatcagtgcaatgaaaagacttaaaatcatatatataaagaggctgatgaatgagtagaggtaaattctactaaacagccagactaagtaacttttttgctgcatttttgcaaacgtggcaaacatatcatctccatttatcagagagaaaaggcactcagagaccatgttcagagaacgaaactggaaaaagaaaagagaaaagttcactttattccatgttccttcccattggagacctttgttcatgacattgtattaaacataaagggaccagataacccaagctaccattttcaaacaaataacctgaggtaaccacacacatttgctttgtgatgcatataacataaataagcctactattttttcctgagacaagcagctttctcttaaactagcctaaatcaaatgtaggagctgctctgcaccctcagtgcttttttgaatcaagccttgcatctgccctttaccttaaagagaccttgaaatgcctgtgcagagatacccaggtcccaaccatgcatgctcatacatctcattttaaagttcatttcatttaagataagagcataatattccagactatagctctagtaataaaattttcaaatatttctacaagtttccccctatgctactttttaaataatgtcacattttgagaaggcttatctgaagagactgcttttggatatatcgatgaatcaaattgactaaacttgacttcactggtggtaaacgggacttaattacctgatatattgcaagaaagaatgtgagacagttgagtacatcaaatattctctcaagctggtcacaccctttcactttataaatatggcactagatatactaccttcaacattttaaggctgaatcacaaaataaaaggagttcattgaaaaaggataacaagccactggcactatgctaaaagcttaatagtaacaggaaaaaagttgtttatcagtaccttgtcatggtaaggccccagcacgatccatccacagaagcagtaacctaagtaaatcatagctgcacagcagcagaacctgatgacattgggcagcgctgcctgaagggtcaaaatgaggagctgggaaagtaagagaggccattagaatggttttgtcctttagccaaagcagtgcaataactttgagagaaataccaacagcatggagatccgtggaattccttacgttgtactttgcaaagaaaccgaggtatcggatgactccaagccacacgagcatggtagaagtcccaagaagtatgctacagacatcataactagttagactctaagagagagtggaaaaatataatcagattataaagcagaaattcatttggcaataaatattgaggtaagtatgagtaaggcactgttttaggtgctaaggataaagcagtgaacaaacaaaagtctctgctctcataaagcttacattctagtggagggaagaaagagacaacagaaataagttaatagaaactttgggacacttgctgctgataattgctgaagagaaaattcagaggaggggataaggaatgggtatgggtttgtcattttacatacactaaaaagaaggcatttgagcaaagatctgaagggagggagggagaagtcatgcaaaaatctaggggagaagccttccaggcacagggactggcaagtgcaaaggccctgagacaggagggtgcttggcaaggatattgcatctggctggagtgagcaatagaaagggtatacagttatagagataaggtggcactcaccaagtttgtcttttactgtaactcaattggggagatttgagaaccacaaacagaagtgatatgatcagatgttggctgctgtggttgacagcaggttgttggaggagtgaggatgctattgcaataatataaatgagagatagtagcttggaccaggctggtaatagtggagttgaccaggtgatttttattcttttttttttttttttttttttggaaacaggggtctcactctgtcacccaggctggagtgccgtggcacaattgtggctcaatgcagcctcgacttcctgtgctcaagaaatcctcccaccttagcctcccaagtagcttggattacagacacatgccaccttgactgctaatttttttaattttttgtagagatggggtctcactatgtttcccaggctggtctggaactcctgggctcaagccatcctcccgcctcagcctcccaatgtgctgggattatatgagtcacagtgcctggccaatgaaggtagaacaataggatttcctcttggattagatgtgggaaagaagagattagtgaaagagaggagtctgtgatgaatccaagatttttggcttgagtaactgatgagagttaccattaaccgaaatttgaaaggctatgggaaaagcaggttttgactgcagaggtgggggctttagatgttctgttttaggtgtgttaaatttgagaggaaaagcagacatccaagtggagatatagactaaatggtggatatgcgaatctggagttcagggaagaattctaagtgggggtatagatttgggaatcattggcatatagatactaagctgtgggacaggatgagattaccaagacagtggcagaaaagagaagatgtccaagcactatgccttgaagcattatcaccttaataggttggtgagatgtgagggaaccagcaaagtcagaagaccagccagtgacttaggaggaaaaccaggtgatagtccattgaaagcatgtcaacaaaaagggagtgcttggcagtattcaaagctgctgctaggtcagcatgagggtacatagttggttattggacttatcagcatgagaggacactgaaaagaacactttccttggagtggcagggcagcctgattggaacagacaccgaaagaatgagattttggggggctgtgaggtgggaggattgcttgagcccgggagtttgaggctgcagtgagctataatcgcgccactgcactccagcctgggcaatagagtgaaatcctgtctcttaaaaaaaacaggtgggggaggggaggagcagaatcagaaacaacaagattaactacttttttgagatattttactaaataaatgatggtagtaagttagcgggaggaattagggttgagatattatctcttaagaaaagcggcaaaaacatgctaatgggaatgacctggtagacagaaggaaactgatgatccccaagagaaggaaaactacctggagctgtgcccttgaataaacaagtggtgatggcctctagtaggcaggtggaggggttggccctgaatagtggcctaaataatgtatccacagaagaaaagcacagtatattggcactgatggcaggaggcagataaattaggtgggggtttgtggaaattctgttttttttttctattatttttgtgaaataggaagtaaggtcatcagcttagaatgaggataggacaagggtattagaggtttcagaagagaagaaaacatgatatgatcatctatgaggcagagacggtgaatggtctagaaagatattttgttggataccatttagggttcactgaaattaatgatagttgaggttggtaaaaataaagatttgctgcaaatctctccccttactcctttttttgttttggttttttatttgtccctaaagttaaacatctattccaatgatacatactatagccacatatagtggcagctgctaagtgtcaacctaaacccattctccccttcctaggcacatgcctgggctgtgttccctggctccctctgcagttaggattgactaaattctatccagtgggatatgtacagaaataaagtcggccactcttgagccaagccatcagtctatgggagagcttctaccataccgtgtttttgcttcccataagctgcaacctgtttgaggcaacacggcaataatcatgcagtcagggcaagtccttaaggggtggcagagaaacaaaatgggaggaacatgggtgcctgaatgactgtgagatgttgagctactcaccagtctgtaaaacccattctgactattgcataagacagaaataagctcctatcttctctgagccattgcatttggggtctctgcccaggtttataaccaactccccaggtgactcaatcagttgcatcaagactagggaaacataagtttgagcaagattagtctgaacactattagtttttttaatgtgatttttattttgtggggacagttgatttttaggctaggttagtcttaaaataaataagcttgtagcacatcaatggtaaagtaagaaaatgggagcattctcactttgaatggacggaggaaacaaatgcaagcatgcacaccatagtgccttgacctcactttcccctatagccccactcatttttgttaaagattcgagcatttcttgtaagattaaaaaaaaaaaaaaaactcttaccttagttaccttggttgtgtatgaattttggtgtgtgtaagaattcacaggccccgccgaagagtctgaattcagtaggtctaacatggtacactttaccaggcacccaatgattctgatgcaatggtttgtggatcacactttgaaaaactctgcctaagagacctcctgactagatttaagaaaattaccattaccaatttcaagtctacttgatatacagtttggaagaaacaattcattctgaaaattcttacattctggaaaaatacattaccattagtgcaaatctgacactaacaatagcatgattaggaaaaaaattaccttagcttggatttccatttttagaattgatccaatgattgtcaatatgtcactaataataatcataatgtaccatccattgacaaattccatttgatcagaaacagaaacttccttcttataatggaggaggaaaaaattgacaaactcctttagggaaaagaggggaggcacagtgaatgtctctgtcaatcaaaatgtcagtagcattcctagaaagcaacgttccctacctgctgaagctgaagtcctctaatcacagatctaatgcagaggattaatgaaaccaagcaagtcagaatgacaaaggcatcaaagatcatcatgtaatgagtgttcttctgaactgaaagcaaagaggattacatagtgcttatgtagtgggacattaatatggtgacatcttctttttagaatcatttaaataattcaagcattctttctggtaagacaacaaagaagccctgataaacggtcttccaattagtatttgaagaagggcaaaagtctttcttttaaaaaatcaccacaactgaggctgggtgtggtggctcatgcctgtaatcccagcactttgggaggccgaggcaggcggatcacaaggtcaggagatcaagaccatcctggccaatgcggtgaaaccctgtctctactaaaaatacaaaaaaattagccgggcatggtggtgagcgcctgtagtcccagctacttgggaggctgaggcagcagaatggcgtggacctggaaggtggagtttgcagtgagccaagatcatgccactgtactccaggctgggtgacagagcgagactccatctcaaaaaaaaaaaaaagaaaaatcaccacaactatcattccaagatctttaattataagcctgtagtcttttgttcttaatacaattacctccctgcatattctttttttttttcctcagcctccctcgtagctggaactataggtatgccaccataccgggctaatttttaatttttttgtagagacagggtttcactttgttgccatggttggtcttgaactcctggtctcaagtgatcctctcacctcagcctcccaaagtgctgagattacagacatgagccaccatgcccaggcccatctccctgcatattctattaaaatgtacttatctaggtataaaatatttattatgcattcactatgtgtcaggcatttttctagatgttaggatacagtggtgaacaagatagacaaggcccttgatctgtggaacttctattctactacaaagaagtaaacaaacacataacaaaatactttcagataggagtaagtaatagaaagaagataaatcacaatagctaacatgtattgagcacatttcttgccaaacatagctctaaacactttatatgtgttaacctatttgatcttcacagcaactccaatgaggtaagcatgattatccccactttgcaggcgagaaacctgaagcacagagaggtcacatgatttccccacagttgcagggctagtcagtgaaagagctgggggaaaatctgtgcagtttgtttccagtgtccatcactctatgtcagtggttcttggcattttttgggagcttgttagagatgcacattctcaggtcctactccagacccactgaatcagaaactgggtttctgcaagccctccaggtgatgctaaagtttgagacctactgctctatatgagggaggttagtgtcgggcaatgtggaagcagagaggttgatttatattgcatagtaaaggaaggcctcactgagggagcagggggttttagctgaaacctgagtgataagaaagagccacccttatggagattttggagaatcgaaagtgcgaagtcctggccaccatgcgtggagccaatggagagaggtgggcagaggtgtcagccattgtacactgccacagagcttgtctctatttaacaagttagactgctctctgctgacaaaaaaaagaaagtacttaaaactagctctgtgatgaagcatcccattagtatctgccaaggagcataattactacataaatgtctaaattgactttagagaaacttacaaattaagaaacaaacatttgagagaatgcctaggtgccagacacttgtgtatgctgtcattttcctcattctggtgtttgtggagaatgattataaagtatacagatgacaaaacaggcttatgtttcaaatgtgactcaagagcctcatatatttgaagttacctattagtgaaaaaaatactatcatggcaaaatttcattttatttactctatctcattattacgtctgaacttggcaaatcaattagtaagaaactttagaactgtgattatccaagtatagtctgagtaaggactatttacacatttctaggccccaccccagacctactggcttgcatagagctggggaaactgcatcatagcaggtacccaggatgattcttctgctgattagaatctgagaactcctcatctagcgaccattaagtccagtacgatgtaccattatgtcacttatgagagactagaaaattagataaattctttccaggcaattctctccagttcagctccaaaattcttgacagtatttggtctacacctgaatttttgtccatatttctaagagtagatcctttcctctttcagtacacttttaaatggactgaagacaatcataatatgtgggatgctgcagggtcacatcctacctgacttgcccctggcttctgagccttagtttcttcatctgtaaaaataaggattctccctatcttaagggcatttaaaaatattaaaatgaagaaaactaaggtggaagtaggtacacagcatgcactcggtaagtgttggtctgggaagatgtatgtagggttttggtggcgggggactgtgagtacattcttggtcaggagtgggcaagtgagggcacaaggagaggaaggccatttcagttattcatgactcacatattgcctgaaacatcagagttgatctacttgtagaggtttagggacttgaaaatggtctaatcttctatttgttgttctagatatccagagggtgctattttaataaccattttacattatttaataaccattctgaaaactagtaatgcgcatcacttacttgatccagatacatgccagtctttacattctctgatggaaatgtcattatctaaacttattttaattcttccactatgggccttgttgtcaaatgttatctgtgaagacaggaaaacagtcaaaaacatacttatagttttggagccaagaaacctctacacattaattaggaaacaattctttcaaggggacaggagacccagattctcaactctgatctgttgctaattctgttcaaccatgggaagttctcttcatttctctgtgaaatgagaacgatgaactagatcttctacagagaccctgtagtctctaaaacattatatgtctagggcagcatttccactccaaagaacttatataacaagagcacttcctcttgctctctgttctaagtacctccagataccttcttcatgtgagcaagaactggtacaactgtgctttctcccaaattccggcaggacctcagttaggggtagatttttagtgctgctataattcttactaatacaaaggctcattatttctgctttgagacatttcaagtggagcttttttgatttttattctgggcctagatttcttagtcacgttggcactacatgtattataaagggtttggtgacagggagtcaacagtcacatcttgcttcaagaataaccacttcaggacaccaggggccaagcaggacaaagctaggccagaacaccttccatagttttcctactgtcttccttatgcaaggacagggaaggcaaggcaagaaaatcaatccgtttcatttctgcctcttctctttctctcaagtcctgaagaaaaaaagttctttgaaaactttgtcatttaaataaattgtattgaagcttctccatatggggtaatcagaaacacttcaaatataagatttcaaatgacttttaaaagttcaaccactgtatttctcctcatgagggattgtaagcttctttctttgacaagcaactgagggcacagtcagtgtctgcccatatccctaacggctgcaagacccagcctatggcctcgtgcaaggaggacgctcagtgttacttgattgagtcagaaatccttgctacggagaagccatgcttttcctacacaaagggcctccaacttgtacaaataataggtgctcactaaatatctattgagtaaaaaactgggacttaatgtcaatcacatctcagtaaactgaatcccaaagaaagaagaaaaataatggatgggattagaaaacattagatagcacagaagaaaaaacagtgaatttgaaaatatagcaacagaaaatatccaaaatgaaacacactgaaaaaaactgagacataaaacaaacagatcattactgaactatgggacaactccaagtaaccaaatacagacgtttttgtctctgaatctctgaaaaggtggggggaagtgacaaatatattttaagaaaatcatgctgaataaatatcaaatataatgacaactataaacctacagatccaagatgctcaatgaaccttaaacacaggaaacattaagaaaacaccatcaaagcatttcacaatcaaattgttttaaagtaagagataaaggaaaaatttaaaagccaacagatgggaaataacatcccatagataagaacaaagataaagatgacagcagatttctcattagaaataatgcaagctagaagcaacatctttaaagtgctaaagaaaaaaacagtcaacctacaattctatagccaaggaaactacctttagcaaaggaaggcttggaatagaataatggttaccagaggctagaaagggtattggggaggcgtgggggataaataagagttcgttaataggtatagagatacagtgagggccgggcacggtggctcatgcctgtaattccagcactttgggaggccgaggtgggtggatcacgaggtcaagagatcaagaccatcctggccaacatggtgaaaccccatctctactaaaaatacaaaaactagctgggcgtggtaacgtgtgcctgtagtcccagctactccggaggctgaggcaggagaatcgcttgaacccgggaggcagaggttgcagtgagccaagatcacaccactgcactccagcctggcaatggagcgagaatccatctcaaaaaaaaaaaaaaaaatacagtgagatgggagaaataagatctagtgtttagtagcacaatatggcaactatagttaataatttattttatatttcaatataaatagaggagtagatttagaatattctcaacataaaaaagtggtaaatatttgaggtggtgaatgttgtcccaattacccttatttcatcattacacactgaatgctggcatcaaaatatcacctgtaccccataaatacgtattcgtaaaatttttatttaaaagatgctaataagaactttaaaaaggaaggcaaaatacttttttaaacatacaaaagctgaaagtgcagacctgcactgtaagaaatgttgcaggaagcccttcaggcagaaggaaaataataccagatacaaactgggagctacacacagaatgaagcacactggaaatggtagctacatgggcaaataaaaaaatgtttttattattatttaaatcactttaaaagataattgactgtttaaagaaaaaataggctgggcacggtggctcacgcctgtaatcccagcacttcgggaggctgaggcaggtggatcacgaagtcagaagatcgagaccatcctggctaacgcggtgaaaccccgtctctgctaaaaaaaaatacaaaaaattagccgggcatggtggcggacgcctgtggtcccagctactcaggaggctgaggcaggagaatggcgtgaacccgggaggcggagcttgcagtgagccgagatcgcgccactgcactccagcctaggtgacagagcgagactctgtctcaaaaaaagaagagagagagagagagagagattaataacatatattgtgggtttataacacatgtagaaatacattatatggccacaatagcatgagggccaagatgggagaaatggaagtacattgtcgtaaggttcttacactgtgtgcagtggtataacttgaaggtagactgtaataagttaaagatgtatactacaaaccccaaacatggaaacatccatggtgaagacactaagtaacaagaacccttggcagtaacctttagctgacagccagccatagattgctgagagccaaccacacagaacctaaaaacacctattccttttgggtttgaaaatctataccaggcactgttcgtggtactggaaatagtagtgaacaaaacaaggtccctgcttttctagaacttatacagaggtgtagaagacataactaacaagtaaacttgttattatagcaaaatagagctagatgtatcaatgcttcccttatgcacattcaagtgaaaacatcctatatttttttatcacaccgtaatccaaggatatgaaacattaccagataaaacaatttttctccagactggaaccaaattcagcctggcccacacttacagtcagagtaaagtcataacagtcagggagttcttgatgacgaactgtctgcagattaatggctttcagtttaaactgaagctccactgttaggagtctagaaaacagaggtgattttagttctgtggcaatatatacgtgcaaacgtaagttacactcctgtctgctcccctcacctgtggaagtccagtgttaagttcagtttattttctgctggtgtcccaatgtgaaaaggttcatctggctccacaaagaaacactctgccatagaaaggaacaaaaacatgatacagtacttaaataagactgcattttgaaaggctgatacatttaagaccagttattcagattctattatttttcagattctattatttttctgaattaaaattttaaaagctaaataaacattgataccacatggttaccgtgactcatgtgtttttaagacctaagtggctacatttctggagtggatggaggctagacaaagatctgaactctatttcattaatgttatataaatgctgtcttcgtttttaagcctagataaactttgagtccctccccctttttgtatcctaagcataggatttgaagcacttgcagtaattacagtaatattttctaagcagtttgagggatctatttttaaaatattatgcactaacaatgtttcttcaatagacatcccacacacacaccaaaaaaggaagacagcattttagaaagttttccctttcagtactgttatcagtattatctctagaaaaaaaaatcctagtggctgttgttaaaagtatttcaatacttattttttaactcaatgacctaagctaatattttaggcataattgcaaatagaactttgctaagaagaatacgccatgctattccatgttctgattttcattcctccccttcaatctacccccaaagatgcatgatagtgaagtggtattggggcaggagagttttatatataccaagagtttgcaagcataatgttttacaaacattatatctatctattaatacttcactggcatatcctgcacaagagatggtggaatacgatagctaagaacacaaacagcctgagcccaatttcagcactgcctcttctagctccatctttggcagatcatttaactctctgagccataatttagtcttctataaaaggggataataataatccttgacttgctgggtttccttgaggattcttgagttatagtaaagggctcagaacagtacctgacacataataactcgtatatcattcttactatgtcctaatatcacagaccaaatcaatgttttcaaagatgaaattactaattttaaatataaattgaggtgttaaaaattgaggttctaggttatagaagaacatcaccagtttcaatttctggatcgatgtcaaaggtatcatttccagggtagatgtttcctcgcttgtagaagtgctgacagattgccatagcagattgcttggtacctttgttctcataagcatgattcccaacggagacattgtatagctgcaagtacttcaaccaaaatgagaaacagaaaatgggaatgccagccagggcaggagtgaagccataactcccctccctccccacctctgatcctggcaggttcccttgggatagagacattcactttgataaacagggtaagtgacttgctgctgtgcactaggaaggcaaagggcactcacaaattagagttctagattcaagcctcatttctgtgacaaactttctgaccttctagttcctgatctgtaaaattaaagtctgaagccacatactctttgcatttctttcctcccttaaagaattatgtttaattcaggtgatattcaatgtaaatacatatttatctttaaactatctcctgtaaggtcagagttctactttaacactgtagtataagaagtgggatacaattattataggctagccagcaaaaccttttttaaagaaagtattggtttaacctttatctttgcaagattataatttaatcacctttataccaatattgcctatcctagtgggtcctctacatttaaaaaaattacttttacaagtaagaatcttacggtgccttggaataactgtcatcttaaattcttaatggatgtctgcagacatgtttccaaaacaaagtgtttttggagcaatatgtctggtacagttggtcattctgtcactcttgaaatgaacaactttgtgtgatcgacacatagaaaataattctgctaaaagatatgagtgaagcatgctatgacaaatgaataaaataatttctaatatgggatggattttgagttggaccttgtcaaggtcactaatgagcagtgtattaccaaatctgatgcctagttctcagtcctcctataacttgacatctccatggtatttgatgcagttgaatgctcctcctacacggaatactttctttacttgacttctgggacactgattgtttcttcttggtctcctttgctgaaatcctcccactgccaacctctatattttggcctatctttgggttcaggccttgacctctatccacattctctccacagctgacttcaaccagtcccatatttcaaataccacctctatgctgacagcttccaaatttgcatcttcagctctgacctttccactgaataccacacatggatgacaatctgcctacatgatgcctatggtgtctaagaggaatctctagtaaatgggcaaacagaaacacctgcttcttccatagtaattcccttctcaataaattattctgtaagtcagtcagttgttcaggccaaaacttaggaaagatccttttgtcaattcctcttatactccacttccagtccatctgaaagtcatgcatgactttcaaattatctctgcaaaagaatcacttaaaaatctgagcctcttcaccacaaataggactgtctctcatcaccttcactgatatggcctcagtccaaaccaccatcctctctcccctaaaaaattaagcctctgcctctccaatcctccctctcaccttagtctagtctccatctagaactcataggattgctataaagagtgaatgaattcatgcatgtacagctcttagaacagtgatatccaaaatacacctgctcaagactcttgtttttactgttcttcctatctggaaggttcttccttgagatagacacaggctgcatgctctctctttagtctgctgtctgcttacatgtcaccttgtcagagagaccttctccaaccacctccagctattcactttgctggctttgttttgtatttcacagtacttataacaaactgacagatgatgctcttctatacttatttactacctggctcttccaatgagaatatgacctccttgactttatttgttcactgcagtacccttgcacacacaaaaagtgcctgatacataatagatactatttttgtttgtttttgtttttgagagggagtctcgctctgtcacccaggctggagtgcagtggcatgatctcggctcactgcaacctctgcctcctgggttcaagcaattctcctgcctcagcctcctgagtagctgggagtacaggctcatgctaccacacccggctaatttttttgtagaagtagagacagggtttcaccatgttagccaggaagttctcgatctcctgacctcgtgatctgcccacctcaacctcccaaagtgctgggattacaggcatgagccaccgtacccaaccaatagatactatttaataaatatttgagtgaatacatgttagattttgcttatgtatattatcattgtctctcccctatcaaaagcccttccatggcttcctgtctctctcagaataacattcaaggctcctttccatgtcctgagagacctggcccccagctcccctggccctaactctgccccctcatacttgcctccctcgcattttctcaaacataccaaacgctttccagcttcagggccttctgttgccacgccttcagcttgaaatattctccccaagatttcaagtcttcagaaaggcattttctgaccactccgagactactgttattgccttatgctagtttatttttcttcatagcacttatcattaccctaaaccaaaagattttagttaaacttgtttaaaatctatctcccccattagaatgcaagttccacaggacagggaatttatcaattcactgctctaacaccagccctgcaggcacacagtaggtgctcaaatatttgtcagattaatggtgaggtgaaaaattataataatgcgatggagctcttcattactagagctaatctgtgcacagtgagttggtaaactgttaggataagataggtgattatggcaccaagctttctgttagcattaggattgggaaagtgagccagaaatctatggtaacagaagcaagcttcctaagctagtaaacaacattatgcttggcatatagggataaagtagaataatgctggagatactcagttttgagatttttgttttccatttaaggtacccagtagaccagtgtgcctagaacatatgatgtgtaatgggaggtaaactgggaaaggcaagcaggggtcacgacgcacagtcatagctgtgatggggcctacaactctcccagagtccaggtgtaattgtggggcagtccccacaagaatcacctaaaggtctgaacctcctgaccacagaatcttgtgtcttaaaccttttaagttcttgaactgtgaaagatctgagacccacggctgcaggtacctgttcacattatacctacatacaccacatagttacgttatataatatatacattaactatatacgctatagccagacttccttgagctcttcatatggctctttgtgcaggtctgagcatctggcaagaactgggtaatctagggaagcagcagggctgtgtccagctagagggcagctctagagcccaagacagagggttacgggacagaaatgtggtatgagatgatggttggaactaactggtggaactaacaatggtgagacggcacagagcagccaagtggctgaggccttggaggagctttaattagtctgggcatccgtccctcctggtctctgcagctctgccttgagagaaggagttttcagtcagattcatgggtcccaggtcagcctttgagtggtaatataaaaacacattaaatgtccttagctaaatgctgtggcaccaaaagcaagaggtggtagggcagggtgggtaggaaagaaaggaagccatccagaaacaggaatttataaactatgtttgagctgcaagaataaatgattcccggaagaccctgaggcctttcaacctaagccagaagaccagaaggaagaaacagcctagggagtgggtgggaggagaatatgaagctgctcttggatgggcagttctgaggtgcttgtgaggtaggtgtctggcagtgtgggcaactgcttaggagtcccttcatcatactgatggctgaggctgggtagtggaggacatttctgtaggaaaacgaccaagctttgaggactgctcaaatttaagaggcagatgaaagaaaaggagccaataaagctgacccaaaaattattaaagaaataagaggaaagccaggagacagcctaaaaagaaaataaggtctctcacattcaaatatagaaacatatataataaacagtagtgctgttataatcacagtattggatcagaatgagccctggagattatccagtaggatgacatcttggggctaaacccttggggataactaatagtcatggatatgcttctaagaactgagatgccactgccctatttgtcagttcctctcagtaacaatcacctcaactattaagtaaagaaatgctttcttcacagaaaacaaagatccttcctgttttaataacaatttacattttggccaggtgcagtggctcacacctgtaattccagcactttgggaggccaaggcgggcagatcacttgaggtcaggagttcaagaccagtctggctaatatggcgaaaccctgcttctactaaaaatacaaaaaaaaattagctgggggtagtgacgggagcctgtaatcccagctactcaggaggctgagatgggagaattgcttgagcgcaggaggcagaggttgcagtgagccaagattgcgccactgcacttcagcctgggtgacatggtgagaccctgtctcaaaaataaaaaataaaataaaaaataaaaaatattaactcacattttttctattcatttctcagaagcctgaaagagaactgacctcattagacctcattaacactcaaaaccctacttattcataaaaattttgatcaagacactttttatcttcagctaaaagtacctactggtgcttagaaaaacagtaaatcatcttagaaaacagtagggaatcaacagtagggagtcatacatggaatgtatgtgtccctccaaagttcttatggtggaaattaaaccccaatatgatagtcttaagaggtggagtctttaggaggtcaacaatcatgaataggactactggccttataaaaggctgggagaaattagccaggccattttgtccttctgccttccatcatgtaagaatacagcaagaaggtgcaagccattaccagtggtaaggtaagtgatcttggacttccccggctccggaattattaggcagaaatttctgttgtttgtctgttatctagtctcaggtattttgttgcagcagaaggaacagaccaagacaactagaataaagcaggtacctgcatttccagaaggaatgtggaaatctgaaaaagcagaatggcctaagtgccaaatactacattttgaagactgagtctaggtctacgaataaaggttaagatgatttataaggaatttaatgcactttgggaggctgagatgggaggatcacttgaggccaggagtttgagcaacctgggcaacatagggagaccctgtctctataaaaaaaatttttttttaattagccaagcatggtggtgcatgcctgtggccccagctgcttgggaggctaaggtgggaagatcacttgtgcccaggaggttgagtctgcagagagctgtgactgcaccactgcactgcagcctgggtgacagagtgagatcctgtctcaaaaaaaaaaaaatttaatgaactgtttacctcttgcctctatcccactccccgccacccctcgaaaaacaccaaactaccagtttagatcagactagctttagagaaacgtaatatacttaaaattctaaaaacggagtatctccatcattatgccttcttccccctacaagctgtaggacatagttctgttgaacagtttatgtaacttatttctattactttagatttctggctcattttcccaaccccagtgctaacagaaagacttcatgccataaatatgtattttatcctagcagtttacatcttactgtgcatagactgtctctagaaaatgaatagccatgattatacgataataattttctgaagaaaaattgtaataattttgaaatgtgtccttcaaactaacccagtctgggaatgctgacttcaaggacgctttcaatgacacctagagatttaaaaatttggggtcttgagaaaaatatattatttctggcaaaaatatatattacaaactcagaataaaatacagcattcatctatatgaaaaacaagcttgttttttgtttggcagttagtcaatgtcacaataaaatcattgtcatgtatgacataaaggccttactttcaagtgaatttttaggtcttggttgctgtacaaactatgaaaagttaatattctcattatttgttaagaggccctgaaagtatactttcagctctgaggacttaatgactacttatacccagggtcatagttagtaatttcaatctttgagactcccatgccaagccctaactctgattcttttaattaaatcttcaaagtttctgcctttctgttactaaacaaaagcttttctcaacttctggttttataaaaatttgttgacaatatttttaaaaaattaaaaataattttgtatgtgtcatttccaagcagaaatgttcacccttctccacttgaatgtcagtttctattatgtacattgccaccatttttccagtctgttctttttcccaagtaaataatgcacacacttgatttacctggtttactgcgaagattaactgatcatacacgtcactttgtgtgtacactgcatatgtgtcatccattcggtccatatatccttttaggaaaaggtgtttgaatgctatagtattctcttccttgaaagctaccaccatctggttacttagcccaaataagaccagcttaaaagaaaaaaaagaaaaggtaagagggtggaaaatgtgggcagaaaaagcagagcagaaggtacaggggcttgaacaacaaatagaagagtttaaaatgaattctctgggacatcaagaaggttttgcagcaggtggataataaattaagaaagtccaagtcctatgaccaaactatattcctaggtctaatcaccaaaaccatgacaggaagaccaaaaatagaaaataccctttcaactcatgtttaaattaaagtatattaacataatgtgtccttaatagtcacgcaggattgacctcagcattttacgtgaaactcagttgttgacacacacaaaaggtttcactgcactgttgtcatattaacctaaggcctttcaattatacctaaaagcttactatacagccgggcgtggtggttcacgcctgtaatcccagcactttgggaggccaaggcaggtggattaccttaggtcaggagtttgagaccagcctgaccaacatggtgaaaccccatctctactacaaataaaaaagttagccaggcatggtggcgcatgcctgtaatcccagctactcaggaggctgaggcaggagaattgcttgaacccgggaggcagaggttgctatgagctgagattgtgccattgtactccagcctgggcaataagagcgaaactacgtctcaaaaaaaaaaaaaaaaaaaaagcttaccatactcttaagtctctcttttgtcttctcttccctctcatccaaacctctctctctctctcacacacacaaatgcacacacagcacacacaggcacacacacacacacacaccacatgctgtacatgctgtaaattgagaaactacacccttacttaaatcccagagtgaggcagagtatattttatatggaaggcgggaacaatgttgagcacctatgtgccatacactattccaggaactttcctcatactaatcctgcggtgtattcctcatacaccaattttagagatgaggctcagagaagttacatagttttttcaagtcacatcactagccagtgttgatacagtgaaaactgaaacccatgtctgacacactaaatctaggttctatccaccctgtcatgctacacaaagtaatccagggtttgatcagaaaaaatacagcagacaaatcttttcccctctcccttccacatatgatatatggtctgcaccccacacatatcatcactctgcacctaactctcttttctgcagagcttctttaattgtcctcaataagatgacatcttgatattctagggattttgcatctgttgaagctgatgaccaaacagccccaaagaattcccaaagatattcttaccagtcattcaaatacatgagtacctctcctgtgtcagcagtgagctagggactgaggatacaatgagaagacaattggtccctgccctcaaaggtttagtggcagacaggaataacaatggctgagagaaaactgctgtaattcagagagtaagccaggtagtgggaaaagagaaatttttagtagggtgtctatcattgtaaacatctttcttttgctgctgcagacacaaaatctccagtttaacagaaggaccacctcattttccctgagataatctgtcaccatttgctcacttcatttgctcaattacaaagctgtctttatctaatatttgtttgattgctctgatataaattaaggaaacatcacaattaagaaaccctcagttccttttaaaaacttacctaaacaccttttacatgcttattactagcagccttaatatcttaaaccattgttcagttttcccttgaccaccttagtaaacataggaaggtagatgagctccctaaaaattaagaagtaattacgaacataaatcttagagaaaataaatctgagtttgaatatcagttctactcttctagtttcctgactatgacagggtccttttccttaccaagaccctcattgttctcctctgtgaaatgaggataccactacctaccctccaacttgttttaagaattgagtatgggccgggcactgtagctcacgcctgtaatcccagcactttgggaggcctaggtggatggatcacctgaggtcagaagttcaagagcagcctggccaacatggtgaaaccccatctccactgaaaatacaaaaattagccgggcatggtggtgtgtgcctgtaatcccagctactgaggaggctgaggcaggagaatcgcttgaacccgggaggcggaggttgcagtgagctgagatggcgccactgtactctagcctgggtgacagagtgggactccatctcaaaaaaaaaaaaagaattgaacatgatgacatctataaaatgtttagcctggtatacagcaaacactcaagtggtacctattattattctaagtagaaaatattcatgttcaattgatacaggcttttctcctttataagaaactaaacttttcactattgagacacaccatattatcactcagaagttaagaatttcaatttcaacttgccaagtatttggctgagaactgaacatccattttcagggtaatataatagagagaatgcctgccttcaaagtcttgatattgccactgactagccatgtgactttttttttttttttgagacaaggtgtcgctctgtcacccaggctggagtgcagtggtgtgatcaccacacctggcttatttttgtatgttttacagaaacaggttttcaccatgttacccaggctggtctggaactcttgagctcaagcaatccacccacctcagcatcccaaagtgctggaattacaggcatgagccaccctgcctggccaagccatgtgactttaaaagagctctacaaacatcagtttcctcttctgtaaaatgagccagtaagaatgttagaattaaatgaaataatgtactggaacagggtagtcactaaatgtttgtttcccttgatacaacacctagcattagaaacaagcaagaattctaccaacttcatatgattgtaaaaattgccttggttccctaacaatcataagtgtttgttctcaataagcagttaaaattagtaatatcctgttttttttaatctctccttcaataccaattgtttatttacttaggcatttttcaccaacttaggaagagtaagtaataataaaaataaacctatcacatctatttttctcactaaaatctgcttctattttgccctttgcttttagcaagagataatttgaccaacaggaaaacatattttcataagaataaatcacaaccagtatatattaagaatcacaaaatatggttccccctttcccccaaaaaaatattaaaagcagccaaggaaatgtgatttaaaagctccctttgaactaaaaagaggtcctgtgtttcactagctcctgccactcctcttctgttagttaacttcacattcttccattgcatggttctcatgatcacagggttgtgagaatctaagaatttgcctgtagcaggaaccctttaagtttctgaagagagaaattcccaggaaactaactaggaaggaaaagaaagtcctaatgttggacaacactagtttccatggcttatttagaaaccagctgaacctcttcattggaagccaaatattagttttcttttcctgaaaattaattagattatgtgactaaaattataacttagcgaacgatacaagaaaaaaactaagaaaaaagaagacaaactctttcacaaatgttgaagacagaagggtctaagattgtatgttttcttatctgttactcttcaacattttgcatatagttaaaagttatttaaaaaaaaaaccactgtccatagttatctttgtaattaaaagaggctttcaccaaactcatgatctgagatgcttacctggatagtcaccattgcaatttttagaatttgtatggcaagtttccatggttttctacctcgagcccagaacttctcacagggattcatgaaaaaaaatttgagttttcgcctcatctggtcttctaatagaagctcctcagatggagatgtttgctggttaaaattgcagcgattttcctcttcatgagagctgcagctactcacaactacctcaggatctgccatctctagaggaaaaaaacaacaacaacaacaaccaacatttccatttagtgagtaaagacacaagtccatattctttaatattgcaaggagaagcccatacagaagtcctggtttcaaataagcaccattgctctaaactgcattttagatgtttacagaatcagttccaatgtaggacgtcacttttttatttgttttaattacaaagtgaattttcacctagttcaaagttaccaaattcaagggctgctcccattagtaaaagattatatgtacatatatataggatgtatatgttttctgcctcactcagtatagttagaggatcagagacctgaggacctgggggaaggacttcagagggtaggtgggccttgaagttatatgaaaactttcatatatgtggctgtggacactttttcctgggaggtaactaaaactttcacagattatcaaaaaatgtttaaaaccaccgagttaaagatagcagggtgtagtgtaaagaacaagattcagtttggtttctaatcctggttccatgacttgacgtttctgcaatctcagggaaatcacttagcccttctgagcctcagtttcctctccagcaaaatgggaataactacacctacccttctatgattgtagccagaattaaatagttatgagtgtagagagcattaaataaaacagtaaacaaagcctttgcatagggtctagcgctaagcagactcacctacctaacacccacagcagacagggtggcttcctagaaagccagtaaggttcttaaggggcagtatgagcctcaggaaacataactgttgtacaaaggggaaaatgggccctcaatttaagcctaattcccagtctgtggcatcgcttgtaatgactttttattgaaggccttatatttatagcatattttcaaagtacttcatatctatttgggggggggggcaggtacgtttgaaaagggttgggtcgggctggttttattgtcttcagaatcagttttttcaaagtgacggagaagtcactctagagactgggatggatcttggattttccctcagactaagattgatattatactatggaaacctgttcaaagtaaaataccccaaacaatgagtagcgtccttccatacggaatagaaaggcaggctttatttgacattttaataataacttgtactcagcaatgaagaaggaaaattgtaacctgcattcatacaatatcttacaagtcactggttagataccatgctgctttccaagtctagaaccccacttttgattccaattcaagcattcttaggaagcccaacatctccgaacaatagatactggctataaagaatagcatggggaaggttcttaaactcttgttaatgaaaagattaataaggatactgctggatgaataaaccataaaacatatttactgtatggcaaatgcagtaccttcaaaatgaaataattattatataactcattaaagtgtggctcctgtgtgcgtgttaaaatgcctgtcaaagcataaatgcagtaattcttaggtaaaggcataaaggaaagaaaaagttattaataaattaggattttcacttaacagttttacttccttcaaaaaggcaggatattttaaccagcatttaaggagactttatctataggacttaaaacgcagatgatttcatgttgaccaaagctcgcatatgaacaccaacataatgatgaagctgttaataagcatgttggtgagttgtatattgacactaagcgctttccactttgatacagggaaaattaaattttaaacaaactagccacacaccatgtacagtaatccacaggaacaaagagaaaacaagccaaccagcatatattcagcacatcacaacgagttgtcccggtagacatttcattcaccaggaccagatgctgaccttggaaaagtcaggtttacccagtctgaaaagcccttccgagggtgcacttttaaaaactgcaaactgtcgggaaccccagcagctgaaggaggtattcgcagccagccacccttgacattcacccggagcgccggcgcgggaggcagggtgggcgaaggaccccatcaggagaggctacccgacgaaggggccatccggagaggctaccgaagtatctatcaggcatgctcttagaaggagcaaacggacacacacaggttacctgttcctggcgggcagaggcttgattggagtaagctgtagaaaattggagaaagcccgggagtgtataaatagcaaaggcctcccagttggcgacaaagttatgcaacctcgttttttcagaagcgctttcccacttcaccagacacaaaactttagtctctccagtcttctttttttttcaaacaaacaaacaacaagggttgacacttttgttgggtagtgtgtgcgagaaagatctgcagggttgcagcgatgtcccagagcggtcgctgccatccccgggcactgccgtggagctcagacggccgcagcccggctggcggctgctttcagccagcgcagcgacccgggcctgagcccccacttccagccgcccccacctctaacagggggacagtccgccttgaaaggggccagccgagccgcgtcaaggccatctggagccccggccggcatccaagccttccagcccaggggctccgggcgggggtggcttccagccctctgagccctggccacaggtgggcggcggcctggagggggaccgaggagcagagcacccccacccgcccagccccgggcaggcccggcaggcgcgctcctccactgacctgcgggcggcttgggggcggcgcggaacagctgcatctcgcgcccagctccagcccgcctgccctccatggcgccgactgcccggcccggccttcccgcggcgtccccgacagctcgctgcctcccggcctccccggccctccctgtgcgccgcgggcgccgttcccgcgacacccgacgccccggggcagcgccccgcgggctcacctgggggacagcggggagcggccgcagctccggtgtccgcggcgagggcgcagggcgagtcagcgagcgactccagcagcctcgagccccgctccgcccagagtcagacgggaggagagcgccccgtccgccgcccgcgcatcctcccgcccccgccgctttaactcgtgaccctactcccggctcgggttcccgccgcgccctgtcgggggccgcttttcaggagcacaggtgggacgcaggaggccgtccggaggaagccggcgttgtgcccgttccctgccacccccaccctatcactcccttcattttctccctgagcaacccgcaccgccctgctcgggtttgccaggtttgctccggagctgccgccggcgccggggggccaccccctcctggccaaggcccctcaggtggttgccgggctccgcgggtgcgggatctatagcgcctagctccggtgagtgtgaggccccgctgcagcctcccattctgatttttgcatacaaggtgaaatcttgaatgtcttagcgtttcaagcctgaaccttgttccctccctgggtcttctagtttcagacaagtgctgtgaaatgagtggacagtcgactagactcttctgtagattggcggctggggcagaaagagccctgggaaacttttccaagaaatgtaaatagaaatacctgaagtagactttgaaccgtaatctttttcttcataaattatctgtaaatattaaacctaataccccttatcaggattggatcaggaactttggttaattttaattataattactttggatgtgttctgatttttaatttttacttattttttttttttggccacgggtaaatttgtaaaggtcactgaatttccctactagggtattcctgaaattagatcgatacctagcaaaccttttataaaacctgttttcaaatcctaaaccagtatgcatggattactaataaatttttgcaacagggtacaagaattttatgctgttcctcaacctggatcccacatactgtgaacaaggtagatacccagaaaggatataattggcacagtcaattctcaagtgcaatttggaaaatataatgtaatctttaatccccatatgcctacacacgatgtaacgctatctccttacttgatggtaagagtttgaaatgcttgattgttcaggaacaatctgaactttgaagaggttcacagtcataaatgatggcacttgcttaaccctcgttttagctgagttataaggaccggtgaatagataaagccaggttttggagtcagacagatgagggcccaaattcccttctgtgccacttattggtctctagggagttacttaccttctctgaaccccttttcttttttatgtgcaatctgtgaagttagccgagagaaaggacgagagagagagagagagagggagagagagaccgagagagaccgagacccaagttcaggcaagcctttattcaacctgccggctgctccattacagacagaggaggcagccctgagcttacaaaatgagggttttatgtgggggagagagaccctggagttgtttgttggttaactctgccacatatcaccttgtgacgtttatggtaccggagggtgtaggtaaagtttgtttatacttcccacgacctcccactgtgcagtccggatggtttgtaattgggtttgctttatagcagcaagacctgataggtaaaagtctcctggcttcaccgcggtgcctagataggggcttagaaatgtaaaaaggtttgggggaagaggaggggtggtacggagaggtttgcgggggtggggggcgggggtgttggcagtaccaagaagcttttttggggtagcttgtccctaacacaatctagctaataaaaggaatggtgatttttaattaatatgatacatgtaaagcacccattactatatgaggcatatgtgatgtgcttataaatgctgattcccccttttatttggaaaacttaatgaaaatatcaaccatgttcataaattacaagactcagtattattaagatgtcagttttcaccaagttcatttatagattcaacccaatctcaatgaaaattctagcaaactgttttgtagaaattgacaacctgattctaaaattcctatggaagcaaatgcaaagaatccagaataaccaaagcaattttttaaaagaaagataaaactggaggatttatcctacctatatctataaagctatttaagctaaacaacttggtactggtgaagacagacatatagactacacataggcaatggaacaaaatagaatccagaaatagattcacacatatatggtcaattgatttctgacaaagatgttaaaacaatgtaaaggggaatattaaaccttaacaatcaacataatgatgttactggcttaaaggaatatattgaaaccaaatcaaaagaaagacaggaaacgctgacatcaaaggtttacataaacattcctggaaagcaagagaggagtgcataaaagagaagcggtaaagatcttatcagtcaatcttgcttttaacttttacaatgttataagtttgtgtttctggacttgtcagtgagtcattcttgtaaataaacatcaatacatttatagtcatagaatacatttgtttttgtttttgttttttgaaacagggtctagctctattgcccaggctggagtacagttgctcgatctcagctcactgcaacctctgcgtcccgggctcaagtgattctcctgcctcagcctcccgagtagctgggattacaggcacatgccaccatgcccacctaatttttgtatttttagtagagatgcagtttcaccatgttggccaggctggtcttgaactcctgaccttaggtgatccacccacgtcggcctcccgaagtgctgggattataggcatgagccaccccacctggcctcaacatatgtttctatgtaatgcttttgttgttgctagaatatccaaatggtatcttactattataacacattttggtggacgactgactacgtatacaacacttctcataagattataacagagttgaaaaactcctatcacctagtgatgtaataatgtcaccgcaataacgttgtagagcaatgcgttatccacctatttgtggggatgctggtgtaaataaactactactgcactgccagtctataaaagtgtagaacatacagttatgtgcagtacataatacttgacaatgataataagcaaccatgtgattggcttacatatttactatactattatcattattttagagtatacttctgcttgaaaaaaaaaagccagctgtcaaatagcctcaggatgatttccagaagaagattgtgttatcataggagatgacacttccatgcctgttattacccctggacatcttccagtgagataagatgtggaggtagaagacagtgatattgttaatcctgaccttgtgtaagcctatgctaatgtctgtgtttttgtcttagtttttaacaaaaaaaagttttaaaacattgaaaaatagaaagaagcttgtagaataaggatataaataaaatatttttgtatagctgtacaatatgtttgtgttttaagctgtgttattacaaaagaaagtttactcattttaaaagtttggccaggcacggtggctcacgcctgtaatcccagcactttgggaggccaaggtgggtggatcacaaggtcaggagttcaagaccagcctggccaatatggcgaaaccctgtctctactaaaaatacaaaaattagccgggcttggtggtgggtgcctgtagttccagctactctggaggctgaggcaggagaatcacttgaacccaggaggcggaggttgcagtgagccaagattgcaccactgtactccaacctgggtgacagagggagactccgtctcaaacaaaaataaaataaaaataaaataaataaaagttcataccatttccattgtgcaatgaaaaataaataaatgaataaataatttaaaattttaggccaggagaggtggcttatccctgtttatcccagcacttgagaggccaaggtgggaggcctgcttgagtccaggagatcgagaccagcctgagcaacattgggagaccccatctctacaaaaatttttaaaaatatccaaggatgatggcatgtgcctgtagtcccagctactctggaggctgaggtgggagaatcactgtgtccaggaggtcgaggctgcagtgagccatgattgtgccactgcactctagcctgggcgacagagcaagaccctgtctcaaaaataaaaagtttataaagtaaaaaacttacagtaagctaacattaatttattattaaaggaagaaaaatgtttaaaataaatttagtgtagtctaagtgtacatgtttataatttatggtagtgtacagtaatgacctaggccttcacgttcactcactgcttacctactgactcacccagagcaacttccactcctgcaagcttcattcatggtaagtctcctatacaggtgtaccatttttaatctttttttttttttttttgagacagagtctcgctctgttgcccacgctggagtgcagtggcacgatctcagctctgcaagctccgcctcccaggttcacgccattctcctgcctcagcctcccaagtagctgggattacagccacctgccaccacgcctggctaattttttgtatttttagtagagacggggtttcaccgtgttagccaggatggtcttgatctcctgaccttgtgatccacccgtctcagcctcccaaagtgctgggattacaggcgtgagccaccgcgcccggcccccatttttaatcttttatatcatattttgactgtaccttttctatatttagatatgtttacatacacaaatactaaacactgtgttccagatgcctacagtattcagtaaggtagcatgctgtacaggtttgtagcctgggaataataggctacgctatatagcctcggtgtatagaaagctatcccatctacgtttgtgtaagtacactctatgatgttcatacaacgacaaaattacctaacaatgcacttgttacgacatatccccatcattaagctatgcataactgtatttgaatacccaatcttgttttctgcattttccatagtttgaatattcactgaagggtttagttctttgtaaaacaaaatattttttttgttaaaaaagtaaacgagcttatataaagcaacagataccccaacgtccaatctgataatactttggaagcacgtttaacaagtgaactgacatgaagtgcaaaatgagagaaattttctctcatctggaatatctgtcacaaagcaaagatgaaatctatcagataaggaaattgttttatgtgttttaaattgtcacttgaagaattattttttaattaaaatttagaattttttatttagaatttattttgcattgatgcttccttcctttaatgatttttactatgaaatatctatgacaggtagtgatcattatcatatataatcaaatatatactgttcttcagtatgttggctgataataataatcatgcttttattatcttttttaaaccaaaataaacctctgaaacttttagtataatcctagcacagaaaagattcagtttattgttatggttactcattatgtttttaaaacatgtaaagtgttatgaaaactacaaaataacttatgatttcaagaattccaattttttgctcctgaatctcaagccaatagatctctatgacattcttcatatctgctgggtgaaagggagcttttttcactccttatcttcgcattcaaaattcctatctgttttagaataacagctcagctgaaaatgtcaggtagcctgggtattaaatcacacatttgtaaacccaaaatactttttacgtttctgtcttcttacatccgtaccattcatctttctccccttaatttcttctttttctctcaacaaaatttttatttatttaacacatacatatttagcgagtatttattgaggactcctatttttcagtaatggtattagatactgccaatgaaaatattaataaaatatagttgctgttcttaaggatcttacagtctagaagatgattttttaattttgagaaaatttcaaatacagaaaagtacaaaaataacaatacattaatgccattcaatacccacaaccccccaaattgaacaaattttatattttcttttgtttttggccttcctaatttatgaggaataaagcattataaagttaaccaactgatacggtttggctgtgtctccacccagatctcatcttgaattgtaatccccataatccccacatgtcaacggagagaccctgtgggaggtgattggaccatgtgggcggtttcccccaggctgttctcatgatagtgagtgagttctcaggagatctgatgtttttataagtttttgacagttcctccttcacacactcacactctcctgccgccttgtgaagaagatgcctgcttcttctgccatgattataagtttcctgaggcctccccagctatgtgaaactgtgagtcaattaaacttactttgtttataaattacccagtctcaggtagtatctttgtagcagtgtgagaatggactaatacaccaaccctctgcaagtgcaaccttctatcatgaattggtgtgaatcatttcagtccatttgtaatacttttcttgaatatatgttcccattatatataggaatcattcatgcatgtttttgtttacaaagatagcattgctctgtacctaatctttatcacttaccttaccagtttgtcttaagctatatccatccaagtttattttagcagctgtatgccattttattgattataccatatcattctatgcattttactgctgatggacatttaggtttctgccatcttttgccattacaaaaaacaaaaaaaattcagcagtgaacatccatgaatcatttccttatgcacgtgtgtaaaattttctctagggtaaatatccagaagtagaattgctagattataggaggtattcatttttagttaatatatactgccaaattactctccaaggtggttgttccaaatcctttaatgaacatttgtggcataccttctatatgccaacatagacttagacactgggacaggaggagtaagcacggcaaaaatccctgcccttgtagagttcacattttagtggacaaaaacagtcaaacataagtacatagtgtgttagaaggtgataaatattatgagtaaaaataaaacggagaaaggagaatgaggaaggctgagaagttggcattttaaaaagagtggagagtaggcctcactgagaagttaacatcttagcaaaaacttgaaggatatcttgtttaagttctccaggcagagggaacagccaatgcaaaagaggagatgcctacctagtgtgtttgagtaacctcaaggacaccagtgtgtctgcagtggtgtgagctgcagggagtaatggtaggaaatgaagcttgtaacaggaaccaggttatgctggaccttggccattgtgaggaccttggcttttaaatggaatgaaattggagctgttggagggtattgagcagaagactgacatgatatgacttgttttaaaagtgcatccctctgactgcaatgttgaaaatatatcctaaaagtatgaaggatggaagaagaggtgtgaagtatgactcttaagtttgtgcaaagtgaccctgaagatgaaattgccatcagctaagatgaaaaagatggcaggaggagcaggtatctggggagaaccagcagttcagtttttagtgtgtttttgagatgtctgtaaagtgcttctcagactatctgttaaagggttagttgacttggttttgttttcatttctttcacagactaataattctgtaaaattacaacataaataaattgctaaaagaatgaaataaggacgtttgtaatacgaatctcaattttgttcatacataacataaagttactgtgtcaatttgctaaaaagtttttaaacacccaatttcagtactacttttattgcagctgggtaacaattatttcataaactagtggtctagtagcaaatatttcctggctggcattgaaggaaaggccaggctttagataactatgtattaaacatccaagtggaaatgtctcgtagacagttggatactcaaatctacttttaatagtcaccaaaggacagaagtaatgtctatacattcattttgaacagaattttgattaattctggttccacagctattcattgagaatatgccacatttgaagcactatctggtttttcatggcaatgctatgaggaagggacagattaaaatctgtgggcaatctggacaggctagtaatttggtatctgttcatactaataccccttaaaaatgtgttcactgtttttctagtggaaatagggaaaaactgatttttgttaataaacatatatattctttctttacatttgaaacaacttattaaaaacacacttttccaaactagacaacttttggggagagtgctgaactattcaaaatataagtatcaggccgggcacagtggctcatgcccataatcccatcactttgggaagccaagccaggcagatcacttgaggtcaggagttcaagaccaggctggccaaaatggtgaaaccccatctctactaaaaatacaaaaaaattagctggacgtggtggcacacacctataatcccagctactcaggaggctgaggcacaagaatcgcttgaacttgggaggctgaggttgcagtgagccaagatcatgccactgctctccagcctgggtgacaaagcaagactccatcttgaaaaaattaaatcaaaatgtaggtatcaacgcaggctgaactcaggaatgggagtattgccttttggttgaccctcatgattggtacttttacatggcaaaatttttcaacatagattttatttcatatctgaagctatttggttgagagaagaatacatttatgtctctcctggcatgtaaaaatttccctatggaaacccaaactaactgacaacctattcacaattcactacagggaagtttggtatcttttgaagaatgccccttagggcagcattggttgccctcacccttagttgttcaatgtggttgctcttgccctttatctggcctggctctgatgaaagcattatcatctcaaattttgcagatgagatttagagagtttaataacttgtctaatgccacctatgcagaaagtgacaaatttaggcttcaacataatttccttactttaaatacaatatttgagtgacttcactttaaaaaatatttaagtgctctaatgacaataaaaattatacatgtagaactgatattcactggcttttaatgctttatgatattgtaggactgtcactaccatacaatgattctcccaccaccaactatttctgggtgtagagagttaagtctcagccatactgacaagtaagtccactctgctaccacatggccctgtttttacctccacagctcttgctttggcccttctggagatatctactgcctgaagactgcagatgagtgctagagccctgccttctcttatgggaaggaccagcaattctggagccacatggggcctgtgtcctccttagtccccagtagactcaagctattctgtgcagttaagaatgcctttctcctgactttaatgttgtatagatcctaatttctcattgatgttctagtccatttttttttctagaattgccaaaattggccctttcttccaacagctaaatctttgtcccagggtcaggcttttttgtctctttttctcctttctgaagctgagtactcttcagatgattctcacttcctcatgcaataggttgtggtagtttccccaagtgcttggaaaatatgtagtaatcccagcagtttagggctcaaacaagaacatttctcccttccagacataaaatagggtcctccacgcctagtttctgagctaactttttaaaaaaatccataaaaagaatgagtcactcaccaaaataactagtaaaaatctacctcatatcaatttatcagattgtccttttgtaaacccaatctgaaacttatcaagatgtccttaaagaatcagagaaatattttcaattatgacttcttgactctttagatgttcactcaatcaataaaactaaaactaatttttacatatcttcaagtttcagggaaattcaattcaacctcccctggaaaagcatggacacattcactagctaccatgatgatatttcatttctgaccactcccatgaaagaacagatggtcaatcaatcatgaatttgtaacatgaagaaatttctaaacatttccaatttaacttttaactttcttggtattgtgacttatgactcattccatcaaatggacatcctcttggcatgtctctaaagaaaagatgacagaaggccttggtgtctcagccagatcacaaggttatataattcttacttccttaaatctgaccgtgaaggattataattttttttaaggaaagcaaattatttggaaaaatacaaagaagcttctgttagagtttcttttagatttacttccaagaatagtaaatcaattacataattaaatatatgttttattaaatacctatgtccagccggccatggcggctcacatctgtaatcccagcactttgggacaccaaggcttgggcccagaagttcaagaccagcctgggcaacatagtgagatccccactctaaacaacaataacaaaccaaaatctatgtttgacattatatcacagtgtgatataaaggatataaaggaaatataaagtaatgagacaccatccctgccttaaagtctagagggggagacatctatctaaacaagctattgcaacacaatgtaatacttgctataatggaaaaatagaggaaagagtgtctaattctaccgagtgcctgtatggctggacagagaaggtgacatttgagttgggtcttgaaaaataaatagtcatttaccaagtaatgaggatgaagaaaggcattacagatggaggcagaggtagaagtggtggcacctggatgagcagacacacagttgtaacccagcacagcacaggggaccagtcaggagctgtgtaaccagagctctggctctcaacctgagacccacacactcctggacctgcacagcagtatgtcaggggctgtgcaaaaccacaggatgagcatgtcacagttgcctaaggtttctttgtgtttattcagttttctgtcaattttagttaatagtggctttagacatttttttaaaaattgaaacaaacacgaatccattgcaaagccaaatgcaaaaacttcataaattctttatatgaaacaaatatgtctcagttgcagaagtctatttcatgttataaaccttctttccatcaacctactactcactcctggcccctgtgatttcctgctccttggctgttaagggtcttcagttaagaagcactggactaaaatgtgggttgggctggggacagaggcaggaaatgaggttagaaaaataactaattaccttccagatttatttccagtgtctttcagaaccctgtttatacagggtttcatatgccagattgagcatatttaagcagggtgacgtcaggattcaaactatggaaaattatgtggcaacttggcaaataaattagagggaaagagatagaacaagtcaaaagactattgctaccgtctaggtgagagataaggcatatctgaaataaggcagaggcagaggatggctaagagaaaatggattatttgagagacaattaagaaagaaaaatgacagaacttaaatgatatgttgactgtgggcagtagaagaggagtcaaggatgactttcagatttcgttttgcaactgatggacaatgatactattacctagggtagaaaataaagaaggaaaaaaagtttctgaaagataatgagttgactttggctctgctaagttgtggtgctatggtcattcattcattcactacatttaatctttatttagcatctattaaacaacatgaactgaactacacaggtagttggaaatgtccagtagctagaggaaattcaggtatggaatttaagagatatgttaggctgagaatgtagaaatggaagtccagtgtgtttagtggtgatggctgaagctaaggggaatatatgatgccgacgccaccaggagagtgcgaagagtgacaaaagaagactcaagactgagcccaggggaaaacgaatcttccacttcctgggagtggacaagctggaaaaaagttgtcagaatgtttagataatacctcttttttagtttttttccttcataatttgtattgtaaaattcatttgaattttgtgaacacaaattcttcagaaatttgaaagaatctatataatctttctgcacataacgtaaaaatcttcattcaggatccttaaagtctcatatgttataaatgattagcctcttctcaattaaagattttatttaaattgggtgtaaaaattaatttagaccaattacagaagtcaattacattgctttattaaattctgccagtttacaaattaggaagttattattattattattttttaagacggaccctcgctctgtcgcccaggctggagtgcagtggtgcgatcttggctcccaggttcaagcgattctcctgcctcagccttctgagtcgctgggacttacaggtgcacgccaccacgcctggctaatttttttgtatttttagtagagacggggtttcaccgtgttagccaggatagtctcgatctcctgacctcgtgatctgccttcctcagcctcccaaagtgctgggattacaggcatgagccaccgcagcagccccctgaactctcatatgttataaatgatcagccttttctcaattaaagattttatttaaattaggtgtgaaaatttatttacaccaattacagcagtcaattacattactttattaaattctgccactttacaaattagacagttataattattttttaagggaaaggaggagaacagtgttcagagagttgagcgtcactgtatgaatcccaccggactcctaatcacagataaaatgaaccttgggttactcacggattcaagtttcttccccggagactcatatttacagcttgagtcaaattctaaacaaaagttattctggcaagaaggaaatgtaacccattagggttctggggcgcccacgacaaccagtggggcgcagcttcctctccactccctaggagggcccagctcgctgcagggggtgggcaggaaagctgcccgaaaggattctgagcgggcagcctccttaacattttctctcctggttcctagggtccacaccccagaaagattcttctctggctgagattgcggtgggtgtgaggcatggaccgagcctgttagacctggggtcaggccgggccactgtcattaatatacttaagacacaaaactctttccttggtagtggaaagctgctggcctcacccggttcgcgttgagtgacgtcacatagtggcaaccaatcacaagtctgctttgaaagatactgttagggagcggacactgtattggtagagatgctctgtcagtctcgcagaggactcgcctcttttctcttagcgacagatgcgtcctggcaacagtcggcagagttgctgcggtttgtgcccttgcgatttctttttctgagagaggagagtcaaactcccacctccagctctcgaaggagcttttcctgagggcactgcaaagaggctccttttctttcagatcagcagtatcaggtaagagaagctctgaatgggaaaggcggcttggaaaacaagtattttactcactctttcaagggtatttgaacactcgctgtgtcagcaatgtgctaggctagtggcagtgaagactacaaaaaacacaagtctttccctgctttcaaagagcttccagcctcgtgagggaaacaaaaatagcaacgagagagcagttaacgacactctaagaactttaagggcatgtactgtcttgttcccatgttatatatacccagtgactatcatattgcctagtacatagtaggaactcaataaaccatgaatgagtcagttaatgaatgaatgaatgaatgaatgaatgaatgaatgccaaaacagcatgattctgattatccgtctaggggcgggggtcaaacaataaaagattaatgtgggctgaaatagattacttcaggactgtttagaaagggctagagtagataaacagtgaggaagatgaacagggaacacaaactctttgaaagtaaggacattgtcttattcccctagtgactagtttacccagtacctaattgctgcgcaatactttctccttcttcttgtgtatggtgaatgctaaatgaattcacagcaatcttttaggaagctcagagtttgaagccctctgcctttgcagaggcctgacataagtaattacacatagtatgactggaaagtgtcagggagaacaagattgtttcagcctgagtgaggaagtcagggaggctttcggctttgggggaaaagttcataattgccttgaatgatgagaaagattgaagcaagcagagagatgcctgcatggtgtggaccaggagcagcaggaggggtgggagggaaggggattctccagagagggaggtgggaaagtcctcgactgtttgggaatgaatggaaaccgtgtgaggctggaatagaactggaaaggttgacgcagtgaggcacactgtgaaagtactgaaggccatacttatgtgagttcagactctattttgttttgcaaaatctggtgtatagaccaccagtgcaagactgtctcacaatgcttttaaaaatgcggagtcccaggctcaacccagaccagcaaaatcaaaggaggtccaggaaatttgcatttcaaatgagctccatttctacaatctggaagagaatgctactgtgaatgatagggacccataaaaagtcattatacagggaagagacttgataagagatgcatttttggagagctctgaggttggcctcttgagtagttgttctggttagaacagaggcagagaggccagttaagtgtccatgatctagggcagaggattcagggaggagaatctgtggatttttttaattacatatttattttcactaaccaccaattgaaatgtattcaattggtaacaaaccacagtagtactcacaggcctgtgactttgttagtaactcttttcatattacattaaagagattgtaaatatattatttatactcatcattacctcacaattaaggtagttattagaaccacagctagattttgttatttaacgtgttaataaagtacaaattattttatcataatttaaaaaatattttaataactatatttccatataatctgtcttctttgtaatcccatgtttttatttgatgcatgggcttcaccaggctgccaaaggttcatggcacaaaacagggttggagctccagttttggaggacatgttaaagacctgaaccagaggaggctgtgggagagaagggcttggaattcagaagatatttggaagggagaagtaataggatagcatctactcaaataagtgaatatccaatcttggaaagaagtggaaataggtatggaaggaaggaaacaagagtatagactaatagacattgtaggaatagttgtctctaggggtggatgttgtatacttgccaaaatatggctgaaggacccaggagaatcttgaagtttaatcagggtcttagtgaagatttactgagaatcaatagttcttgcagacgcatttaccagaggcccaagatgttagtcttgggttttattctaaatcaatgtttgtttgtttgtttgtttgtttgttttaaagatatccctggagaggtacctcacgtctataattccagcattttgggaggccgaggcaggaggattgcttgaggccaggagttctagaccagcctgggcaacgaagccagacctcacctcttaaaaataaaataaaaagctgggtgcagtgactcacgcctgtaatcccagcactttgggaggccgaggcaggcagatcacctgaggtcaggagttcaagaccagcctggccaacatggcaaaaccccatctctactaaaaaataaaaaattagctgggcatgttggtggacacctgtaatcccagctacttgggaggctgaggcaggagaatcgcttgaacccgggaggcggaggttgcaatgagctgagattacgccattgcactccagcctgggtgacagagcaagactctgtctcaatttaaataaataaataaatgtagaaagatggaaacaagcattatgagcttataaattatttgggaagaggaaagaggatgatgaccacctagatgaggtcagctaattgaagaagacctgggaagataagactttcgtaaggaagaacccagttaaagagaaggtgccagtgctacaagtcctttcataatcaagatctcttggctgggaataagccacacatacacacaggcaacaaatgagagcatgtaaacaggtgtgtgctatcaacctagatagcaagcagagagggggactctctaaaataaaatgtttatttgagaataggcattaacaatgggaagatgcatgcggtagtaaactatatgtatattcagggagataaaaggacacaaacgtttttaaaggaaaaatgaggaggattatgtcattgtcttcagatagttatccttggctacagaatcagtgacaagggtggcaccagtctgaggttggacaggcagttcctgggcagatatccttgcagaagtatttgtgtgtgtgtgtgtagagtggcaatggcctttatgcaagtttgtgattctgtatagtcttttgtgatagttcttgttatcaggcatttgtgacatatactcccttcatggccttccctagctgtgtttgtctgagtttttaacacaagtggctccatgctgattctgacaactttcacaatgcattgcatgaataaagtgaagagaggagattaatagctgtttaaatcactgtattatgacaatttaatttatgttacttatgccttcatctatagtagttcacctcctgaataatagaagcatcataaaaggatatagtcatgggcaagttggagagttagtttggaagcagatcgtagacagctgtgaatgcagggttcctcgtaatcaagtggtgcaccatcacaggttttgatctgttatgcaggggacttacccaatacacacttttgtcaacctctaatgtctcttgttgttaacgtagaatctagaaaatgtgacctttgtgcattgatggcaaaaggtgttctgaaatgggtaaattaatttacaaagaaaataagtagtttaaatatcaagaatatttttaataaaaatgcttaaacatttctaagtgttaccttccaaaatttctattttgaaatacactcagctctagtggtttgaaaaccagtcaaaacacaagccactgggttaggcacaacattgattttaggagtagacgaattatctcttctgctactcttttttttttttttttttttttttttgagatggagtcttgctctgttgcccaggctggagtgcagtggcatgacctcggctcactgcaagctccgtctgcctcctgagttcacaccattctcctgtctcagcctcccgagtagctgagactacaggcgcctgccaccacgcctggataatttttttgtatttttaatagagacgggggtttcactgtgttagccaggatggtcttgatctcctgacctcatgatctgcccgcctcggcctcccaaagttttgggattacaggcgtgagccactgcacctggcctcttctgcgactcttaataattacaaattgatttcagctgggaacagaaaaaatgttatgcatatttcaaagtaaacttagactaaagtaggattggatattgaaaattttttcataagcttttaatatgcaacttaatagaaaaaagtttgttaaatataacacatttatgaaatattcaattaattttatgaaaaaaacttcagtaagccctgctataatttgaaagtaatatctttgttggggatttgtttttaaaaagaaagatctacataaaaaataaaccttgaataaatgtgtttattgaaattataaaaagtgtattattcatttggtttcgatacccccaattaaaagttatttattttctagacataatgttggtaggattttcattatttacaattactaaaataaactgcaaaattttgcctgaaactgaaatacaatataaggtggctactcccaaagtaatcattttcctttcagtttagactatattcaccgggctctcttcagcttataaatgtttctatcgatggtgcctagaaatgtagatattatgctttttagtgaagaagaattaagacccctaaaagcctttagaacaacctggtcactagtacctggtcactagtcactctgcccttagtcactagtcagtaatttagacagaagtcaattaacatttgtgaaagtagtaaatgagctgttcaggtaaggcagcttgcattaatgcacattccaattttggtgcctaatttattgccaaaaatttgactttgtttttccctgaaaactggaaactcaaattatctacagagtatttaatagcagcgtttgaaaagaacaggacacttgtttactttgattgtttgggggatgattgtaaactgatacctgtattcaagtttaattctacggcagcacttcttaattcctggaacctgtggatatgttaccatatatggcaaagaagtaaagtcacagatgaaattaagatcagcggaacttaacatagggagattatcctggattatctaggtaggcccagtgtagtcacaagggtccttaaaagtgaaagacaaagaagaggttagagtatgctatgtgagacttaactctcccttctgactttgaagttggaggttgggggccacaaaccaagaagtgctggtgggctctagagattggaaaaggcaagaaagcagattctctcttagaggctctggaaagaaaggaatgcagccccactgactctggtttaagtccagtgagacctgtgtcagatatctgaactacaaagctgtaagataatagatttgtgtagttttaagtcacaaaatttgtggtaatttgttacagcattaagagaaaactaatacagcatgactatagagtattccacagaccattaggtagaagccttttgtttagactggaaattcataggctaagcatggcagaagggaaggaggaccaaggagttattaatctaacttttttttttttttagtatgttcactgtgctagttacagggattacaaaaattggaaagaaaatacaatccccatgctcacagagtttatagtctagtttgcagtctaacttcatataccttcagttgaactcctgaacttctctttcaaatctgctgttcccatgggatctccatctcaataaatagcaactccatgctttcaatttcttaggcaaaattcattgatgttatccttctcataagcgatatgttcaagtcaccagtgaatcttattgggtctacttaacaaaaatacccagaatccagtcacttttcccatatcactttcacctgcctgatctaagcaccctcatctctcccatggatttttaaatgtctcgcagctggatttcctgcttcagccttttccttgctgcagtcttttctcaacacagcagtcatattgatccttaaattgtgggacagatggagtaaagtaacttctcagctcaaaaccatccaatagctctccacctcattcagagtgaaagccaaggtcctaatacacgacctagccccccttgtggtatattatatagctgtttccaattatatcattcccagccactacctcccgtacctgtaagaggatcatacattcccaccttctgccaatcaggcagagaatccctcccccattatcaggattgacttacttgcttaggccaatagaatgtgaacaggaggcacaacatgtcagtgccaaggagaaagttaggaagcattatgtagttccattagctctcttgcttttttctctgctgtgaaagtggtatgtgtgaaataaggcctgcttcttcagcctggatcccggaataagaagacttgcagcagctcatccacaccacagtgcatagcatgagaagaaataaatgtttgttaccgtatgtcactgagatgtaggggtcatttgttactgcagcaaagctgactaatatatccctgtcacctttctgaccagctttgcctgtagtctttccctgactctgctccagccatcatgaccttcttgctgttttcttaaatatgccaggcatgatccttccccagaacctttaaacatactgttccctccacctgaaaatactcttcctctcccagatatctgtgtttcttgctttctcctttttcagatctttgttccaatgtccagttccttttcttaccttatttttctccttagtagttcttaaaatactagttatattttcctcctttatttgtttatttgttctgtcttcccctagaatgtgagcttgcacaaggggttttgcctattttgttcactgctgtatccctaacacctaggatagcatctggtgcagcatagtcactcaatatatatatgtggaataaatagtggtggtggtgatggtgtgtgcgtggggtgaggctaagtggtgtgaagagtttttcaccatgttggccaggttgatctcgaactcctgacctcgcgatccacccacctcggcctcccaaaatgctgggattacagccatgagcgtgccacatactccagcctgggcgacagagcaagactctgtcttggggaaaaaaagaaagtttttcaagtattttacatcaaactaaaatgcagctgggatagcatatggagaaggggtacattgataaggaatcttctgaaaaaaaggaatagatgaaagatttgaaattatgctaagactgggaagtgatatggaggacatttgacagtctaaagagttgagtcagatccattcattgcagaatatcttaaaaatagaaattgtcagaatcataaaatattgattagataataaaatcctgctttttagctgggcgcggtggctcatgcctgtaatcccagcactttgggaggccgaggcgggtggatcaccaggtcaggagttcgagaccagcctggccaatatggtgaagccccgtctctactaaaaatacaaaaattagccgggcgtgctggcgtgcacctgtagtcccagctacttgggaggctgaggcaggagaatcgcttgaacctgggaagcggaggttgcggtgagctgagaccgcgccactgcactccagcctgggcaacagagtgaaactctgtctcaaaaaaaataaaataaaataaaaattcctgccttcctaggtaaagtcaatgatttaaaatagtttcatttgcaatgaaacacagcagttatcattgaaatccaagggatcatctagtacagaggttaagaatgtggctattggagccaggctgcttgggctcacagcctgacaccactgcctattgcgctctgtgtcccttcaggagagtcacctgaacctcttggggcctcgtttttctcattataaaatggagatgaagataatagtaataataaaatgtggttatctagtattcaatagtacagtaggaaaattatagttaaccataatccattgcatatttcaaaatgctagaagaattgtaatgttcccaacacaaagataaatgtttcagatgatggataatcccagttatgctgatttgaccattatacattgtatacatgtatcaaagtatcacatgtacccccaaatatgcacaactattatatgtcaataaaaatgttttaatgtggttaagattaaattaaaaacacaagtaaagtacttggaactgtgcttggcacatagtaagcacttcacaaatgtgagctattatttttatcatttaaaaaaaattcatatgagaaaatctaaagggaagatgtttacacaggaacacagacacactcacatccacactttggacaagattttgtgatccagcatctaggaataaaataaaacttgtgatattttgaccatgggctatgaaataatagtctgtgttgatttgttaaagtgacgcaaaccagtcagagatgattgagttgattgatgacactttatttcattaagtcttcacaatcaccttgtggggtagattttattattatccccattaaatagatgaataaactgagacttagagaaggtaagtaatttgcccaaggttactcagctggaagaagtagagcctgtttaaaaactctgctggccaggctcctgcagtcacactcctaaccatttaaacagaatgggacaaaggtgagcatggcggagatgacaaggatttgatgtcatggtgatgaccttggccagtgttctgtcctgtcaaaattgataagcagttccatggaaaacttttggaggcattctctctgataggccaaataaggccttagtggttttgtgttcacatgctgagataaaagtatgagctcaattacgttaatttaaaaattatatatgcatatgcacactgtgggcctgtcactcccagtggcctatcttgtctttgtagctgggctacctgttgggaagcccagcaaaaggcagcacagagcagctacctggcatgggaacttcagtgagaggcggggaagccaagtcctctgtcgtgcttccatggcaggacctatggctgagactttgttctggcaggtcaccacggtgcgcttcagctaaatggctccaccagaacagtaagatctcatcagtaagattgttgttgcaataagcctttgtcacagaacacccgttctatgaagatacaggttgatttagcccagggtaaatcttagaaaacatattcttatgtttattaaatgataatgtttagtatttgaaattgtaagttgtttgcaaattgtaacaatttactaataatatcatctctttatgcagcccaagtcagaaccatggctccaaaacaaaagaaaaagacatcacgtggcaaaaaaagactaaaaccagtattagctggtaggaatatttcttcattgaatgggattttttgtggagtatttgtgtatatattagcagcaaaatgattatggttttacatatcaaatgaaataaaatatttctgtgacataaagtcaaatgtatgaggaataagatatatggagattcattcttacttttgactaatttcattatgataccaattagatgcgatataatgaatgctgtagtaaacatgtcactaagagataacagtgtgaaagacaattattcagattttctctgtttaattattcacaagatagtttaagtcttcattgtatatttgcacttatattttgtgttttgaggtttggtaaagattatagtaaactggctgggcgcggtggttcacgcctgtaatcccagcactttgggaggccgaggcggttggatcacgaggtcaggagttcgagaccagcctgaccaacatggtgaaaccccgtctctactaaaaatacacaaattagccaggcgtggtggcacgcgcctgtaatcccagctactcaggaggctgaggcaggagaatcacttgaacccgggaggcagaggttgcaatgagcagagatcgcgccactgcactccagcctgggcaacagactgagactccatctcaaaaaaaaaaaaagaaaaataaaaaaaagattggccgggcacagtggctcacgcctgtaatcccagcactttgggaggccaaggtggacggatcacaaggtcaggagatggagaccatcctggttgacacggtgaaaccccgtctctactaaaaatacaaaaaattagccgggtgtggtggcgggcgcctctagtcccagctactcgggaggctgaggcaggagaatggcgtgaacccaggatgtggtgcttgcagtgagctgagatagcgccactgccctccagcctgggcgacagagcaagactccgtctcaaaaaaaaaaaaaaaaaaaagaagaaataaaagattataataaattgagatgtatttgattcaaaaatgtaaatttgacttccttttattatattctagctagtgaagacatggaaccagtaaatatggagagcatgggtaagtggaaatataatttacaacttacatcctcagttttataatattttaataatgcaataagcaagcaggaatactacaaactgaagtgatcaatcaaaatgtacatgggctaaaattataccattccatttagaatataaaatgaaaaatttttaaaagaaaaaatagaagtagagaatttcaaactgagaaataaacttcaaccaagcagttagttaaaaatgcattatatgattattgaaaggccttttataactataaagtgttataagcctgcaacttatgacttttatcagataagtattttttcaaacttttgctcataggtaatatttatctgtacttcacgctaagatgccactatttcaaggaaagaggctggtttttaagcaaataactagaacttagacaactaaactaatgttgttcctacatgtaaaggctaaataatcttacaacaagacttcttttggtgggatggagggggaacctctcccttagagttgacttagatgacacgcttcacttttagaaacagaaaggagacaatgaggggggcaaggaggaagacctaaaagccctgtaggccactgtaaagattttgtcttttaatcgtatggaatgaggaaatattggtagtatttaagcaaagggtgactccatctgacatgtttttaaagggtcaggtcatcctggctactgtgtagcaaattgcaggagcaaggactgaagcagagagactagttaggaagtttttccaacaatccaggggaaagatggtgatgacctgggccagggcagtagagggggcagaggtgtggagtgtggaggtggggagaaagtgggagaatgtcagctaatgtaagtggctctgttatcagcacccagcacagtgcctgcagcaggatatgctgcccaataaatatttattgagttagtgaaacctgggagtcatctttaatttctttctttctctccctccacacctccctacccctttcaaaccaccccaacttatgtgaattccacctgttttaaaatatatctcaaacccatctgcttcatattatcttcccacctgcaaccttagtccaaacctccgcactcctcacatcggttagttcccaaggctcctatttgatatcactgcttccactcagcctccttctgtccatttggcgcacagcagcccaaccatgcttaaactcctctttcttgcttaaactcccccatagtctttctttgccattgggcacaacttgcagtggtcctggctcctgtgctcaagtggtcctgaccttgtttcctcctcctcttcgccaacctacagcccatcagccttgcttagcacagaatgttccaaatttattccagcctcagggccattgcttttgctgtccctgatgcatagatagatcttccctttatgcaactttctctttcttatcattgagatctagactaccatctcacttcctcaagagactttccttgacctctgtgtcacctattaccttgtttaattgctttcatagcacttaaaatcctgaagttaaagtacagtcaattctcgttcgtgtattctatacagtccctttgaatactgaattagccaatactggactattgctcctaggggaaacacagggttaggttcctgtgagcttctgttcacattttcattaactagtcaatacataaccttgttttatgtgtatttctgtttaaagactccttatttaatgtatattgttgattccttaacactgaactcatggccaaatcatggcaaacagcactataactcattactgaataaataaatgagtgaatgagttgtgttccctcttgctcctatctaaatagaccaccacagctacccttcttagttccatctctcatcctgttttctcccagatagcacttatcacaatttgtatttacttatttttgttttttatttattttcttctttttttgtagagatgggttcttgttatgttgcccaggctgtcttgaactcctgggctcaagggatcctcttgccttggcctcccaaagtgctgggattacaggtgtgagctaccatgcccagcccagtttgtatctatgagtgtacttcattgtttattatctgtctctctgtctagattggataccctggcactagcatcatgcttttcacatagtgggtgctcagtaaatatttcttaactaaatgaattgactggtaagaaaatctatgaacctgataaaggggcacagtttgagatgtattcattgaaagtaaatgaactgaaaaataggaatatgtttgcttaagggaaagaaaaaaccaacctcagaacattatggtgagacaagtgtaggttttgagttagcatccccttctcctcaagcctctttctacccccagactcccctcaggtagcatcaggacccctctgacttcctcatggtgggccctgaccttgccaactgttaatcagggctgatggctgtcatgctccaagaaactgagatccctttttctaacaaggagccaaggtatcaataggctaactaaaaaactgtcagtcctaagggcctaacaaggcaatgcccagaggtttctggagaataaatataatttttacacatagctaatatttgtggagcaatgactttctgccaggcccactcttcttattgccttagctctataaagtaggcattatcaaggccattacagacatgaaggtgctgtgactcccgaatgttaaataatttacccaaattataatacgagttagtggtatatgagttgcctattgctgctgtaacaaattgccacaaacttagtggcttaaacaatataaatgtatcatttaacagttctggaaatcaggagtctgaaattactttcaccaggctaatgtcaaggtgtcagcagggctgattatcgctggaggccctgagaggtgaatatgtttccttgcctttttcagcttctagaggccactgtatttattgactcctggccccttccttcctcttcacagccagcagcatagcatctttgagtcattctctatgacctctgtttcccttgtcacatctccttccttgactttgatcctcctgtcaccatcttataaggccccttgggattacactgggccaatgtcaaaggcccagtcatctccccacctcaaaatccttaaccttcagtatctgggataaatgttttaaaaaatgaaaaataaataaataaataaaaagaacataaaaacaaaaacaacaaaaagtagagatccgtaacataattatatccacaaatcccttttcttatgtaaggtaacaatacagaagtgcattagtctgttcacatgcttctaataaagacatacctgagactggataatttatttgaaaaaagaggtttaattgactcacagttctacatggctggggaggcttcacaatcacagtggaaggtgaatgaggagcaaagtcacatcttacacggcagcaggcaagagagcgtgtgtaggaaaacttccctttataaaaccatcaggtctcatgagacttattcactatcatgagaacagcacgggaaagacctgcccccatgattcaattacctcccactacacatgggagttattcaagatgagatttgggtggggacacagcaaaaccatattaacaagtttcaggaattaggacatgaacatattagggggacattattctgtttgccagaagtggttaatagcacaggctttggaattaggcagacctggtttaagtcataaacttatgacttaaagtcatttagtgactgtgtggccacagatgacttcaccttcctgagcctctgcttcttcatctgaaaagcaagatagactatctacctcataagactgatgtggaaattaaattagtagtacatgcacatttccttacatagggctgtcacaaagtaggttcatgttaactctttttactataaaaagatactataaagacagataagtagatcaatgcatgagaatagagtccaaaaatagaccacatgtgcatggtcaattgattttcatcaaagatgcaaagataattcagtggagaagggatagtcttttcaacaaatgatgctggaacagttagatagctgtaagtaagaaagtgaactcaatccatacctcacaccatacacaaaaattaactcaaaaggaatcatagacctaaaggtaaaaccaaatattctaaaacttctagaagaaaacaggagaaaatctttgtgaccttggagttggcaaagatttcccagatatgacacccacagccaaaatcccaagaaatcttaaagctttcttaagattttcttttttaaaatcttaaagatttttttcttttatggaatacttgccagcaatggaatgaaccattgctacgttcaacaatatgaatgaatctcaaaatagttatgctaagaagataaacaaaaagagtacatttataaatattccagaaaaaagcaaactaatctatagtgacaagaaaacagcttagtggttacttggggttacttagggatgaaggaggtgtattggaaggcaggggcaggaggaaacatttgggtcttatgggtatgtactttatcttgattgtggtaatggcttcatggggtatgtgcatatatttatcaacttgtacatattgtatgcagtttatcgtttgtcaattataactcagcaaagctgtttttaaaaaactagatagcaaccaaaatgttaaaaaaaaaaaagaatgtacaattgaaatgtatgagagttgttttaaacaacgctcattatgtaggataatatatgtgtaacctatgatttatattgcatagccttctattgtgtgcacatagtaagattctgaggcatgaattgtgtagagcttgagtctgcctttggttcctgctaggtgaataactgccattcactggatcctatggaacatcatctctgttccctccttgtctatgtgtagagaagcaggaccctctccatggatcttctgtgtccactcattagagagaaagcatagcatagttgagttcagggatcttggttttgatcccagtaccaccactttcaacttccagaggctgaccttggacatgttattgaactctgtggtcctcagttttctcagctaaaaaatggagacaaatatagtaaccacctctgaatgttgttgtgaagactaaatgagttaataatacacataaagtgcttaaaactgtgcctggagcagtaggtgcaccatggaagtgccctcgcagacattgtccttgtgattggcactcctgacttcagtcagcttcagaaggccctgaaggcctcctcctctgcaccaacacttgttttacactccttggagcaaccagcctcccactctgctggaggctccagggagcccatctcattgctgatcacagtggcctcattgctgtagcctatggtgctgttctcagtgtgtgcctcaaagcctacccaatagcagttgttttacagtatttggctggtgaccctttggggtggccagaagcatcaggccttgccctggttagtttagttctcatggcaatggagcatgatggtactggactatagcagttttgtgtgatctgttggctgccagttatctgcagttatcactgtttgccaactcgaagcagaaacagtccactagttttactgacttctagataaaggaatgttagatcctatattagagttgccttgaaaaagtccaattagtgtgaaaggatcattttttgtgtgtgaaaaatatcaagccagtagaattcgaagtgtgtgtttagtaggggcagataacatagaaaacaatctttgatgctgtctttccagtgtcaaggatgataaaaagctttctggtcttctgaatgcctctgttttattagggacagctgccttcttttcggcactagcacagtgtgagtctcacagtcccacctagtggttttctcagacaaaactacagaacttttgttacccattcaacactacaaatgcagtctgtttgcagaggagtacttgattcgaatcaagtcaacagttacttattgagcatcttataagtgccaggtgttatggttagtcttttgagggagataaaagtgtataatttgtccttcactcatgaacaacttgaattcccaatgttatgccaactgactgcagtttgaaatatgcttctgcatataatcagtgttatgcatacagttatttaaaacctccaaattacctgaattattgtatcatagagcccctggggtgggggaaaatatttctattggaaaataagctcaaaattccaacatgagaggccacatacactttcccccttgctggcacatctattgagaagttggagggaggatggcctgacatccaggggcgtgggtgctagaggagatgggagtggaccctgggagttggggagagagtcctggggacagatgcagagctgagactgttgtggctgatgatagtgatatgaaggataaaaaaacaggaagaaggcttgagagaggggagggcagcaggcaaaattctcctttgtcctctagcgtccaccctcccagggcatgctgctgctgaggactggcctgaggcgcaaagaagggatgggaagaccagggatggaagcctcttgaacctctcctctctcctgagagcaatactgggactggcagccagatgggaggaaagggattccctacccactttcctgtgtccaagggtttattaatacaaccaactgagaagccactatttgaaaaatgtgaggaattgagtaacagtaagtttgactgtgaaaaagagaagccctaaagagcagagatccctatataggctcaagggaaagtttcttttctttttctttttctttttttttttttttttttttttgagacagagtctccctctgttgtccaggctggggtgcagtggtgtgatctctgctcactgcaacctccacctcccaggttaacaccattctcctgcctcagcctcccgagtagctgggactacaggcgcgtgccaccatgcctggctaattttttgtatttttagtagagatggggtttcactgtattagccaggatggtctcgatctcctgacctcgtgatccgcctgcctcgagcaggtgtcagccaccgcgcccagctttaagggaaggtttctttaaaatgagagaccattgagcaaatctgcatgctgagggaaagcagcatggaagaaagaaaagctgaaaggaaaggaatagttgaatggatgctggtggctgaggagggcaggtcctctgagtgcataagggcagaaaggtggtgcccattttgattagcaggtgggcagggctgcaggacctggcaggattctgtgctattcagaccctgttttctctgtgaaataaaaagccagtcacctggtaagagagagcagcaggggagagggtgaggttggggtgttttagaaaagtaatacaggctgaaagcctaaacaagtggtcataccttccaacaaataatttcactttttaaatctatcccaagaaaataatttgaaatgcaataaaaatttataactagatatttgtttgtaggattatttacaataattggaaacaagcaagaaaagaaattagaatgcttaccaatacgagaatggtttaaaattatgctatagaattc
